United States Patent Application Publication US 2011/0183924 A1 - sequence listing, part 115

SEQ ID NO: 332401 - DNA, 2449 bp, Homo sapiens
ggtccaggcggcgcgcacggtatggcggcggcggcggcggcggcggcggcgcgcgcctgagaagaggggacgccagcccggtcaggcctcggcgcggcctacacgctccgctcgctcgctcgctcccgcctcccgccccgcgcccggccatggcggagccgtcgtccgcccgacgcccggtgcctctcatcgagtcggagctgtacttccttatcgcccggtacctatcggcgggcccgtgtcggagagcggcccaggtgctggtgcaggagctggagcagtaccagttgttgccgaagagattggactgggagggcaacgagcacaacaggagctacgaggagttggtcttgtccaataagcatgtggctcctgatcatcttttgcaaatctgccagcgcatcggtcctatgttggataaagaaattccacccagtatttcaagagtcacttctttacttggtgcaggaaggcagtctttgctacgtacagcaaaaggtaccttaatttgaagaagtgttctgctttgtattaatagcctaataattattataattgtgaagtaatgtaagcattgtggaagaaaggtgataatgtaactataaatcatgctgtggactataaaattctctgcatttagcatagaacattgaattttattacataagtgtttaatgggtccttctgcattaaaaagttgataaagatatagatgttaagctaaaaagcttgaatttattctgagatgttgtttgaggttttatcaatgtgagttcttaattttccattttgtagctcactcataacttcattgaatgtaattgtatgtgtctaataaactctttaaatgctagaggtatttcatttgatatttagcttctgaaagccctttgttataaagggaagtgattttctaaatttggtagcagcttgaaaacaagcaccacaaatgtaaaattgcatggttctttttttactaatttaatttttttgccaagttatgtgctagcaaaatgtttgaaattgctattctttttctgttagcttggtatatatgacttagactaagtatatgtatgtgatataatatatgtgtacatgtggctaaactgctaatgggcaaagattgttggttcttctgatgctgagtatacatcaagttcatcccatgattattttttattacgagctattgctgatgtgatgctactcttagctgcaccaccagtataaagcttaactgagaaagaacacccctccctcttagttccgtgccagactggtttgttagctttagttgtttcttagtgctctagccatgtcaccctgtggcactaatcaggacactgtttatattcttcctcttctgtgtccctattcactttgtaattattctattttagctggttatatggtagttaattggtagcctgttttcctttgttttctttacttgtgtcaagctccatgtcgttgttttgtgatgagcagtgatttagaactggccagaccttagaagagtcttcagcaagctgccctagggtaggggcatattctctgtttgttttgtactggtaccccaggaggatgccttgtaactgctctttggtcatgatagtggtaatgaatccattcatgtaaaatgcaatatgtctgttagtttggggcacccgaggctcagtagaggtttagtatgatgccttccctttcttctttgagttatgaagaaactaatttctggcacagtgtgactgcttcaaacctatgttctgctgctatctcctatagaggagggcagacttttttttcttagtgcatttgctggtaggtcaaggagggatggactttgaattagtgttcagagtcacagatcctacgtatgtgctcttcagtagaggattttctgtgatcctacaatgaagggaaagctatataatttattggtacttcctaaagatagagactaaagtcatggtagtattggccaaattaattttaaaactgaacaagtcatgaattttcatataaatcaaagaactttttccttataaaagcttccatttttgaaaagttggatcagttgtaagacctttcatctttagtattgtatgatataattctacattgaaaaataaacacttggcattaaatgggacttggagtcaaaagatctggttttatggtccatctttaccaatcatttgctgtggatctctttaaaggtcctggaacctttgagcctcagttacctcacttgtaaattggcaaaaatacctacctcacagggttgttgtgaggattcaatgagctaatgtatgttgaaagcactttgtgaattgtaaagtgctacacaaatgttagttgttgttgctgctgtatctgagatgtcttaattttctttttcttcagaaatagtctaataaacctccagggcttttctgttaaagta

SEQ ID NO: 332402 - DNA, 2154 bp, Homo sapiens
ggtccaggcggcgcgcacggtatggcggcggcggcggcggcggcggcggcgcgcgcctgagaagaggggacgccagcccggtcaggcctcggcgcggcctacacgctccgctcgctcgctcgctcccgcctcccgccccgcgcccggccatggcggagccgtcgtccgcccgacgcccggtgcctctcatcgagtcggagctgtacttccttatcgcccggtacctatcggcgggcccgtgtcggagagcggcccaggtgctggtgcaggagctggagcagtaccagttgttgccgaagagattggactgggagggcaacgagcacaacaggagctacgaggagttggtcttgtccaataagcatgtggctcctgatcatcttttgcaaatctgccagcgcatcggtcctatgttggataaagaaattccacccagtatttcaagagtcacttctttacttggtgcaggaaggcagtctttgctacgtacagcaaaaggtaccttaatttgaagaagtgttctgctttgtattaatagcctaataattattataattgtgaagtaatgtaagcattgtggaagaaaggtgataatgtaactataaatcatgctgtggactataaaattctctgcatttagcatagaacattgaattttattacataagtgtttaatgggtccttctgcattaaaaagttgataaagatatagatgttaagctaaaaagcttgaatttattctgagatgttgtttgaggttttatcaatgtgagttcttaattttccattttgtagctcactcataacttcattgaatgtaattgtatgtgtctaataaactctttaaatgctagaggtatttcatttgatatttagcttctgaaagccctttgttataaagggaagtgattttctaaatttggtagcagcttgaaaacaagcaccacaaatgtaaaattgcatggttctttttttactaatttaatttttttgccaagttatgtgctagcaaaatgtttgaaattgctattctttttctgttagcttggtatatatgacttagactaagtatatgtatgtgatataatatatgtgtacatgtggctaaactgctaatgggcaaagattgttggttcttctgatgctgagtatacatcaagttcatcccatgattattttttattacgagctattgctgatgtgatgctactcttagctgcaccaccagtataaagcttaactgagaaagaacacccctccctcttagttccgtgccagactggtttgttagctttagttgtttcttagtgctctagccatgtcaccctgtggcactaatcaggacactgtttatattcttcctcttctgtgtccctattcactttgtaattattctattttagctggttatatggtagttaattggtagcctgttttcctttgttttctttacttgtgtcaagctccatgtcgttgttttgtgatgagcagtgatttagaactggccagaccttagaagagtcttcagcaagctgccctagggtaggggcatattctctgtttgttttgtactggtaccccaggaggatgccttgtaactgctctttggtcatgatagtggtaatgaatccattcatgtaaaatgcaatatgtctgttagtttggggcacccgaggctcagtagaggtttagtatgatgccttccctttcttctttgagttatgaagaaactaatttctggcacagtgtgactgcttcaaacctatgttctgctgctatctcctatagaggagggcagacttttttttcttagtgcatttgctggtaggtcaaggagggatggactttgaattagtgttcagagtcacagatcctacgtatgtgctcttcagtagaggattttctgtgatcctacaatgaagggaaagctatataatttattggtacttcctaaagatagagactaaagtcatggtagtattggccaaattaattttaaaactgaacaagtcatgaattttcatataaatcaaagaactttttccttataaaagcttccatttttgaaaagttggatcagttgtaagacctttcatctttagtattgtatgatataattctacattgaaaaataaacacttggcattaaatggg

SEQ ID NO: 332403 - DNA, 1398 bp, Homo sapiens
ggtccaggcggcgcgcacggtatggcggcggcggcggcggcggcggcggcgcgcgcctgagaagaggggacgccagcccggtcaggcctcggcgcggcctacacgctccgctcgctcgctcgctcccgcctcccgccccgcgcccggccatggcggagccgtcgtccgcccgacgcccggtgcctctcatcgagtcggagctgtacttccttatcgcccggtacctatcggcgggcccgtgtcggagagcggcccaggtgctggtgcaggagctggagcagtaccagttgttgccgaagagattggactgggagggcaacgagcacaacaggagctacgaggagttggtcttgtccaataagcatgtggctcctgatcatcttttgcaaatctgccagcgcatcggtcctatgttggataaagaaattccacccagtatttcaagagtcacttctttacttggtgcaggaaggcagtctttgctacgtacagcaaaagactgcaggcacacagtttggaagggctctgcctttgctgctcttcatagaggaagacctcctgaaatgccagtgaattatggttccccaccaaatcttgtggagatacatcgaggaaaacaactcacagggtgttccacttttagtacagcatttccaggaactatgtatcagcatataaaaatgcacagaaggattctcggacatctatctgctgtttactgtgtagcatttgataggacaggacatagaatctttacaggttcagatgactgtttggtaaagatttggtcaacacataatggccgcttgttatctacattaagaggtcattctgcagaaatttcagatatggcagtaaactatgagaatacaatgattgctgcggggagctgtgataaaattattagagtgtggtgcttgagaacttgtgccccagttgctgtgctccaaggacacacaggatcaattacatctttacagtttagcccgatggccaaaggctctcaaagatacatggtttccactggtgctgatgggacagtttgcttttggcaatgggatttagaatccttaaaatttagcccacgtcccctgaagttcactgaaaagcctaggccaggcgttcaaatgctttgttcttcttttagtgttggtaagaacttcttcacatttttttcttagttttttttttttaaacatctattaaatgaccacttggttgctaagaacttttattagctacatggtaaatgacttctggtgtttatttcattaggttcaatttatgatgtttattttgttagccttgttcttccagtcctccagtctgcctttctctgatttctggtagtaatcagtgatataagagatggctggtaaaagggaggcttgaggtgtc

SEQ ID NO: 332404 - DNA, 577 bp, Homo sapiens
ccgggcatggtggtgtgagcctgtagtcccagctacttgggaagctgaggcataagaatcgcttgaacatgggaggcgtaggttgcagtgagcggaagattgcacaactgcactcctgactggcaaaagagcaagtctatctcaaaaaaaaaacaaaaacagactaagcaatagcttcatgttgttatagttcaggtcacactgtgccaccaaatgagttcaggtcatataaggttttgccactaaattatttgtgaaaaggaaaaaaaaacctgtagttttcaagagtatttggtatttctaaattgttaagagactgacctgtaatacacatgaggaggactgcctggcacaaaggcaggataggccaggcgcagtggctcatgcccataatcccagcactttgggaggctgaggtgggcagatcacttgaggccaggagttcaagaccagcctgggctacatggcaggtatccatctctacaaaaaaaaaaattaaaaaattacccaggtgtggtggcatttgcctgcaatcccagtgctttgggaggtcgaggcaggaagatcactcgagccc

SEQ ID NO: 332405 - DNA, 6786 bp, Homo sapiens
cccttgtcaccttccacacccacccgccggcctcccttcacccgagggcgactccggctgctctcctttcgatccatggaggaggccagactggtgcccacagtgaaagagaaataccctgtgctgaaggacgtcatggacttcattaaggatcagtcgctctcgcacaggagtgttgtgaaggttctttccctgaggaaagcccaggcccagagcatcctggaagtcctgaagataactcagcactgtgcagaatcccttgggcagccccactgcttccatccacctttcatacttttcctgttggaacttctgacctgtcagaaagattttaccaattattttggacacctggaaggctgtggtgctgatctacacaaagaaattcgagacacttactatcaacttgttctgtttttggtcaaagcagttaaaggatttagtagcctaaatgacaggtccttgctccctgccttatcctgtgttcagacagccctgcttcatcttttggatatgggctgggaacccaatgatctcgccttctttgttgatattcagttaccagatctcctcatgaaaatgtcacaggagaatataagtgtccatgacagtgtgatcagccaatggagtgaagaagatgagcttgctgatgccaagcagaattcagaatggatggatgagtgtcaggatggcatgtttgaggcctggtatgaaaaaatagcccaggaagatccagagaagcagaggaaaatgcacatgttcattgctcgctactgtgacctgttaaatgtggacatctcttgtgatgggtgtgatgagattgccccctggcatcgataccgctgtctgcagtgcagcgacatggatctctgcaaaacttgcttcctaggtggggtgaagcctgagggccacggagacgaccatgaaatggtcaacatggagtttacctgtgaccactgccagggtttgatcataggccggaggatgaactgcaatgtttgcgatgactttgatctttgctacggatgctatgcagcgaagaaatactcctacggccatttgcctacccacagcatcacggcccacccaatggtaaccattcggatcagtgaccggcagaggctcatccagccatatatccataactactcctggctgctctttgctgccctggctctctatagcgcccacctggccagtgcagaggatgtggatggggagaagctggacccccagacgcacagcagtgccaccaccctgcggagccagtgcatgcagctcgtcggggactgtctgatgaaggctcatcagggaaaaggccttaaagctctagctttgctgggtgtattgccagatggggactcgagcctagaagatcaggccctaccagtcactgtgcccaccggagcgtcagaggagcagctagagaagaaagctgtccagggtgctgagctgtcagaagcaggcaatggaaagagagctgttcatgaggaaatcagacctgtagatttcaagcagagaaataaggcagataaaggtgtatcattatcgaaggatccttcatgccagacccaaatttcagattcacctgcagatgctagcccacctacaggacttccagatgctgaagattcagaagtgtcatctcagaagcccatagaggaaaaagcagttactccaagccctgagcaagtgtttgctgagtgttcccagaagaggattttgggattactagcagccatgttacctcccttaaagtcgggccccacggttcccctgatagacctggagcacgtccttccactcatgtttcaggttgtcatctcaaacgcaggccacctgaatgaaacctaccatctcaccctgggtcttctcggccagttaattatccgtcttttgccagcagaggtagacgccgcagtgatcaaagtcctctcagccaaacacaacctgtttgctgcaggggacagttccattgtgccagatggctggaaaaccacccacctgctctttagcctgggagctgtgtgtctggacagccgggtgggcttggactgggcgtgctccatggcagagatcctgcggtcactcaacagtgccccactgtggcgtgatgtcattgccaccttcacagaccactgcatcaagcagctgccattccagctgaagcacaccaacatcttcaccctgctcgtgctggttggcttcccccaggtcctctgtgtgggaacccgctgcgtttatatggataatgccaatgaaccccataatgtgatcatcttgaagcactttactgagaagaacagggctgtgattgttgatgtcaaaactcggaagaggaaaacagtgaaggactaccagctggtccagaagggaggaggacaagagtgtggtgactctcgggcccagctgagccagtactcccagcactttgcctttatcgccagtcaccttctgcaaagcagcatggacagccattgtcccgaggcagtagaagcaacttgggtcctgtccctggccctgaaaggattgtataaaacactaaaggctcacggttttgaggagatccgtgctactttccttcagaccgatttgctgaagttgctggtgaaaaagtgcagcaaagggactggctttagtaaaacgtggctcctccgggacctggaaattttgtccatcatgctgtactcctcaaaaaaggagatcaacgctttggctgagcacggagacctagagctggatgagcgaggggaccgagaggaagaggtggaacggccagtcagcagccctggcgacccagagcagaaaaagctggacccccttgagggcctggatgagcccaccagaatatgtttcttgatggctcatgatgccctcaatgcccctctgcacattctccgggccatatacgaactgcagatgaaaaagaccgattatttcttcctggaggttcagaagaggtttgatggtgatgagctcaccacagatgaaaggatacggtccctggctcagcggtggcagcccagtaagagtctgaggctggaagaacagagcgccaaagctgtggatacagacatgattatcctgccatgcttgtcccggcctgcacgctgtgaccaagccactgctgaatcgaaccctgtgacccagaagctgatctccagcacagagagcgaactgcagcagagctatgccaagcagcgccgtagcaagagcgccgccctcctgcacaaggagctgaactgcaagagtaagagggctgtccgggactacctcttccgagtgaacgaggccacagctgtcctgtacgcccgccacgtgcttgcatccctgctcgccgagtggcctagccacgtgccagtgagcgaggacatcctggagctcagtggccctgcccatatgacctacattttggatatgttcatgcagctggaagaaaagcatgagtgggagaagatcctgcagaaagtgctccagggctgccgagaggacatgctggggaccatggccctggctgcatgccagttcatggaggagccaggaatggaggtgcaagtgagggagtcgaaacacccgtataacaacaacaccaacttcgaggataaagttcacattcctggtgccatctacctctcaatcaaattcgactctcagtgcaacacagaggagggctgtgacgagttagccatgtccagcagcagtgacttccagcaagaccgacacagcttcagcgggtctcagcagaagtggaaagattttgaacttccaggagacactctgtattaccgcttcacctccgacatgagcaacaccgagtggggctacagattcaccgtgacggccggacacctggggcggttccagacaggattcgagattttgaagcagatgttgtcagaagaaagggtcgtgcctcatctcccattggcaaaaatttgggaatggctggtgggcgtggcctgtcgccagactggccatcaacgattaaaagccatccacttacttctgaggattgtgcgatgctgcggccacagtgacctgtgtgaccttgcgctgttgaagcccctgtggcagctctttacccacatggagtacggcctgtttgaggacgtgacgcagcccggcatcctccttcccctgcatcgtgccctcactgagctcttcttcgtcaccgagaaccgtgcccaggagcttggcgtgctgcaggattacctgctggccctaaccacggacgaccaccttctccgctgtgcggcacaggctctgcagaacattgctgccatcagcctggccatcaactacccaaacaaggccacccgcctctggaatgtggagtgttagcccttggtggggcgtgcatgggactagttcatctgccacagggattttagagcagacatctaacctcattcaggaaaactcctgtagcgccagtgcccagctctccttgagctgaccactccagttaggatgccaagcagccacgtctccaagagctcccgtgcgtaggctggacacaagcacaggctgtagcatggtgaaaataagccaagcagtgcagaatgcctcagaaagggtgggcagggggcccttaagaaggttcagagaccagccttctccagaggctgtcactgcaggagccgtgggcctgggaagacttggaagcggcctctctcaactggtttctgtctccgtggagctggaactgcctgcacttgccttcagagggaggcacagtccacccagatccacctttccagcaagacccccagtggctgcccagcctgggagcacctctttgcttttcacaccaaaccaaaactggcgagagcccctcctagccaccagtgatccccaagcatccagtacagaaccaggcatcgagctagctccctgcacggccgcaccctcccagagaactccttgaggagaacaagtgcccttggggacagccggcaggcgcccctgtacgtctgctcatgcaccaggcagcacagccgcagttcctcagttgttgttttgacatatttcagtttccacctcacgtttttagagcagaaccacactgtctccctggaggggctcgagggcatgaccggggactgaccattctgtgaaaggagcagaatgtgaggagcacgcgtgagcttatgtaccgtgaagatgatcagaggatatcttattttaagagtaaaaacccacataattttatttctgcttgatagtcatggtagtctgtcatacccacctctgggactctgcgtggctgtttggctgtcacttgtagcaataacgacattagttctagtcagtgctgttttacatttttcttttgatgggtttagtcttgccctggagtgccgatgatgattctccctccagagccacgcttgggaacatgaagcaagtctggcgtgtgggctgcgtgccggccttagtgggacccgtggggttggagcatgcctttaggggcagtgtctgggccgaagcacgtcccaccacacagtgccagagccagagaaggggccccaccaccaaggccaagcttgaccaggtcagcattgccatggcccagtgtgccccgtggcctctgaagatccctctgtgcagggtctgcagggatctggattgcaagggcccaagtctgcaggtctggaagcatcttcctataagagcactttcgccttctgggtcaggactccaaggtgcagcgggcttcacagccctacaattgggttctcagctaagccccagagttctggtagaaccatcccggggcgggtggagggtgggatttaagggagacgggaacacatggggcaggtcctggaacttggtggcctgaggactgaggccattgccctggtggaaaggcctggcctggttcctgtggcttgggacctgaataggcaggtgctgctggctccgtagaaacccttttcccatcttttgctctttgccaaacctaccttgctttgggagctgcctgcaccaccccagagaaggccccaccttcttcatccctcagacccgaggaggcctcccagtaaggagtttcccaagaggggactcacaggaaacaagtcttagtgcttgggagggaggccccgctgcgtgctcagactcacagccaacctggaaggtagacgagatagcgccacccacgcccctccacaccccagactccgagtaaagcgggcggtagggccggagtcacctcccctatggcagtggccgccgctgtactccatcctcccgtcaggaagatcagctgtaaataaacgctgggctccccagagcacctgtccgcccactgcccttgctgttctgggatcttcgctgcagttcacgggaaacaagcctgagtccgctcgcacccgcggctgctctcccggctcggcccggccgcctctgtctccggccaccgggtggcgctgccgagccagagccgccgcgtcccggcgctttccaggagccccaggcccggaggaggcgaagcccgcagagcaaaggtggaaacacgtgcctacgctgtaaagaaatcctgttccagagcatacctgttgtacaaacagacactgttcctaacgagaggagtgacgtattttcatcaccgtttttaatttgttttcttacgggtttacgattttgaatttttcttatttggttgaaagaattttgattctatcagcctgagtgagttcagcctgtaaaaaggatgttaagctgtgggtaaaatatgcaaacgaaaagaaatatattgtacaaattctatataataaggta

SEQ ID NO: 332406 - DNA, 6656 bp, Homo sapiens
cccttgtcaccttccacacccacccgccggcctcccttcacccgagggcgactccggctgctctcctttcgatccatggaggaggccagactggtgcccacagtgaaagagaaataccctgtgctgaaggacgtcatggacttcattaaggatcagtcgctctcgcacaggagtgttgtgaaggttctttccctgaggaaagcccaggcccagagcatcctggaagtcctgaagataactcagcactgtgcagaatcccttgggcagccccactgcttccatccacctttcatacttttcctgttggaacttctgacctgtcagaaagattttaccaattattttggacacctggaaggctgtggtgctgatctacacaaagaaattcgagacacttactatcaacttgttctgtttttggtcaaagcagttaaaggatttagtagcctaaatgacaggtccttgctccctgccttatcctgtgttcagacagccctgcttcatcttttggatatgggctgggaacccaatgatctcgccttctttgttgatattcagttaccagatctcctcatgaaaatgtcacaggagaatataagtgtccatgacagtgtgatcagatgcacatgttcattgctcgctactgtgacctgttaaatgtggacatctcttgtgatgggtgtgatgagattgccccctggcatcgataccgctgtctgcagtgcagcgacatggatctctgcaaaacttgcttcctaggtggggtgaagcctgagggccacggagacgaccatgaaatggtcaacatggagtttacctgtgaccactgccagggtttgatcataggccggaggatgaactgcaatgtttgcgatgactttgatctttgctacggatgctatgcagcgaagaaatactcctacggccatttgcctacccacagcatcacggcccacccaatggtaaccattcggatcagtgaccggcagaggctcatccagccatatatccataactactcctggctgctctttgctgccctggctctctatagcgcccacctggccagtgcagaggatgtggatggggagaagctggacccccagacgcacagcagtgccaccaccctgcggagccagtgcatgcagctcgtcggggactgtctgatgaaggctcatcagggaaaaggccttaaagctctagctttgctgggtgtattgccagatggggactcgagcctagaagatcaggccctaccagtcactgtgcccaccggagcgtcagaggagcagctagagaagaaagctgtccagggtgctgagctgtcagaagcaggcaatggaaagagagctgttcatgaggaaatcagacctgtagatttcaagcagagaaataaggcagataaaggtgtatcattatcgaaggatccttcatgccagacccaaatttcagattcacctgcagatgctagcccacctacaggacttccagatgctgaagattcagaagtgtcatctcagaagcccatagaggaaaaagcagttactccaagccctgagcaagtgtttgctgagtgttcccagaagaggattttgggattactagcagccatgttacctcccttaaagtcgggccccacggttcccctgatagacctggagcacgtccttccactcatgtttcaggttgtcatctcaaacgcaggccacctgaatgaaacctaccatctcaccctgggtcttctcggccagttaattatccgtcttttgccagcagaggtagacgccgcagtgatcaaagtcctctcagccaaacacaacctgtttgctgcaggggacagttccattgtgccagatggctggaaaaccacccacctgctctttagcctgggagctgtgtgtctggacagccgggtgggcttggactgggcgtgctccatggcagagatcctgcggtcactcaacagtgccccactgtggcgtgatgtcattgccaccttcacagaccactgcatcaagcagctgccattccagctgaagcacaccaacatcttcaccctgctcgtgctggttggcttcccccaggtcctctgtgtgggaacccgctgcgtttatatggataatgccaatgaaccccataatgtgatcatcttgaagcactttactgagaagaacagggctgtgattgttgatgtcaaaactcggaagaggaaaacagtgaaggactaccagctggtccagaagggaggaggacaagagtgtggtgactctcgggcccagctgagccagtactcccagcactttgcctttatcgccagtcaccttctgcaaagcagcatggacagccattgtcccgaggcagtagaagcaacttgggtcctgtccctggccctgaaaggattgtataaaacactaaaggctcacggttttgaggagatccgtgctactttccttcagaccgatttgctgaagttgctggtgaaaaagtgcagcaaagggactggctttagtaaaacgtggctcctccgggacctggaaattttgtccatcatgctgtactcctcaaaaaaggagatcaacgctttggctgagcacggagacctagagctggatgagcgaggggaccgagaggaagaggtggaacggccagtcagcagccctggcgacccagagcagaaaaagctggacccccttgagggcctggatgagcccaccagaatatgtttcttgatggctcatgatgccctcaatgcccctctgcacattctccgggccatatacgaactgcagatgaaaaagaccgattatttcttcctggaggttcagaagaggtttgatggtgatgagctcaccacagatgaaaggatacggtccctggctcagcggtggcagcccagtaagagtctgaggctggaagaacagagcgccaaagctgtggatacagacatgattatcctgccatgcttgtcccggcctgcacgctgtgaccaagccactgctgaatcgaaccctgtgacccagaagctgatctccagcacagagagcgaactgcagcagagctatgccaagcagcgccgtagcaagagcgccgccctcctgcacaaggagctgaactgcaagagtaagagggctgtccgggactacctcttccgagtgaacgaggccacagctgtcctgtacgcccgccacgtgcttgcatccctgctcgccgagtggcctagccacgtgccagtgagcgaggacatcctggagctcagtggccctgcccatatgacctacattttggatatgttcatgcagctggaagaaaagcatgagtgggagaagatcctgcagaaagtgctccagggctgccgagaggacatgctggggaccatggccctggctgcatgccagttcatggaggagccaggaatggaggtgcaagtgagggagtcgaaacacccgtataacaacaacaccaacttcgaggataaagttcacattcctggtgccatctacctctcaatcaaattcgactctcagtgcaacacagaggagggctgtgacgagttagccatgtccagcagcagtgacttccagcaagaccgacacagcttcagcgggtctcagcagaagtggaaagattttgaacttccaggagacactctgtattaccgcttcacctccgacatgagcaacaccgagtggggctacagattcaccgtgacggccggacacctggggcggttccagacaggattcgagattttgaagcagatgttgtcagaagaaagggtcgtgcctcatctcccattggcaaaaatttgggaatggctggtgggcgtggcctgtcgccagactggccatcaacgattaaaagccatccacttacttctgaggattgtgcgatgctgcggccacagtgacctgtgtgaccttgcgctgttgaagcccctgtggcagctctttacccacatggagtacggcctgtttgaggacgtgacgcagcccggcatcctccttcccctgcatcgtgccctcactgagctcttcttcgtcaccgagaaccgtgcccaggagcttggcgtgctgcaggattacctgctggccctaaccacggacgaccaccttctccgctgtgcggcacaggctctgcagaacattgctgccatcagcctggccatcaactacccaaacaaggccacccgcctctggaatgtggagtgttagcccttggtggggcgtgcatgggactagttcatctgccacagggattttagagcagacatctaacctcattcaggaaaactcctgtagcgccagtgcccagctctccttgagctgaccactccagttaggatgccaagcagccacgtctccaagagctcccgtgcgtaggctggacacaagcacaggctgtagcatggtgaaaataagccaagcagtgcagaatgcctcagaaagggtgggcagggggcccttaagaaggttcagagaccagccttctccagaggctgtcactgcaggagccgtgggcctgggaagacttggaagcggcctctctcaactggtttctgtctccgtggagctggaactgcctgcacttgccttcagagggaggcacagtccacccagatccacctttccagcaagacccccagtggctgcccagcctgggagcacctctttgcttttcacaccaaaccaaaactggcgagagcccctcctagccaccagtgatccccaagcatccagtacagaaccaggcatcgagctagctccctgcacggccgcaccctcccagagaactccttgaggagaacaagtgcccttggggacagccggcaggcgcccctgtacgtctgctcatgcaccaggcagcacagccgcagttcctcagttgttgttttgacatatttcagtttccacctcacgtttttagagcagaaccacactgtctccctggaggggctcgagggcatgaccggggactgaccattctgtgaaaggagcagaatgtgaggagcacgcgtgagcttatgtaccgtgaagatgatcagaggatatcttattttaagagtaaaaacccacataattttatttctgcttgatagtcatggtagtctgtcatacccacctctgggactctgcgtggctgtttggctgtcacttgtagcaataacgacattagttctagtcagtgctgttttacatttttcttttgatgggtttagtcttgccctggagtgccgatgatgattctccctccagagccacgcttgggaacatgaagcaagtctggcgtgtgggctgcgtgccggccttagtgggacccgtggggttggagcatgcctttaggggcagtgtctgggccgaagcacgtcccaccacacagtgccagagccagagaaggggccccaccaccaaggccaagcttgaccaggtcagcattgccatggcccagtgtgccccgtggcctctgaagatccctctgtgcagggtctgcagggatctggattgcaagggcccaagtctgcaggtctggaagcatcttcctataagagcactttcgccttctgggtcaggactccaaggtgcagcgggcttcacagccctacaattgggttctcagctaagccccagagttctggtagaaccatcccggggcgggtggagggtgggatttaagggagacgggaacacatggggcaggtcctggaacttggtggcctgaggactgaggccattgccctggtggaaaggcctggcctggttcctgtggcttgggacctgaataggcaggtgctgctggctccgtagaaacccttttcccatcttttgctctttgccaaacctaccttgctttgggagctgcctgcaccaccccagagaaggccccaccttcttcatccctcagacccgaggaggcctcccagtaaggagtttcccaagaggggactcacaggaaacaagtcttagtgcttgggagggaggccccgctgcgtgctcagactcacagccaacctggaaggtagacgagatagcgccacccacgcccctccacaccccagactccgagtaaagcgggcggtagggccggagtcacctcccctatggcagtggccgccgctgtactccatcctcccgtcaggaagatcagctgtaaataaacgctgggctccccagagcacctgtccgcccactgcccttgctgttctgggatcttcgctgcagttcacgggaaacaagcctgagtccgctcgcacccgcggctgctctcccggctcggcccggccgcctctgtctccggccaccgggtggcgctgccgagccagagccgccgcgtcccggcgctttccaggagccccaggcccggaggaggcgaagcccgcagagcaaaggtggaaacacgtgcctacgctgtaaagaaatcctgttccagagcatacctgttgtacaaacagacactgttcctaacgagaggagtgacgtattttcatcaccgtttttaatttgttttcttacgggtttacgattttgaatttttcttatttggttgaaagaattttgattctatcagcctgagtgagttcagcctgtaaaaaggatgttaagctgtgggtaaaatatgcaaacgaaaagaaatatattgtacaaattctatataataaggta

SEQ ID NO: 332407 - DNA, 6847 bp, Homo sapiens
gtagaaaagacagtgaggctggtgccaaagtcatcaatgaagggaggcagaggggtgagcgtgattgtgtggagaggatcaaatgaggtcatttgtgaaaaatacttaacacagtatctggcacccaagtagtggtgggagggatgggtttatattcacaaagaagataaataatctcatctccatgcttctgggtaactctcttgagcccgtcagagggactcacttgctgttttgtgtgttaccttctataggtattatatttgtatttacttaagttcctgtgccgctttgctcagctgactgccacttgctctttttcatgtaagaaatcattattattattaagaaaaagatgttctggcaattaagtgaatcagtgatttcctctgtttctagttattttggacacctggaaggctgtggtgctgatctacacaaagaaattcgagacacttactatcaacttgttctgtttttggtcaaagcagttaaaggatttagtagcctaaatgacaggtccttgctccctgccttatcctgtgttcagacagccctgcttcatcttttggatatgggctgggaacccaatgatctcgccttctttgttgatattcagttaccagatctcctcatgaaaatgtcacaggagaatataagtgtccatgacagtgtgatcagccaatggagtgaagaagatgagcttgctgatgccaagcagaattcagaatggatggatgagtgtcaggatggcatgtttgaggcctggtatgaaaaaatagcccaggaagatccagagaagcagaggaaaatgcacatgttcattgctcgctactgtgacctgttaaatgtggacatctcttgtgatgggtgtgatgagattgccccctggcatcgataccgctgtctgcagtgcagcgacatggatctctgcaaaacttgcttcctaggtggggtgaagcctgagggccacggagacgaccatgaaatggtcaacatggagtttacctgtgaccactgccagggtttgatcataggccggaggatgaactgcaatgtttgcgatgactttgatctttgctacggatgctatgcagcgaagaaatactcctacggccatttgcctacccacagcatcacggcccacccaatggtaaccattcggatcagtgaccggcagaggctcatccagccatatatccataactactcctggctgctctttgctgccctggctctctatagcgcccacctggccagtgcagaggatgtggatggggagaagctggacccccagacgcacagcagtgccaccaccctgcggagccagtgcatgcagctcgtcggggactgtctgatgaaggctcatcagggaaaaggccttaaagctctagctttgctgggtgtattgccagatggggactcgagcctagaagatcaggccctaccagtcactgtgcccaccggagcgtcagaggagcagctagagaagaaagctgtccagggtgctgagctgtcagaagcaggcaatggaaagagagctgttcatgaggaaatcagacctgtagatttcaagcagagaaataaggcagataaaggtgtatcattatcgaaggatccttcatgccagacccaaatttcagattcacctgcagatgctagcccacctacaggacttccagatgctgaagattcagaagtgtcatctcagaagcccatagaggaaaaagcagttactccaagccctgagcaagtgtttgctgagtgttcccagaagaggattttgggattactagcagccatgttacctcccttaaagtcgggccccacggttcccctgatagacctggagcacgtccttccactcatgtttcaggttgtcatctcaaacgcaggccacctgaatgaaacctaccatctcaccctgggtcttctcggccagttaattatccgtcttttgccagcagaggtagacgccgcagtgatcaaagtcctctcagccaaacacaacctgtttgctgcaggggacagttccattgtgccagatggctggaaaaccacccacctgctctttagcctgggagctgtgtgtctggacagccgggtgggcttggactgggcgtgctccatggcagagatcctgcggtcactcaacagtgccccactgtggcgtgatgtcattgccaccttcacagaccactgcatcaagcagctgccattccagctgaagcacaccaacatcttcaccctgctcgtgctggttggcttcccccaggtcctctgtgtgggaacccgctgcgtttatatggataatgccaatgaaccccataatgtgatcatcttgaagcactttactgagaagaacagggctgtgattgttgatgtcaaaactcggaagaggaaaacagtgaaggactaccagctggtccagaagggaggaggacaagagtgtggtgactctcgggcccagctgagccagtactcccagcactttgcctttatcgccagtcaccttctgcaaagcagcatggacagccattgtcccgaggcagtagaagcaacttgggtcctgtccctggccctgaaaggattgtataaaacactaaaggctcacggttttgaggagatccgtgctactttccttcagaccgatttgctgaagttgctggtgaaaaagtgcagcaaagggactggctttagtaaaacgtggctcctccgggacctggaaattttgtccatcatgctgtactcctcaaaaaaggagatcaacgctttggctgagcacggagacctagagctggatgagcgaggggaccgagaggaagaggtggaacggccagtcagcagccctggcgacccagagcagaaaaagctggacccccttgagggcctggatgagcccaccagaatatgtttcttgatggctcatgatgccctcaatgcccctctgcacattctccgggccatatacgaactgcagatgaaaaagaccgattatttcttcctggaggttcagaagaggtttgatggtgatgagctcaccacagatgaaaggatacggtccctggctcagcggtggcagcccagtaagagtctgaggctggaagaacagagcgccaaagctgtggatacagacatgattatcctgccatgcttgtcccggcctgcacgctgtgaccaagccactgctgaatcgaaccctgtgacccagaagctgatctccagcacagagagcgaactgcagcagagctatgccaagcagcgccgtagcaagagcgccgccctcctgcacaaggagctgaactgcaagagtaagagggctgtccgggactacctcttccgagtgaacgaggccacagctgtcctgtacgcccgccacgtgcttgcatccctgctcgccgagtggcctagccacgtgccagtgagcgaggacatcctggagctcagtggccctgcccatatgacctacattttggatatgttcatgcagctggaagaaaagcatgagtgggagaagatcctgcagaaagtgctccagggctgccgagaggacatgctggggaccatggccctggctgcatgccagttcatggaggagccaggaatggaggtgcaagtgagggagtcgaaacacccgtataacaacaacaccaacttcgaggataaagttcacattcctggtgccatctacctctcaatcaaattcgactctcagtgcaacacagaggagggctgtgacgagttagccatgtccagcagcagtgacttccagcaagaccgacacagcttcagcgggtctcagcagaagtggaaagattttgaacttccaggagacactctgtattaccgcttcacctccgacatgagcaacaccgagtggggctacagattcaccgtgacggccggacacctggggcggttccagacaggattcgagattttgaagcagatgttgtcagaagaaagggtcgtgcctcatctcccattggcaaaaatttgggaatggctggtgggcgtggcctgtcgccagactggccatcaacgattaaaagccatccacttacttctgaggattgtgcgatgctgcggccacagtgacctgtgtgaccttgcgctgttgaagcccctgtggcagctctttacccacatggagtacggcctgtttgaggacgtgacgcagcccggcatcctccttcccctgcatcgtgccctcactgagctcttcttcgtcaccgagaaccgtgcccaggagcttggcgtgctgcaggattacctgctggccctaaccacggacgaccaccttctccgctgtgcggcacaggctctgcagaacattgctgccatcagcctggccatcaactacccaaacaaggccacccgcctctggaatgtggagtgttagcccttggtggggcgtgcatgggactagttcatctgccacagggattttagagcagacatctaacctcattcaggaaaactcctgtagcgccagtgcccagctctccttgagctgaccactccagttaggatgccaagcagccacgtctccaagagctcccgtgcgtaggctggacacaagcacaggctgtagcatggtgaaaataagccaagcagtgcagaatgcctcagaaagggtgggcagggggcccttaagaaggttcagagaccagccttctccagaggctgtcactgcaggagccgtgggcctgggaagacttggaagcggcctctctcaactggtttctgtctccgtggagctggaactgcctgcacttgccttcagagggaggcacagtccacccagatccacctttccagcaagacccccagtggctgcccagcctgggagcacctctttgcttttcacaccaaaccaaaactggcgagagcccctcctagccaccagtgatccccaagcatccagtacagaaccaggcatcgagctagctccctgcacggccgcaccctcccagagaactccttgaggagaacaagtgcccttggggacagccggcaggcgcccctgtacgtctgctcatgcaccaggcagcacagccgcagttcctcagttgttgttttgacatatttcagtttccacctcacgtttttagagcagaaccacactgtctccctggaggggctcgagggcatgaccggggactgaccattctgtgaaaggagcagaatgtgaggagcacgcgtgagcttatgtaccgtgaagatgatcagaggatatcttattttaagagtaaaaacccacataattttatttctgcttgatagtcatggtagtctgtcatacccacctctgggactctgcgtggctgtttggctgtcacttgtagcaataacgacattagttctagtcagtgctgttttacatttttcttttgatgggtttagtcttgccctggagtgccgatgatgattctccctccagagccacgcttgggaacatgaagcaagtctggcgtgtgggctgcgtgccggccttagtgggacccgtggggttggagcatgcctttaggggcagtgtctgggccgaagcacgtcccaccacacagtgccagagccagagaaggggccccaccaccaaggccaagcttgaccaggtcagcattgccatggcccagtgtgccccgtggcctctgaagatccctctgtgcagggtctgcagggatctggattgcaagggcccaagtctgcaggtctggaagcatcttcctataagagcactttcgccttctgggtcaggactccaaggtgcagcgggcttcacagccctacaattgggttctcagctaagccccagagttctggtagaaccatcccggggcgggtggagggtgggatttaagggagacgggaacacatggggcaggtcctggaacttggtggcctgaggactgaggccattgccctggtggaaaggcctggcctggttcctgtggcttgggacctgaataggcaggtgctgctggctccgtagaaacccttttcccatcttttgctctttgccaaacctaccttgctttgggagctgcctgcaccaccccagagaaggccccaccttcttcatccctcagacccgaggaggcctcccagtaaggagtttcccaagaggggactcacaggaaacaagtcttagtgcttgggagggaggccccgctgcgtgctcagactcacagccaacctggaaggtagacgagatagcgccacccacgcccctccacaccccagactccgagtaaagcgggcggtagggccggagtcacctcccctatggcagtggccgccgctgtactccatcctcccgtcaggaagatcagctgtaaataaacgctgggctccccagagcacctgtccgcccactgcccttgctgttctgggatcttcgctgcagttcacgggaaacaagcctgagtccgctcgcacccgcggctgctctcccggctcggcccggccgcctctgtctccggccaccgggtggcgctgccgagccagagccgccgcgtcccggcgctttccaggagccccaggcccggaggaggcgaagcccgcagagcaaaggtggaaacacgtgcctacgctgtaaagaaatcctgttccagagcatacctgttgtacaaacagacactgttcctaacgagaggagtgacgtattttcatcaccgtttttaatttgttttcttacgggtttacgattttgaatttttcttatttggttgaaagaattttgattctatcagcctgagtgagttcagcctgtaaaaaggatgttaagctgtgggtaaaatatgcaaacgaaaagaaatatattgtacaaattctatataataaggta

SEQ ID NO: 332408 - DNA, 7435 bp, Homo sapiens
cccttgtcaccttccacacccacccgccggcctcccttcacccgagggcgactccggctgctctcctttcgatccatggaggaggccagactggtgcccacagtgaaagagaaataccctgtgctgaaggacgtcatggacttcattaaggatcagtcgctctcgcacaggagtgttgtgaaggttctttccctgaggaaagcccaggcccagagcatcctggaagtcctgaagataactcagcactgtgcagaatcccttgggcagccccactgcttccatccacctttcatacttttcctgttggaacttctgacctgtcagaaagattttaccaattattttggacacctggaaggctgtggtgctgatctacacaaagaaattcgagacacttactatcaacttgttctgtttttggtcaaagcagttaaaggatttagtagcctaaatgacaggtccttgctccctgccttatcctgtgttcagacagccctgcttcatcttttggatatgggctgggaacccaatgatctcgccttctttgttgatattcagttaccagatctcctcatgaaaatgtcacaggagaatataagtgtccatgacagtgtgatcagccaatggagtgaagaagatgagcttgctgatgccaagcagaattcagaatggatggatgagtgtcaggatggcatgtttgaggcctggtatgaaaaaatagcccaggaagatccagagaagcagaggaaaatgcacatgttcattgctcgctactgtgacctgttaaatgtggacatctcttgtgatgggtgtgatgagattgccccctggcatcgataccgctgtctgcagtgcagcgacatggatctctgcaaaacttgcttcctaggtggggtgaagcctgagggccacggagacgaccatgaaatggtcaacatggagtttacctgtgaccactgccagggtttgatcataggccggaggatgaactgcaatgtttgcgatgactttgatctttgctacggatgctatgcagcgaagaaatactcctacggccatttgcctacccacagcatcacggcccacccaatggtaaccattcggatcagtgaccggcagaggctcatccagccatatatccataactactcctggctgctctttgctgccctggctctctatagcgcccacctggccagtgcagaggatgtggatggggagaagctggacccccagacgcacagcagtgccaccaccctgcggagccagtgcatgcagctcgtcggggactgtctgatgaaggctcatcagggaaaaggccttaaagctctagctttgctgggtgtattgccagatggggactcgagcctagaagatcaggccctaccagtcactgtgcccaccggagcgtcagaggagcagctagagaagaaagctgtccagggtgctgagctgtcagaagcaggcaatggaaagagagctgttcatgaggaaatcagacctgtagatttcaagcagagaaataaggcagataaaggtgtatcattatcgaaggatccttcatgccagacccaaatttcagattcacctgcagatgctagcccacctacaggacttccagatgctgaagattcagaagtgtcatctcagaagcccatagaggaaaaagcagttactccaagccctgagcaagtgtttgctgagtgttcccagaagaggattttgggattactagcagccatgttacctcccttaaagtcgggccccacggttcccctgatagacctggagcacgtccttccactcatgtttcaggttgtcatctcaaacgcaggccacctgaatgaaacctaccatctcaccctgggtcttctcggccagttaattatccgtcttttgccagcagaggtagacgccgcagtgatcaaagtcctctcagccaaacacaacctgtttgctgcaggggacagttccattgtgccagatggctggaaaaccacccacctgctctttagcctgggagctgtgtgtctggacagccgggtgggcttggactgggcgtgctccatggcagagatcctgcggtcactcaacagtgccccactgtggcgtgatgtcattgccaccttcacagaccactgcatcaagcagctgccattccagctgaagcacaccaacatcttcaccctgctcgtgctggttggcttcccccaggtcctctgtgtgggaacccgctgcgtttatatggataatgccaatgaaccccataatgtgatcatcttgaagcactttactgagaagaacagggctgtgattgttgatgtcaaaactcggaagaggaaaacagtgaaggactaccagctggtccagaagggaggaggacaagagtgtggtgactctcgggcccagctgagccagtactcccagcactttgcctttatcgccagtcaccttctgcaaagcagcatggacagccattgtcccgaggcagtagaagcaacttgggtcctgtccctggccctgaaaggattgtataaaacactaaaggctcacggttttgaggagatccgtgctactttccttcagaccgatttgctgaagttgctggtgaaaaagtgcagcaaagggactggctttagtaaaacgtggctcctccgggacctggaaattttgtccatcatgctgtactcctcaaaaaaggagatcaacgctttggctgagcacggagacctagagctggatgagcgaggggaccgagaggaagaggtggaacggccagtcagcagccctggcgacccagagcagaaaaagctggacccccttgagggcctggatgagcccaccagaatatgtttcttgatggctcatgatgccctcaatgcccctctgcacattctccgggccatatacgaactgcagatgaaaaagaccgattatttcttcctggaggttcagaagaggtttgatggtgatgagctcaccacagatgaaaggatacggtccctggctcagcggtggcagcccagtaagagtctgaggctggaagaacagagcgccaaagctgtggatacagacatgattatcctgccatgcttgtcccggcctgcacgctgtgaccaagccactgctgaatcgaaccctgtgacccagaagctgatctccagcacagagagcgaactgcagcagagctatgccaagcagcgccgtagcaagagcgccgccctcctgcacaaggagctgaactgcaagagtaagagggctgtccgggactacctcttccgagtgaacgaggccacagctgtcctgtacgcccgccacgtgcttgcatccctgctcgccgagtggcctagccacgtgccagtgagcgaggacatcctggagctcagtggccctgcccatatgacctacattttggatatgttcatgcagctggaagaaaagcatgagtgggagaagatcctgcagaaagtgctccagggctgccgagaggacatgctggggaccatggccctggctgcatgccagttcatggaggagccaggaatggaggtgcaagtgagggagtcgaaacacccgtataacaacaacaccaacttcgaggataaagttcacattcctggtgccatctacctctcaatcaaattcgactctcagtgcaacacagaggagggctgtgacgagttagccatgtccagcagcagtgacttccagcaagaccgacacagcttcagcgggtctcagcagaagtggaaagattttgaacttccaggagacactctgtattaccgcttcacctccgacatgagcaacaccgagtggggctacagattcaccgtgacggccggacacctggggcggttccagacaggattcgagattttgaagcagatgttgtcagaagaaagggtcgtgcctcatctcccattggcaaaaatttgggaatggctggtgggcgtggcctgtcgccagactggccatcaacgattaaaagccatccacttacttctgaggattgtgcgatgctgcggccacagtgacctgtgtgaccttgcgctgttgaagcccctgtggcagctctttacccacatggagtacggcctgtttgaggacgtgacgcagcccggcatcctccttcccctgcatcgtgccctcactgagctcttcttcgtcaccgagaaccgtgcccaggtgaggcctgaggtctgggcagggagcccggtgcctccatgtgcgtttgctccctctgctacccagggcagaagctgctgcctcatccgagcctgagtggccagggtctcgacaggccacacaggacaggcatggctgagagtctgaggctctcgcctctcccaggcctgggaaaccctcaggtcagctctgagattgcttattttgtcaggcctagagccaatgggggagaaactgcccgggatcagcccttgacaacagtgagttttggaaaataaaacgatgggttatttctgcttccttctctttttttcctcccctcagcacaatagactgattgaatgtgggagctgaaagggcctttcagagttctttagcttccctctcctttcacacatgaggaaactggcttgaggaggggtcccggcctggtcacccaagggcaggtggaggcaaaggtgaccccggcaccgggcacctggctcccgccagggttctgagcaaggcagtgccacgcggtgctgggcggcgtgagtagcgtccgcccatgagaggcttctgctttcgcaagcaggtgtcccaggtggtctgggagagctgcactgcgcatctggcgctgtcactcacagcccctgctctctctctgcaggagcttggcgtgctgcaggattacctgctggccctaaccacggacgaccaccttctccgctgtgcggcacaggctctgcagaacattgctgccatcagcctggccatcaactacccaaacaaggccacccgcctctggaatgtggagtgttagcccttggtggggcgtgcatgggactagttcatctgccacagggattttagagcagacatctaacctcattcaggaaaactcctgtagcgccagtgcccagctctccttgagctgaccactccagttaggatgccaagcagccacgtctccaagagctcccgtgcgtaggctggacacaagcacaggctgtagcatggtgaaaataagccaagcagtgcagaatgcctcagaaagggtgggcagggggcccttaagaaggttcagagaccagccttctccagaggctgtcactgcaggagccgtgggcctgggaagacttggaagcggcctctctcaactggtttctgtctccgtggagctggaactgcctgcacttgccttcagagggaggcacagtccacccagatccacctttccagcaagacccccagtggctgcccagcctgggagcacctctttgcttttcacaccaaaccaaaactggcgagagcccctcctagccaccagtgatccccaagcatccagtacagaaccaggcatcgagctagctccctgcacggccgcaccctcccagagaactccttgaggagaacaagtgcccttggggacagccggcaggcgcccctgtacgtctgctcatgcaccaggcagcacagccgcagttcctcagttgttgttttgacatatttcagtttccacctcacgtttttagagcagaaccacactgtctccctggaggggctcgagggcatgaccggggactgaccattctgtgaaaggagcagaatgtgaggagcacgcgtgagcttatgtaccgtgaagatgatcagaggatatcttattttaagagtaaaaacccacataattttatttctgcttgatagtcatggtagtctgtcatacccacctctgggactctgcgtggctgtttggctgtcacttgtagcaataacgacattagttctagtcagtgctgttttacatttttcttttgatgggtttagtcttgccctggagtgccgatgatgattctccctccagagccacgcttgggaacatgaagcaagtctggcgtgtgggctgcgtgccggccttagtgggacccgtggggttggagcatgcctttaggggcagtgtctgggccgaagcacgtcccaccacacagtgccagagccagagaaggggccccaccaccaaggccaagcttgaccaggtcagcattgccatggcccagtgtgccccgtggcctctgaagatccctctgtgcagggtctgcagggatctggattgcaagggcccaagtctgcaggtctggaagcatcttcctataagagcactttcgccttctgggtcaggactccaaggtgcagcgggcttcacagccctacaattgggttctcagctaagccccagagttctggtagaaccatcccggggcgggtggagggtgggatttaagggagacgggaacacatggggcaggtcctggaacttggtggcctgaggactgaggccattgccctggtggaaaggcctggcctggttcctgtggcttgggacctgaataggcaggtgctgctggctccgtagaaacccttttcccatcttttgctctttgccaaacctaccttgctttgggagctgcctgcaccaccccagagaaggccccaccttcttcatccctcagacccgaggaggcctcccagtaaggagtttcccaagaggggactcacaggaaacaagtcttagtgcttgggagggaggccccgctgcgtgctcagactcacagccaacctggaaggtagacgagatagcgccacccacgcccctccacaccccagactccgagtaaagcgggcggtagggccggagtcacctcccctatggcagtggccgccgctgtactccatcctcccgtcaggaagatcagctgtaaataaacgctgggctccccagagcacctgtccgcccactgcccttgctgttctgggatcttcgctgcagttcacgggaaacaagcctgagtccgctcgcacccgcggctgctctcccggctcggcccggccgcctctgtctccggccaccgggtggcgctgccgagccagagccgccgcgtcccggcgctttccaggagccccaggcccggaggaggcgaagcccgcagagcaaaggtggaaacacgtgcctacgctgtaaagaaatcctgttccagagcatacctgttgtacaaacagacactgttcctaacgagaggagtgacgtattttcatcaccgtttttaatttgttttcttacgggtttacgattttgaatttttcttatttggttgaaagaattttgattctatcagcctgagtgagttcagcctgtaaaaaggatgttaagctgtgggtaaaatatgcaaacgaaaagaaatatattgtacaaattctatataataaggta

SEQ ID NO: 332409 - DNA, 5539 bp, Homo sapiens
gaaaagcattattctggtagtttttaagctagttaatgaatggctctttgaaggcttctgggtctgccttggagtgtagtgagctctaacgagttgagtttggagccctgtgtactgcccctaatggagctcttgccttccagccgggtgggcttggactgggcgtgctccatggcagagatcctgcggtcactcaacagtgccccactgtggcgtgatgtcattgccaccttcacagaccactgcatcaagcagctgccattccagctgaagcacaccaacatcttcaccctgctcgtgctggttggcttcccccaggtcctctgtgtgggaacccgctgcgtttatatggataatgccaatgaaccccataatgtgatcatcttgaagcactttactgagaagaacagggctgtgattgttgatgtcaaaactcggaagaggaaaacagtgaaggactaccagctggtccagaagggaggaggacaagagtgtggtgactctcgggcccagctgagccagtactcccagcactttgcctttatcgccagtcaccttctgcaaagcagcatggacagccattgtcccgaggcagtagaagcaacttgggtcctgtccctggccctgaaaggattgtataaaacactaaaggctcacggttttgaggagatccgtgctactttccttcagaccgatttgctgaagttgctggtgaaaaagtgcagcaaagggactggctttagtaaaacgtggctcctccgggacctggaaattttgtccatcatgctgtactcctcaaaaaaggagatcaacgctttggctgagcacggagacctagagctggatgagcgaggggaccgagaggaagaggtggaacggccagtcagcagccctggcgacccagagcagaaaaagctggacccccttgagggcctggatgagcccaccagaatatgtttcttgatggctcatgatgccctcaatgcccctctgcacattctccgggccatatacgaactgcagatgaaaaagaccgattatttcttcctggaggttcagaagaggtttgatggtgatgagctcaccacagatgaaaggatacggtccctggctcagcggtggcagcccagtaagagtctgaggctggaagaacagagcgccaaagctgtggatacagacatgattatcctgccatgcttgtcccggcctgcacgctgtgaccaagccactgctgaatcgaaccctgtgacccagaagctgatctccagcacagagagcgaactgcagcagagctatgccaagcagcgccgtagcaagagcgccgccctcctgcacaaggagctgaactgcaagagtaagagggctgtccgggactacctcttccgagtgaacgaggccacagctgtcctgtacgcccgccacgtgcttgcatccctgctcgccgagtggcctagccacgtgccagtgagcgaggacatcctggagctcagtggccctgcccatatgacctacattttggatatgttcatgcagctggaagaaaagcatgagtgggagaagatcctgcagaaagtgctccagggctgccgagaggacatgctggggaccatggccctggctgcatgccagttcatggaggagccaggaatggaggtgcaagtgagggagtcgaaacacccgtataacaacaacaccaacttcgaggataaagttcacattcctggtgccatctacctctcaatcaaattcgactctcagtgcaacacagaggagggctgtgacgagttagccatgtccagcagcagtgacttccagcaagaccgacacagcttcagcgggtctcagcagaagtggaaagattttgaacttccaggagacactctgtattaccgcttcacctccgacatgagcaacaccgagtggggctacagattcaccgtgacggccggacacctggggcggttccagacaggattcgagattttgaagcagatgttgtcagaagaaagggtcgtgcctcatctcccattggcaaaaatttgggaatggctggtgggcgtggcctgtcgccagactggccatcaacgattaaaagccatccacttacttctgaggattgtgcgatgctgcggccacagtgacctgtgtgaccttgcgctgttgaagcccctgtggcagctctttacccacatggagtacggcctgtttgaggacgtgacgcagcccggcatcctccttcccctgcatcgtgccctcactgagctcttcttcgtcaccgagaaccgtgcccaggtgaggcctgaggtctgggcagggagcccggtgcctccatgtgcgtttgctccctctgctacccagggcagaagctgctgcctcatccgagcctgagtggccagggtctcgacaggccacacaggacaggcatggctgagagtctgaggctctcgcctctcccaggcctgggaaaccctcaggtcagctctgagattgcttattttgtcaggcctagagccaatgggggagaaactgcccgggatcagcccttgacaacagtgagttttggaaaataaaacgatgggttatttctgcttccttctctttttttcctcccctcagcacaatagactgattgaatgtgggagctgaaagggcctttcagagttctttagcttccctctcctttcacacatgaggaaactggcttgaggaggggtcccggcctggtcacccaagggcaggtggaggcaaaggtgaccccggcaccgggcacctggctcccgccagggttctgagcaaggcagtgccacgcggtgctgggcggcgtgagtagcgtccgcccatgagaggcttctgctttcgcaagcaggtgtcccaggtggtctgggagagctgcactgcgcatctggcgctgtcactcacagcccctgctctctctctgcaggagcttggcgtgctgcaggattacctgctggccctaaccacggacgaccaccttctccgctgtgcggcacaggctctgcagaacattgctgccatcagcctggccatcaactacccaaacaaggccacccgcctctggaatgtggagtgttagcccttggtggggcgtgcatgggactagttcatctgccacagggattttagagcagacatctaacctcattcaggaaaactcctgtagcgccagtgcccagctctccttgagctgaccactccagttaggatgccaagcagccacgtctccaagagctcccgtgcgtaggctggacacaagcacaggctgtagcatggtgaaaataagccaagcagtgcagaatgcctcagaaagggtgggcagggggcccttaagaaggttcagagaccagccttctccagaggctgtcactgcaggagccgtgggcctgggaagacttggaagcggcctctctcaactggtttctgtctccgtggagctggaactgcctgcacttgccttcagagggaggcacagtccacccagatccacctttccagcaagacccccagtggctgcccagcctgggagcacctctttgcttttcacaccaaaccaaaactggcgagagcccctcctagccaccagtgatccccaagcatccagtacagaaccaggcatcgagctagctccctgcacggccgcaccctcccagagaactccttgaggagaacaagtgcccttggggacagccggcaggcgcccctgtacgtctgctcatgcaccaggcagcacagccgcagttcctcagttgttgttttgacatatttcagtttccacctcacgtttttagagcagaaccacactgtctccctggaggggctcgagggcatgaccggggactgaccattctgtgaaaggagcagaatgtgaggagcacgcgtgagcttatgtaccgtgaagatgatcagaggatatcttattttaagagtaaaaacccacataattttatttctgcttgatagtcatggtagtctgtcatacccacctctgggactctgcgtggctgtttggctgtcacttgtagcaataacgacattagttctagtcagtgctgttttacatttttcttttgatgggtttagtcttgccctggagtgccgatgatgattctccctccagagccacgcttgggaacatgaagcaagtctggcgtgtgggctgcgtgccggccttagtgggacccgtggggttggagcatgcctttaggggcagtgtctgggccgaagcacgtcccaccacacagtgccagagccagagaaggggccccaccaccaaggccaagcttgaccaggtcagcattgccatggcccagtgtgccccgtggcctctgaagatccctctgtgcagggtctgcagggatctggattgcaagggcccaagtctgcaggtctggaagcatcttcctataagagcactttcgccttctgggtcaggactccaaggtgcagcgggcttcacagccctacaattgggttctcagctaagccccagagttctggtagaaccatcccggggcgggtggagggtgggatttaagggagacgggaacacatggggcaggtcctggaacttggtggcctgaggactgaggccattgccctggtggaaaggcctggcctggttcctgtggcttgggacctgaataggcaggtgctgctggctccgtagaaacccttttcccatcttttgctctttgccaaacctaccttgctttgggagctgcctgcaccaccccagagaaggccccaccttcttcatccctcagacccgaggaggcctcccagtaaggagtttcccaagaggggactcacaggaaacaagtcttagtgcttgggagggaggccccgctgcgtgctcagactcacagccaacctggaaggtagacgagatagcgccacccacgcccctccacaccccagactccgagtaaagcgggcggtagggccggagtcacctcccctatggcagtggccgccgctgtactccatcctcccgtcaggaagatcagctgtaaataaacgctgggctccccagagcacctgtccgcccactgcccttgctgttctgggatcttcgctgcagttcacgggaaacaagcctgagtccgctcgcacccgcggctgctctcccggctcggcccggccgcctctgtctccggccaccgggtggcgctgccgagccagagccgccgcgtcccggcgctttccaggagccccaggcccggaggaggcgaagcccgcagagcaaaggtggaaacacgtgcctacgctgtaaagaaatcctgttccagagcatacctgttgtacaaacagacactgttcctaacgagaggagtgacgtattttcatcaccgtttttaatttgttttcttacgggtttacgattttgaatttttcttatttggttgaaagaattttgattctatcagcctgagtgagttcagcctgtaaaaaggatgttaagctgtgggtaaaatatgcaaacgaaaagaaatatattgtacaaattctatataataaggta

SEQ ID NO: 332410 - DNA, 3425 bp, Homo sapiens
cccttgtcaccttccacacccacccgccggcctcccttcacccgagggcgactccggctgctctcctttcgatccatggaggaggccagactggtgcccacagtgaaagagaaataccctgtgctgaaggacgtcatggacttcattaaggatcagtcgctctcgcacaggagtgttgtgaaggttctttccctgaggaaagcccaggcccagagcatcctggaagtcctgaagataactcagcactgtgcagaatcccttgggcagccccactgcttccatccacctttcatacttttcctgttggaacttctgacctgtcagaaagattttaccaattattttggacacctggaaggctgtggtgctgatctacacaaagaaattcgagacacttactatcaacttgttctgtttttggtcaaagcagttaaaggatttagtagcctaaatgacaggtccttgctccctgccttatcctgtgttcagacagccctgcttcatcttttggatatgggctgggaacccaatgatctcgccttctttgttgatattcagttaccagatctcctcatgaaaatgtcacaggagaatataagtgtccatgacagtgtgatcagccaatggagtgaagaagatgagcttgctgatgccaagcagaattcagaatggatggatgagtgtcaggatggcatgtttgaggcctggtatgaaaaaatagcccaggaagatccagagaagcagaggaaaatgcacatgttcattgctcgctactgtgacctgttaaatgtggacatctcttgtgatgggtgtgatgagattgccccctggcatcgataccgctgtctgcagtgcagcgacatggatctctgcaaaacttgcttcctaggtggggtgaagcctgagggccacggagacgaccatgaaatggtcaacatggagtttacctgtgaccactgccagggtttgatcataggccggaggatgaactgcaatgtttgcgatgactttgatctttgctacggatgctatgcagcgaagaaatactcctacggccatttgcctacccacagcatcacggcccacccaatggtaaccattcggatcagtgaccggcagaggctcatccagccatatatccataactactcctggctgctctttgctgccctggctctctatagcgcccacctggccagtgcagaggatgtggatggggagaagctggacccccagacgcacagcagtgccaccaccctgcggagccagtgcatgcagctcgtcggggactgtctgatgaaggctcatcagggaaaaggccttaaagctctagctttgctgggtgtattgccagatggggactcgagcctagaagatcaggccctaccagtcactgtgcccaccggagcgtcagaggagcagctagagaagaaagctgtccagggtgctgagctgtcagaagcaggcaatggaaagagagctgttcatgaggaaatcagacctgtagatttcaagcagagaaataaggcagataaaggtgtatcattatcgaaggatccttcatgccagacccaaatttcagattcacctgcagatgctagcccacctacaggacttccagatgctgaagattcagaagtgtcatctcagaagcccatagaggaaaaagcagttactccaagccctgagcaagtgtttgctgagtgttcccagaagaggattttgggattactagcagccatgttacctcccttaaagtcgggccccacggttcccctgatagacctggagcacgtccttccactcatgtttcaggttgtcatctcaaacgcaggccacctgaatgaaacctaccatctcaccctgggtcttctcggccagttaattatccgtcttttgccagcagaggtagacgccgcagtgatcaaagtcctctcagccaaacacaacctgtttgctgcaggggacagttccattgtgccagatggctggaaaaccacccacctgctctttagcctgggagctgtgtgtctggacagccgggtgggcttggactgggcgtgctccatggcagagatcctgcggtcactcaacagtgccccactgtggcgtgatgtcattgccaccttcacagaccactgcatcaagcagctgccattccagctgaagcacaccaacatcttcaccctgctcgtgctggttggcttcccccaggtcctctgtgtgggaacccgctgcgtttatatggataatgccaatgaaccccataatgtgatcatcttgaagcactttactgagaagaacagggctgtgattgttgatgtcaaaactcggaagaggaaaacagtgaaggactaccagctggtccagaagggaggaggacaagagtgtggtgactctcgggcccagctgagccagtactcccagcactttgcctttatcgccagtcaccttctgcaaagcagcatggacagccattgtcccgaggcagtagaagcaacttgggtcctgtccctggccctgaaaggattgtataaaacactaaaggctcacggttttgaggagatccgtgctactttccttcagaccgatttgctgaagttgctggtgaaaaagtgcagcaaagggactggctttagtaaaacgtggctcctccgggacctggaagtaagagacgagagggactcctgctcctctttcctggtgcagatgtgctggcctaggagttagaagcatcaccgagttccagctgcttctgccctgtgcacactcctttagtacagtgttgaaaactcccttgcttctgtattccctgttggaaatagggattatgacacctgtctacccctgtcagggaaaatgaatttaatgtttgttcaaagaacagtggaagagaagcattttatggaaacacatgattaaccattatatcatggtaataaagtatacccttgaattcatatttccctttaaagttgctttcagccaaaatcagtctctaaatttgtcctcacttatgtttatttgtacgtaggattttagttgatcattataattttattactgttccccgtagaccttagagttttcttagcggaactactgtggttccctgtggactttctgtgcccagtgccaactttcggcccaggaaaggctgccatcatgtaggagggagtgagcggccattcaggcccaggaaaggtgccgccacataggagggagtgagcggccattcacagcccagcagaggctggaacctgcagaaacagctctcaattgccagaagaggatttggttaggtttaaggaaaatgtgctacaacatattaatggataatttggagagtatttgaacttttattcttagagaatattttaaattaaaattttttattattagaactatattgcagaaaactttat

SEQ ID NO: 332411 - DNA, 5564 bp, Homo sapiens
cccttgtcaccttccacacccacccgccggcctcccttcacccgagggcgactccggctgctctcctttcgatccatggaggaggccagactggtgcccacagtgaaagagaaataccctgtgctgaaggacgtcatggacttcattaaggatcagtcgctctcgcacaggagtgttgtgaaggttctttccctgaggaaagcccaggcccagagcatcctggaagtcctgaagataactcagcactgtgcagaatcccttgggcagccccactgcttccatccacctttcatacttttcctgttggaacttctgacctgtcagaaagattttaccaattattttggacacctggaaggctgtggtgctgatctacacaaagaaattcgagacacttactatcaacttgttctgtttttggtcaaagcagttaaaggatttagtagcctaaatgacaggtccttgctccctgccttatcctgtgttcagacagccctgcttcatcttttggatatgggctgggaacccaatgatctcgccttctttgttgatattcagttaccagatctcctcatgaaaatgtcacaggagaatataagtgtccatgacagtgtgatcagccaatggagtgaagaagatgagcttgctgatgccaagcagaattcagaatggatggatgagtgtcaggatggcatgtttgaggcctggtatgaaaaaatagcccaggaagatccagagaagcagaggaaaatgcacatgttcattgctcgctactgtgacctgttaaatgtggacatctcttgtgatgggtgtgatgagattgccccctggcatcgataccgctgtctgcagtgcagcgacatggatctctgcaaaacttgcttcctaggtggggtgaagcctgagggccacggagacgaccatgaaatggtcaacatggagtttacctgtgaccactgccagggtttgatcataggccggaggatgaactgcaatgtttgcgatgactttgatctttgctacggatgctatgcagcgaagaaatactcctacggccatttgcctacccacagcatcacggcccacccaatggtaaccattcggatcagtgaccggcagaggctcatccagccatatatccataactactcctggctgctctttgctgccctggctctctatagcgcccacctggccagtgcagaggatgtggatggggagaagctggacccccagacgcacagcagtgccaccaccctgcggagccagtgcatgcagctcgtcggggactgtctgatgaaggctcatcagggaaaaggccttaaagctctagctttgctgggtgtattgccagatggggactcgagcctagaagatcaggccctaccagtcactgtgcccaccggagcgtcagaggagcagctagagaagaaagctgtccagggtgctgagctgtcagaagcaggcaatggaaagagagctgttcatgaggaaatcagacctgtagatttcaagcagagaaataaggcagataaaggtgtatcattatcgaaggatccttcatgccagacccaaatttcagattcacctgcagatgctagcccacctacaggacttccagatgctgaagattcagaagtgtcatctcagaagcccatagaggaaaaagcagttactccaagccctgagcaagtgtttgctgagtgttcccagaagaggattttgggattactagcagccatgttacctcccttaaagtcgggccccacggttcccctgatagacctggagcacgtccttccactcatgtttcaggttgtcatctcaaacgcaggccacctgaatgaaacctaccatctcaccctgggtcttctcggccagttaattatccgtcttttgccagcagaggtagacgccgcagtgatcaaagtcctctcagccaaacacaacctgtttgctgcaggggacagttccattgtgccagatggctggaaaaccacccacctgctctttagcctgggagctgtgtgtctggacagccgggtgggcttggactgggcgtgctccatggcagagatcctgcggtcactcaacagtgccccactgtggcgtgatgtcattgccaccttcacagaccactgcatcaagcagctgccattccagctgaagcacaccaacatcttcaccctgctcgtgctggttggcttcccccaggtcctctgtgtgggaacccgctgcgtttatatggataatgccaatgaaccccataatgtgatcatcttgaagcactttactgagaagaacagggctgtgattgttgatgtcaaaactcggaagaggaaaacagtgaaggactaccagctggtccagaagggaggaggacaagagtgtggtgactctcgggcccagctgagccagtactcccagcactttgcctttatcgccagtcaccttctgcaaagcagcatggacagccattgtcccgaggcagtagaagcaacttgggtcctgtccctggccctgaaaggattgtataaaacactaaaggctcacggttttgaggagatccgtgctactttccttcagaccgatttgctgaagttgctggtgaaaaagtgcagcaaagggactggctttagtaaaacgtggctcctccgggacctggaaattttgtccatcatgctgtactcctcaaaaaaggagatcaacgctttggctgagcacggagacctagagctggatgagcgaggggaccgagaggaagaggtggaacggccagtcagcagccctggcgacccagagcagaaaaagctggacccccttgagggcctggatgagcccaccagaatatgtttcttgatggctcatgatgccctcaatgcccctctgcacattctccgggccatatacgaactgcagatgaaaaagaccgattatttcttcctggaggttcagaagaggtttgatggtgatgagctcaccacagatgaaaggatacggtccctggctcagcggtggcagcccagtaagagtctgaggctggaagaacagagcgccaaagctgtggatacagacatgattatcctgccatgcttgtcccggcctgcacgctgtgaccaagccactgctgaatcgaaccctgtgacccagaagctgatctccagcacagagagcgaactgcagcagagctatgccaagcagcgccgtagcaagagcgccgccctcctgcacaaggagctgaactgcaagagtaagagggctgtccgggactacctcttccgagtgaacgaggccacagctgtcctgtacgcccgccacgtgcttgcatccctgctcgccgagtggcctagccacgtgccagtgagcgaggacatcctggagctcagtggccctgcccatatgacctacattttggatatgttcatgcagctggaagaaaagcatgagtgggagaagatcctgcagaaagtgctccagggctgccgagaggacatgctggggaccatggccctggctgcatgccagttcatggaggagccaggaatggaggtgcaagtgagggagtcgaaacacccgtataacaacaacaccaacttcgaggataaagttcacattcctggtgccatctacctctcaatcaaattcgactctcagtgcaacacagaggagggctgtgacgagttagccatgtccagcagcagtgacttccagcaagaccgacacagcttcagcgggtctcagcagaagtggaaagattttgaacttccaggagacactctgtattaccgcttcacctccgacatgagcaacaccgagtggggctacagattcaccgtgacggccggacacctggggcggttccagacaggattcgagattttgaagcagatgttgtcagaagaaagggtcgtgcctcatctcccattggcaaaaatttgggaatggctggtgggcgtggcctgtcgccagactggccatcaacgattaaaagccatccacttacttctgaggattgtgcgatgctgcggccacagtgacctgtgtgaccttgcgctgttgaagcccctgtggcagctctttacccacatggagtacggcctgtttgaggacgtgacgcagcccggcatcctccttcccctgcatcgtgccctcactgagctcttcttcgtcaccgagaaccgtgcccaggtgaggcctgaggtctgggcagggagcccggtgcctccatgtgcgtttgctccctctgctacccagggcagaagctgctgcctcatccgagcctgagtggccagggtctcgacaggccacacaggacaggcatggctgagagtctgaggctctcgcctctcccaggcctgggaaaccctcaggtcagctctgagattgcttattttgtcaggcctagagccaatgggggagaaactgcccgggatcagcccttgacaacagtgagttttggaaaataaaacgatgggttatttctgcttccttctctttttttcctcccctcagcacaatagactgattgaatgtgggagctgaaagggcctttcagagttctttagcttccctctcctttcacacatgaggaaactggcttgaggaggggtcccggcctggtcacccaagggcaggtggaggcaaaggtgaccccggcaccgggcacctggctcccgccagggttctgagcaaggcagtgccacgcggtgctgggcggcgtgagtagcgtccgcccatgagaggcttctgctttcgcaagcaggtgtcccaggtggtctgggagagctgcactgcgcatctggcgctgtcactcacagcccctgctctctctctgcaggagcttggcgtgctgcaggattacctgctggccctaaccacggacgaccaccttctccgctgtgcggcacaggtactctctccaccccaacagagctggcccccaggctggggcgccaccatctcaccattgccagggcagagaaggtctgtacattgcgtctgagtaggacagaatccacccggagcttacacagagcttgttccagttcagtcacttcctcctggtgctcagagagcatgcacgagccccatttatcagagtcattcactctaaactgtggggtcagaagaatttgtgtctttaaaaccaaaacaaccgatgccttaaatttagtttggctgattcttgaagtttccgtggagttagatttcacatatttttagatgtgagttgcttctctggtagcggaactcctcttctgacagctgtttggtctcaggacgcttcacacttttcactgactgaggagctcagaaagcttttggatatgtctattatgcatatatccatatgtgccattagaaacgagattttcaatttaaaaattaagcaaaagtgtaaacctttatcaatttatttttttaaagtagtgaacccatttcatgttaacatgaataacacgtcttgtgaaaaacgactctaacttttcaaaacaaagtaattactgagtgctctgggacaaataggtgaccaaaaaagaaaaaaggaatgcctgcagagggtg

SEQ ID NO: 332412 - DNA, 484 bp, Homo sapiens
acctccaccctcttgctgcccagaccctgaaggcctgacgggcctggcctcgcctccagggcatctcagtgccctcctggccctgttttctctactccctctggtccccagcactggctgttcgtttcctgtgagtgccttgcccttccccacctgcatctttgcactgttttccccaggcccggaggaggcgaagcccgcagagcaaaggtggaaacacgtgcctacgctgtaaagaaatcctgttccagagcatacctgttgtacaaacagacactgttcctaacgagaggagtgacgtattttcatcaccgtttttaatttgttttcttacgggtttacgattttgaatttttcttatttggttgaaagaattttgattctatcagcctgagtgagttcagcctgtaaaaaggatgttaagctgtgggtaaaatatgcaaacgaaaagaaatatattgtacaaattctatataataaggta

SEQ ID NO: 332413 - DNA, 597 bp, Homo sapiens
  misc_feature (92)..(92): n is a, c, g, or t
gagatcagcctgcccaacatggagaaaccccgtctctactaaaaatacaaaaattagctgggtgtggtggtgggtgcctgtaatcccagctnacttgggaggctaaggcatgagaatcgcttgaacctgggaggcggaggttgcagtgagctgagactgcgccactgcactccagcctgagcgacagaacgagactccatctcaaataaataaatacataaataaagcaaattccaggccttaaattatttccttcctacatactttatacccccctttaaaaattatgggttttattcacattaccaaaatgctattaccacaccttccaaaatcacaataagcaattcttccttagtccaatttctgcagacaacctctggggattgtgaaaccctgaaaggcatgttctgtgtttgtgtttcttcatttttctggagagagggcccacacctttctttacattttcagtaagcgcatcctagaggtgactaatgcccagttgcgaccacatgctctcctaaggccctgtgctcctgtttggagccacaaaagcttttggagggttgtaagctttaaatgtgtcttgcctttgca

SEQ ID NO: 332414 - DNA, 181 bp, Homo sapiens
acttaaaccaattctgtgccagcctgtggcagactctttggacttagagatgagaagatccctatccttgcgtgcttgttgaaatcagaggcacaatcaaagggggctgggcttatgcctaagaattctttcttgtctccatgtttgagttgcctttctgtctctgtctaccacgttctag

SEQ ID NO: 332415 - DNA, 383 bp, Homo sapiens
tgtttctaatacctcacaatagtgtttcctctttgatatatggcatcagggctttggcggggatattttccgtctgccccagctcaagagttttctgggtgttcctgacttgcattgtgtctccagtgttgtgaaggttctttccctgaggaaagcccaggcccagagcatcctggaagtcctgaagataactcagcactgtgcagaatcccttgggcagccccactgcttccatccacctttcatacttttcctgttggaacttctgacctgtcagaaagattttaccaagtaagtacaaaggacaggtccagaaggaaaacagcaaagatcattgtaaataaatcctgattatcttctctgattaatagcagcatcatttc

SEQ ID NO: 332416 - DNA, 6192 bp, Homo sapiens
gcattatgtcaaagatgatagggagtatgagtgaagcacttgtggaagaacgggattcgatggacagaaaggtgaatccaggaaagataaaatttttcagaagttgaaaactcagataggccttgaaccagaacagattcttagaagcagaggacaatgcacatgttcattgctcgctactgtgacctgttaaatgtggacatctcttgtgatgggtgtgatgagattgccccctggcatcgataccgctgtctgcagtgcagcgacatggatctctgcaaaacttgcttcctaggtggggtgaagcctgagggccacggagacgaccatgaaatggtcaacatggagtttacctgtgaccactgccagggtttgatcataggccggaggatgaactgcaatgtttgcgatgactttgatctttgctacggatgctatgcagcgaagaaatactcctacggccatttgcctacccacagcatcacggcccacccaatggtaaccattcggatcagtgaccggcagaggctcatccagccatatatccataactactcctggctgctctttgctgccctggctctctatagcgcccacctggccagtgcagaggatgtggatggggagaagctggacccccagacgcacagcagtgccaccaccctgcggagccagtgcatgcagctcgtcggggactgtctgatgaaggctcatcagggaaaaggccttaaagctctagctttgctgggtgtattgccagatggggactcgagcctagaagatcaggccctaccagtcactgtgcccaccggagcgtcagaggagcagctagagaagaaagctgtccagggtgctgagctgtcagaagcaggcaatggaaagagagctgttcatgaggaaatcagacctgtagatttcaagcagagaaataaggcagataaaggtgtatcattatcgaaggatccttcatgccagacccaaatttcagattcacctgcagatgctagcccacctacaggacttccagatgctgaagattcagaagtgtcatctcagaagcccatagaggaaaaagcagttactccaagccctgagcaagtgtttgctgagtgttcccagaagaggattttgggattactagcagccatgttacctcccttaaagtcgggccccacggttcccctgatagacctggagcacgtccttccactcatgtttcaggttgtcatctcaaacgcaggccacctgaatgaaacctaccatctcaccctgggtcttctcggccagttaattatccgtcttttgccagcagaggtagacgccgcagtgatcaaagtcctctcagccaaacacaacctgtttgctgcaggggacagttccattgtgccagatggctggaaaaccacccacctgctctttagcctgggagctgtgtgtctggacagccgggtgggcttggactgggcgtgctccatggcagagatcctgcggtcactcaacagtgccccactgtggcgtgatgtcattgccaccttcacagaccactgcatcaagcagctgccattccagctgaagcacaccaacatcttcaccctgctcgtgctggttggcttcccccaggtcctctgtgtgggaacccgctgcgtttatatggataatgccaatgaaccccataatgtgatcatcttgaagcactttactgagaagaacagggctgtgattgttgatgtcaaaactcggaagaggaaaacagtgaaggactaccagctggtccagaagggaggaggacaagagtgtggtgactctcgggcccagctgagccagtactcccagcactttgcctttatcgccagtcaccttctgcaaagcagcatggacagccattgtcccgaggcagtagaagcaacttgggtcctgtccctggccctgaaaggattgtataaaacactaaaggctcacggttttgaggagatccgtgctactttccttcagaccgatttgctgaagttgctggtgaaaaagtgcagcaaagggactggctttagtaaaacgtggctcctccgggacctggaaattttgtccatcatgctgtactcctcaaaaaaggagatcaacgctttggctgagcacggagacctagagctggatgagcgaggggaccgagaggaagaggtggaacggccagtcagcagccctggcgacccagagcagaaaaagctggacccccttgagggcctggatgagcccaccagaatatgtttcttgatggctcatgatgccctcaatgcccctctgcacattctccgggccatatacgaactgcagatgaaaaagaccgattatttcttcctggaggttcagaagaggtttgatggtgatgagctcaccacagatgaaaggatacggtccctggctcagcggtggcagcccagtaagagtctgaggctggaagaacagagcgccaaagctgtggatacagacatgattatcctgccatgcttgtcccggcctgcacgctgtgaccaagccactgctgaatcgaaccctgtgacccagaagctgatctccagcacagagagcgaactgcagcagagctatgccaagcagcgccgtagcaagagcgccgccctcctgcacaaggagctgaactgcaagagtaagagggctgtccgggactacctcttccgagtgaacgaggccacagctgtcctgtacgcccgccacgtgcttgcatccctgctcgccgagtggcctagccacgtgccagtgagcgaggacatcctggagctcagtggccctgcccatatgacctacattttggatatgttcatgcagctggaagaaaagcatgagtgggagaagatcctgcagaaagtgctccagggctgccgagaggacatgctggggaccatggccctggctgcatgccagttcatggaggagccaggaatggaggtgcaagtgagggagtcgaaacacccgtataacaacaacaccaacttcgaggataaagttcacattcctggtgccatctacctctcaatcaaattcgactctcagtgcaacacagaggagggctgtgacgagttagccatgtccagcagcagtgacttccagcaagaccgacacagcttcagcgggtctcagcagaagtggaaagattttgaacttccaggagacactctgtattaccgcttcacctccgacatgagcaacaccgagtggggctacagattcaccgtgacggccggacacctggggcggttccagacaggattcgagattttgaagcagatgttgtcagaagaaagggtcgtgcctcatctcccattggcaaaaatttgggaatggctggtgggcgtggcctgtcgccagactggccatcaacgattaaaagccatccacttacttctgaggattgtgcgatgctgcggccacagtgacctgtgtgaccttgcgctgttgaagcccctgtggcagctctttacccacatggagtacggcctgtttgaggacgtgacgcagcccggcatcctccttcccctgcatcgtgccctcactgagctcttcttcgtcaccgagaaccgtgcccaggagcttggcgtgctgcaggattacctgctggccctaaccacggacgaccaccttctccgctgtgcggcacaggctctgcagaacattgctgccatcagcctggccatcaactacccaaacaaggccacccgcctctggaatgtggagtgttagcccttggtggggcgtgcatgggactagttcatctgccacagggattttagagcagacatctaacctcattcaggaaaactcctgtagcgccagtgcccagctctccttgagctgaccactccagttaggatgccaagcagccacgtctccaagagctcccgtgcgtaggctggacacaagcacaggctgtagcatggtgaaaataagccaagcagtgcagaatgcctcagaaagggtgggcagggggcccttaagaaggttcagagaccagccttctccagaggctgtcactgcaggagccgtgggcctgggaagacttggaagcggcctctctcaactggtttctgtctccgtggagctggaactgcctgcacttgccttcagagggaggcacagtccacccagatccacctttccagcaagacccccagtggctgcccagcctgggagcacctctttgcttttcacaccaaaccaaaactggcgagagcccctcctagccaccagtgatccccaagcatccagtacagaaccaggcatcgagctagctccctgcacggccgcaccctcccagagaactccttgaggagaacaagtgcccttggggacagccggcaggcgcccctgtacgtctgctcatgcaccaggcagcacagccgcagttcctcagttgttgttttgacatatttcagtttccacctcacgtttttagagcagaaccacactgtctccctggaggggctcgagggcatgaccggggactgaccattctgtgaaaggagcagaatgtgaggagcacgcgtgagcttatgtaccgtgaagatgatcagaggatatcttattttaagagtaaaaacccacataattttatttctgcttgatagtcatggtagtctgtcatacccacctctgggactctgcgtggctgtttggctgtcacttgtagcaataacgacattagttctagtcagtgctgttttacatttttcttttgatgggtttagtcttgccctggagtgccgatgatgattctccctccagagccacgcttgggaacatgaagcaagtctggcgtgtgggctgcgtgccggccttagtgggacccgtggggttggagcatgcctttaggggcagtgtctgggccgaagcacgtcccaccacacagtgccagagccagagaaggggccccaccaccaaggccaagcttgaccaggtcagcattgccatggcccagtgtgccccgtggcctctgaagatccctctgtgcagggtctgcagggatctggattgcaagggcccaagtctgcaggtctggaagcatcttcctataagagcactttcgccttctgggtcaggactccaaggtgcagcgggcttcacagccctacaattgggttctcagctaagccccagagttctggtagaaccatcccggggcgggtggagggtgggatttaagggagacgggaacacatggggcaggtcctggaacttggtggcctgaggactgaggccattgccctggtggaaaggcctggcctggttcctgtggcttgggacctgaataggcaggtgctgctggctccgtagaaacccttttcccatcttttgctctttgccaaacctaccttgctttgggagctgcctgcaccaccccagagaaggccccaccttcttcatccctcagacccgaggaggcctcccagtaaggagtttcccaagaggggactcacaggaaacaagtcttagtgcttgggagggaggccccgctgcgtgctcagactcacagccaacctggaaggtagacgagatagcgccacccacgcccctccacaccccagactccgagtaaagcgggcggtagggccggagtcacctcccctatggcagtggccgccgctgtactccatcctcccgtcaggaagatcagctgtaaataaacgctgggctccccagagcacctgtccgcccactgcccttgctgttctgggatcttcgctgcagttcacgggaaacaagcctgagtccgctcgcacccgcggctgctctcccggctcggcccggccgcctctgtctccggccaccgggtggcgctgccgagccagagccgccgcgtcccggcgctttccaggagccccaggcccggaggaggcgaagcccgcagagcaaaggtggaaacacgtgcctacgctgtaaagaaatcctgttccagagcatacctgttgtacaaacagacactgttcctaacgagaggagtgacgtattttcatcaccgtttttaatttgttttcttacgggtttacgattttgaatttttcttatttggttgaaagaattttgattctatcagcctgagtgagttcagcctgtaaaaaggatgttaagctgtgggtaaaatatgcaaacgaaaagaaatatattgtacaaattctatataataaggta

SEQ ID NO: 332417 - DNA, 3851 bp, Homo sapiens
ttgtttgttttttggggttttgtttgtttgtttgtttttaattttttgtagagacagggtctcgctttatttcccaggttggtctccaactcctgggctgaagtgatcctcccacctctgcttcccaaagtgctgggattacaggtgtgagccaccatgtgtagcccgtaacatccatttttcaagatgcacagtaatccccgtgagcacatttccgacctcctgttcccttggagcctggttttaaagtttaggttctgcccctttccttctttgctgttggtgactattcgtggctgctttgtggggagcataggtgaggcgactttataatcatttgtaccagctgtgggagagggagggtctgagctgtggttcctgccagctgtaagccatgtgaccttggcatggctctcagtaaactgaccacctccggggctcctcctgcagtgacctgtgtgaccttgcgctgttgaagcccctgtggcagctctttacccacatggagtacggcctgtttgaggacgtgacgcagcccggcatcctccttcccctgcatcgtgccctcactgagctcttcttcgtcaccgagaaccgtgcccaggtgaggcctgaggtctgggcagggagcccggtgcctccatgtgcgtttgctccctctgctacccagggcagaagctgctgcctcatccgagcctgagtggccagggtctcgacaggccacacaggacaggcatggctgagagtctgaggctctcgcctctcccaggcctgggaaaccctcaggtcagctctgagattgcttattttgtcaggcctagagccaatgggggagaaactgcccgggatcagcccttgacaacagtgagttttggaaaataaaacgatgggttatttctgcttccttctctttttttcctcccctcagcacaatagactgattgaatgtgggagctgaaagggcctttcagagttctttagcttccctctcctttcacacatgaggaaactggcttgaggaggggtcccggcctggtcacccaagggcaggtggaggcaaaggtgaccccggcaccgggcacctggctcccgccagggttctgagcaaggcagtgccacgcggtgctgggcggcgtgagtagcgtccgcccatgagaggcttctgctttcgcaagcaggtgtcccaggtggtctgggagagctgcactgcgcatctggcgctgtcactcacagcccctgctctctctctgcaggagcttggcgtgctgcaggattacctgctggccctaaccacggacgaccaccttctccgctgtgcggcacaggctctgcagaacattgctgccatcagcctggccatcaactacccaaacaaggccacccgcctctggaatgtggagtgttagcccttggtggggcgtgcatgggactagttcatctgccacagggattttagagcagacatctaacctcattcaggaaaactcctgtagcgccagtgcccagctctccttgagctgaccactccagttaggatgccaagcagccacgtctccaagagctcccgtgcgtaggctggacacaagcacaggctgtagcatggtgaaaataagccaagcagtgcagaatgcctcagaaagggtgggcagggggcccttaagaaggttcagagaccagccttctccagaggctgtcactgcaggagccgtgggcctgggaagacttggaagcggcctctctcaactggtttctgtctccgtggagctggaactgcctgcacttgccttcagagggaggcacagtccacccagatccacctttccagcaagacccccagtggctgcccagcctgggagcacctctttgcttttcacaccaaaccaaaactggcgagagcccctcctagccaccagtgatccccaagcatccagtacagaaccaggcatcgagctagctccctgcacggccgcaccctcccagagaactccttgaggagaacaagtgcccttggggacagccggcaggcgcccctgtacgtctgctcatgcaccaggcagcacagccgcagttcctcagttgttgttttgacatatttcagtttccacctcacgtttttagagcagaaccacactgtctccctggaggggctcgagggcatgaccggggactgaccattctgtgaaaggagcagaatgtgaggagcacgcgtgagcttatgtaccgtgaagatgatcagaggatatcttattttaagagtaaaaacccacataattttatttctgcttgatagtcatggtagtctgtcatacccacctctgggactctgcgtggctgtttggctgtcacttgtagcaataacgacattagttctagtcagtgctgttttacatttttcttttgatgggtttagtcttgccctggagtgccgatgatgattctccctccagagccacgcttgggaacatgaagcaagtctggcgtgtgggctgcgtgccggccttagtgggacccgtggggttggagcatgcctttaggggcagtgtctgggccgaagcacgtcccaccacacagtgccagagccagagaaggggccccaccaccaaggccaagcttgaccaggtcagcattgccatggcccagtgtgccccgtggcctctgaagatccctctgtgcagggtctgcagggatctggattgcaagggcccaagtctgcaggtctggaagcatcttcctataagagcactttcgccttctgggtcaggactccaaggtgcagcgggcttcacagccctacaattgggttctcagctaagccccagagttctggtagaaccatcccggggcgggtggagggtgggatttaagggagacgggaacacatggggcaggtcctggaacttggtggcctgaggactgaggccattgccctggtggaaaggcctggcctggttcctgtggcttgggacctgaataggcaggtgctgctggctccgtagaaacccttttcccatcttttgctctttgccaaacctaccttgctttgggagctgcctgcaccaccccagagaaggccccaccttcttcatccctcagacccgaggaggcctcccagtaaggagtttcccaagaggggactcacaggaaacaagtcttagtgcttgggagggaggccccgctgcgtgctcagactcacagccaacctggaaggtagacgagatagcgccacccacgcccctccacaccccagactccgagtaaagcgggcggtagggccggagtcacctcccctatggcagtggccgccgctgtactccatcctcccgtcaggaagatcagctgtaaataaacgctgggctccccagagcacctgtccgcccactgcccttgctgttctgggatcttcgctgcagttcacgggaaacaagcctgagtccgctcgcacccgcggctgctctcccggctcggcccggccgcctctgtctccggccaccgggtggcgctgccgagccagagccgccgcgtcccggcgctttccaggagccccaggcccggaggaggcgaagcccgcagagcaaaggtggaaacacgtgcctacgctgtaaagaaatcctgttccagagcatacctgttgtacaaacagacactgttcctaacgagaggagtgacgtattttcatcaccgtttttaatttgttttcttacgggtttacgattttgaatttttcttatttggttgaaagaattttgattctatcagcctgagtgagttcagcctgtaaaaaggatgttaagctgtgggtaaaatatgcaaacgaaaagaaatatattgtacaaattctatataataaggta

SEQ ID NO: 332418 - DNA, 7402 bp, Homo sapiens
cccttgtcaccttccacacccacccgccggcctcccttcacccgagggcgactccggctgctctcctttcgatccatggaggaggccagactggtgcccacagtgaaagagaaataccctgtgctgaaggacgtcatggacttcattaaggatcagtcgctctcgcacaggagtgttgtgaaggttctttccctgaggaaagcccaggcccagagcatcctggaagtcctgaagataactcagcactgtgcagaatcccttgggcagccccactgcttccatccacctttcatacttttcctgttggaacttctgacctgtcagaaagattttaccaattattttggacacctggaaggctgtggtgctgatctacacaaagaaattcgagacacttactatcaacttgttctgtttttggtcaaagcagttaaaggatttagtagcctaaatgacaggtccttgctccctgccttatcctgtgttcagacagccctgcttcatcttttggatatgggctgggaacccaatgatctcgccttctttgttgatattcagttaccagatctcctcatgaaaatgtcacaggagaatataagtgtccatgacagtgtgatcagccaatggagtgaagaagatgagcttgctgatgccaagcagaattcagaatggatggatgagtgtcaggatggcatgtttgaggcctggtatgaaaaaatagcccaggaagatccagagaagcagaggaaaatgcacatgttcattgctcgctactgtgacctgttaaatgtggacatctcttgtgatgggtgtgatgagattgccccctggcatcgataccgctgtctgcagtgcagcgacatggatctctgcaaaacttgcttcctaggtggggtgaagcctgagggccacggagacgaccatgaaatggtcaacatggagtttacctgtgaccactgccagggtttgatcataggccggaggatgaactgcaatgtttgcgatgactttgatctttgctacggatgctatgcagcgaagaaatactcctacggccatttgcctacccacagcatcacggcccacccaatggtaaccattcggatcagtgaccggcagaggctcatccagccatatatccataactactcctggctgctctttgctgccctggctctctatagcgcccacctggccagtgcagaggatgtggatggggagaagctggacccccagacgcacagcagtgccaccaccctgcggagccagtgcatgcagctcgtcggggactgtctgatgaaggctcatcagggaaaaggccttaaagctctagctttgctgggtgtattgccagatggggactcgagcctagaagatcaggccctaccagtcactgtgcccaccggagcgtcagaggagcagctagagaagaaagctgtccagggtgctgagctgtcagaagcaggcaatggaaagagagctgttcatgaggaaatcagacctgtagatttcaagcagagaaataaggcagataaaggtgtatcattatcgaaggatccttcatgccagacccaaatttcagattcacctgcagatgctagcccacctacaggacttccagatgctgaagattcagaagtgtcatctcagaagcccatagaggaaaaagcagttactccaagccctgagcaagtgtttgctgagtgttcccagaagaggattttgggattactagcagccatgttacctcccttaaagtcgggccccacggttcccctgatagacctggagcacgtccttccactcatgtttcaggttgtcatctcaaacgcaggccacctgaatgaaacctaccatctcaccctgggtcttctcggccagttaattatccgtcttttgccagcagaggtagacgccgcagtgatcaaagtcctctcagccaaacacaacctgtttgctgcaggggacagttccattgtgccagatggctggaaaaccacccacctgctctttagcctgggagctgtgtgtctggacagccgggtgggcttggactgggcgtgctccatggcagagatcctgcggtcactcaacagtgccccactgtggcgtgatgtcattgccaccttcacagaccactgcatcaagcagctgccattccagctgaagcacaccaacatcttcaccctgctcgtgctggttggcttcccccaggtcctctgtgtgggaacccgctgcgtttatatggataatgccaatgaaccccataatgtgatcatcttgaagcactttactgagaagaacagggctgtgattgttgatgtcaaaactcggaagaggaaaacagtgaaggactaccagctggtccagaagggaggaggacaagagtgtggtgactctcgggcccagctgagccagtactcccagcactttgcctttatcgccagtcaccttctgcaaagcagcatggacagccattgtcccgaggcagtagaagcaacttgggtcctgtccctggccctgaaaggattgtataaaacactaaaggctcacggttttgaggagatccgtgctactttccttcagaccgatttgctgaagttgctggtgaaaaagtgcagcaaagggactggctttagtaaaacgtggctcctccgggacctggaaattttgtccatcatgctgtactcctcaaaaaaggagatcaacgctttggctgagcacggagacctagagctggatgagcgaggggaccgagaggaagaggtggaacggccagtcagcagccctggcgacccagagcagaaaaagctggacccccttgagggcctggatgagcccaccagaatatgtttcttgatggctcatgatgccctcaatgcccctctgcacattctccgggccatatacgaactgcagatgaaaaagaccgattatttcttcctggaggttcagaagaggtttgatggtgatgagctcaccacagatgaaaggatacggtccctggctcagcggtggcagcccagtaagagtctgaggctggaagaacagagcgccaaagctgtggatacagacatgattatcctgccatgcttgtcccggcctgcacgctgtgaccaagccactgctgaatcgaaccctgtgacccagaagctgatctccagcacagagagcgaactgcagcagagctatgccaagcagcgccgtagcaagagcgccgccctcctgcacaaggagctgaactgcaagagtaagagggctgtccgggactacctcttccgagtgaacgaggccacagctgtcctgtacgcccgccacgtgcttgcatccctgctcgccgagtggcctagccacgtgccagtgagcgaggacatcctggagctcagtggccctgcccatatgacctacattttggatatgttcatgcagctggaagaaaagcatgagtgggagaagatcctgcagaaagtgctccagggctgccgagaggacatgctggggaccatggccctggctgcatgccagttcatggaggagccaggaatggaggtgcaagtgagggagtcgaaacacccgtataacaacaacaccaacttcgaggataaagttcacattcctggtgccatctacctctcaatcaaattcgactctcagtgcaacacagaggagggctgtgacgagttagccatgtccagcagcagtgacttccagcaagaccgacacagcttcagcgggtctcagcagaagtggaaagattttgaacttccaggagacactctgtattaccgcttcacctccgacatgagcaacaccgagtggggctacagattcaccgtgacggccggacacctggggcggttccagacaggattcgagattttgaagcagatgttgtcagaagaaagggtcgtgcctcatctcccattggcaaaaatttgggaatggctggtgggcgtggcctgtcgccagactggccatcaacgattaaaagccatccacttacttctgaggattgtgcgatgctgcggccacagtgacctgtgtgaccttgcgctgttgaagcccctgtggcagctctttacccacatggagtacggcctgtttgaggacgtgacgcagcccggcatcctccttcccctgcatcgtgccctcactgagctcttcttcgtcaccgagaaccgtgcccaggtgaggcctgaggtctgggcagggagcccggtgcctccatgtgcgtttgctccctctgctacccagggcagaagctgctgcctcatccgagcctgagtggccagggtctcgacaggccacacaggacaggcatggctgagagtctgaggctctcgcctctcccaggcctgggaaaccctcaggtcagctctgagattgcttattttgtcaggcctagagccaatgggggagaaactgcccgggatcagcccttgacaacagtgagttttggaaaataaaacgatgggttatttctgcttccttctctttttttcctcccctcagcacaatagactgattgaatgtgggagctgaaagggcctttcagagttctttagcttccctctcctttcacacatgaggaaactggcttgaggaggggtcccggcctggtcacccaagggcaggtggaggcaaaggtgaccccggcaccgggcacctggctcccgccagggttctgagcaaggcagtgccacgcggtgctgggcggcgtgagtagcgtccgcccatgagaggcttctgctttcgcaagcaggtgtcccaggtggtctgggagagctgcactgcgcatctggcgctgtcactcacagcccctgctctctctctgcaggagcttggcgtgctgcaggattacctgctggccctaaccacggacgaccaccttctccgctgtgcggcacaggctctgcagaacattgctgccatcagcctggccatcaactacccaaacaaggccacccgcctctggaatgtggagtgttagcccttggtggggcgtgcatgggactagttcatctgccacagggattttagagcagacatctaacctcattcaggaaaactcctgtagcgccagtgcccagctctccttgagctgaccactccagttaggatgccaagcagccacgtctccaagagctcccgtgcgtaggctggacacaagcacaggctgtagcatggtgaaaataagccaagcagtgcagaatgcctcagaaagggtgggcagggggcccttaagaaggttcagagaccagccttctccagaggctgtcactgcaggagccgtgggcctgggaagacttggaagcggcctctctcaactggtttctgtctccgtggagctggaactgcctgcacttgccttcagagggaggcacagtccacccagatccacctttccagcaagacccccagtggctgcccagcctgggagcacctctttgcttttcacaccaaaccaaaactggcgagagcccctcctagccaccagtgatccccaagcatccagtacagaaccaggcatcgagctagctccctgcacggccgcaccctcccagagaactccttgaggagaacaagtgcccttggggacagccggcaggcgcccctgtacgtctgctcatgcaccaggcagcacagccgcagttcctcagttgttgttttgacatatttcagtttccacctcacgtttttagagcagaaccacactgtctccctggaggggctcgagggcatgaccggggactgaccattctgtgaaaggagcagaatgtgaggagcacgcgtgagcttatgtaccgtgaagatgatcagaggatatcttattttaagagtaaaaacccacataattttatttctgcttgatagtcatggtagtctgtcatacccacctctgggactctgcgtggctgtttggctgtcacttgtagcaataacgacattagttctagtcagtgctgttttacatttttcttttgatgggtttagtcttgccctggagtgccgatgatgattctccctccagagccacgcttgggaacatgaagcaagtctggcgtgtgggctgcgtgccggccttagtgggacccgtggggttggagcatgcctttaggggcagtgtctgggccgaagcacgtcccaccacacagtgccagagccagagaaggggccccaccaccaaggccaagcttgaccaggtcagcattgccatggcccagtgtgccccgtggcctctgaagatccctctgtgcagggtctgcagggatctggattgcaagggcccaagtctgcaggtctggaagcatcttcctataagagcactttcgccttctgggtcaggactccaaggtgcagcgggcttcacagccctacaattgggttctcagctaagccccagagttctggtagaaccatcccggggcgggtggagggtgggatttaagggagacgggaacacatggggcaggtcctggaacttggtggcctgaggactgaggccattgccctggtggaaaggcctggcctggttcctgtggcttgggacctgaataggcaggtgctgctggctccgtagaaacccttttcccatcttttgctctttgccaaacctaccttgctttgggagctgcctgcaccaccccagagaaggccccaccttcttcatccctcagacccgaggaggcctcccagtaaggagtttcccaagaggggactcacaggaaacaagtcttagtgcttgggagggaggccccgctgcgtgctcagactcacagccaacctggaaggtagacgagatagcgccacccacgcccctccacaccccagactccgagtaaagcgggcggtagggccggagtcacctcccctatggcagtggccgccgctgtactccatcctcccgtcaggaagatcagctgtaaataaacgctgggctccccagagcacctgtccgcccactgcccttgctgttctgggatcttcgctgcagttcacgggaaacaagcctgagtccgctcgcacccgcggctgctctcccggctcggcccggccgcctctgtctccggccaccgggtggcgctgccgagccagagccgccgcgtcccggcgctttccaggagccccaggcccggaggaggcgaagcccgcagagcaaaggtggaaacacgtgcctacgctgtaaagaaatccttgttcctaacgagaggagtgacgtattttcatcaccgtttttaatttgttttcttacgggtttacgattttgaatttttcttatttggttgaaagaattttgattctatcagcctgagtgagttcagcctgtaaaaaggatgttaagctgtgggtaaaatatgcaaacgaaaagaaatatattgtacaaattctatataataaggta

SEQ ID NO: 332419 - DNA, 3473 bp, Homo sapiens
cccttgtcaccttccacacccacccgccggcctcccttcacccgagggcgactccggctgctctcctttcgatccatggaggaggccagactggtgcccacagtgaaagagaaataccctgtgctgaaggacgtcatggacttcattaaggatcagtcgctctcgcacaggagtgttgtgaaggttctttccctgaggaaagcccaggcccagagcatcctggaagtcctgaagataactcagcactgtgcagaatcccttgggcagccccactgcttccatccacctttcatacttttcctgttggaacttctgacctgtcagaaagattttaccaattattttggacacctggaaggctgtggtgctgatctacacaaagaaattcgagacacttactatcaacttgttctgtttttggtcaaagcagttaaaggatttagtagcctaaatgacaggtccttgctccctgccttatcctgtgttcagacagccctgcttcatcttttggatatgggctgggaacccaatgatctcgccttctttgttgatattcagttaccagatctcctcatgaaaatgtcacaggagaatataagtgtccatgacagtgtgatcagccaatggagtgaagaagatgagcttgctgatgccaagcagaattcagaatggatggatgagtgtcaggatggcatgtttgaggcctggtatgaaaaaatagcccaggaagatccagagaagcagaggaaaatgcacatgttcattgctcgctactgtgacctgttaaatgtggacatctcttgtgatgggtgtgatgagattgccccctggcatcgataccgctgtctgcagtgcagcgacatggatctctgcaaaacttgcttcctaggtggggtgaagcctgagggccacggagacgaccatgaaatggtcaacatggagtttacctgtgaccactgccagggtttgatcataggccggaggatgaactgcaatgtttgcgatgactttgatctttgctacggatgctatgcagcgaagaaatactcctacggccatttgcctacccacagcatcacggcccacccaatggtaaccattcggatcagtgaccggcagaggctcatccagccatatatccataactactcctggctgctctttgctgccctggctctctatagcgcccacctggccagtgcagaggatgtggatggggagaagctggacccccagacgcacagcagtgccaccaccctgcggagccagtgcatgcagctcgtcggggactgtctgatgaaggctcatcagggaaaaggccttaaagctctagctttgctgggtgtattgccagatggggactcgagcctagaagatcaggccctaccagtcactgtgcccaccggagcgtcagaggagcagctagagaagaaagctgtccagggtgctgagctgtcagaagcaggcaatggaaagagagctgttcatgaggaaatcagacctgtagatttcaagcagagaaataaggcagataaaggtgtatcattatcgaaggatccttcatgccagacccaaatttcagattcacctgcagatgctagcccacctacaggacttccagatgctgaagattcagaagtgtcatctcagaagcccatagaggaaaaagcagttactccaagccctgagcaagtgtttgctgagtgttcccagaagaggattttgggattactagcagccatgttacctcccttaaagtcgggccccacggttcccctgatagacctggagcacgtccttccactcatgtttcaggttgtcatctcaaacgcaggccacctgaatgaaacctaccatctcaccctgggtcttctcggccagttaattatccgtcttttgccagcagaggtagacgccgcagtgatcaaagtcctctcagccaaacacaacctgtttgctgcaggggacagttccattgtgccagatggctggaaaaccacccacctgctctttagcctgggagctgtgtgtctggacagccgggtgggcttggactgggcgtgctccatggcagagatcctgcggtcactcaacagtgccccactgtggcgtgatgtcattgccaccttcacagaccactgcatcaagcagctgccattccagctgaagcacaccaacatcttcaccctgctcgtgctggttggcttcccccaggtcctctgtgtgggaacccgctgcgtttatatggataatgccaatgaaccccataatgtgatcatcttgaagcactttactgagaagaacagggctgtgattgttgatgtcaaaactcggaagaggaaaacagtgaaggactaccagctggtccagaagggaggaggacaagagtgtggtgactctcgggcccagctgagccagtactcccagcactttgcctttatcgccagtcaccttctgcaaagcagcatggacagccattgtcccgaggcagtagaagcaacttgggtcctgtccctggccctgaaaggattgtataaaacactaaaggctcacggttttgaggagatccgtgctactttccttcagaccgatttgctgaagttgctggtgaaaaagtgcagcaaagggactggctttagtaaaacgtggctcctccgggacctggaaattttgtccatcatgctgtactcctcaaaaaaggagatcaacgctttggctgagcacggagacctagagctggatgagcgaggggaccgagaggaagaggtggaacggccagtcagcagccctggcgacccagagcagaaaaagctggacccccttgagggcctggatgagcccaccagaatatgtttcttgatggctcatgatgccctcaatgcccctctgcacattctccgggccatatacgaactgcagatgaaaaagaccgattatttcttcctggaggttcagaagaggtttgatggtgatgagctcaccacagatgaaaggatacggtccctggctcagcggtggcagcccagtaagagtctgaggctggaagaacagagcgccaaagctgtggatacagacatgattatcctgccatgcttgtcccggcctgcacgctgtgaccaagccactgctgaatcgaaccctgtgacccagaagctgatctccagcacagagagcgaactgcagcagagctatgccaagcagcgccgtagcaagagcgccgccctcctgcacaaggagctgaactgcaagagtaagagggctgtccgggactacctcttccgagtgaacgaggccacagctgtcctgtacgcccgccacgtgcttgcatccctgctcgccgagtggcctagccacgtgccagtgagcgaggacatccagggccatggtccccagcatgtctctcggcagccctggagcactttctgcaggatcttctcccactcatgcttttcttccagctgcatgaacatatc

SEQ ID NO: 332420 - DNA, 2917 bp, Homo sapiens
cccttgtcaccttccacacccacccgccggcctcccttcacccgagggcgactccggctgctctcctttcgatccatggaggaggccagactggtgcccacagtgaaagagaaataccctgtgctgaaggacgtcatggacttcattaaggatcagtcgctctcgcacaggagtgttgtgaaggttctttccctgaggaaagcccaggcccagagcatcctggaagtcctgaagataactcagcactgtgcagaatcccttgggcagccccactgcttccatccacctttcatacttttcctgttggaacttctgacctgtcagaaagattttaccaattattttggacacctggaaggctgtggtgctgatctacacaaagaaattcgagacacttactatcaacttgttctgtttttggtcaaagcagttaaaggatttagtagcctaaatgacaggtccttgctccctgccttatcctgtgttcagacagccctgcttcatcttttggatatgggctgggaacccaatgatctcgccttctttgttgatattcagttaccagatctcctcatgaaaatgtcacaggagaatataagtgtccatgacagtgtgatcagccaatggagtgaagaagatgagcttgctgatgccaagcagaattcagaatggatggatgagtgtcaggatggcatgtttgaggcctggtatgaaaaaatagcccaggaagatccagagaagcagaggaaaatgcacatgttcattgctcgctactgtgacctgttaaatgtggacatctcttgtgatgggtgtgatgagattgccccctggcatcgataccgctgtctgcagtgcagcgacatggatctctgcaaaacttgcttcctaggtggggtgaagcctgagggccacggagacgaccatgaaatggtcaacatggagtttacctgtgaccactgccagggtttgatcataggccggaggatgaactgcaatgtttgcgatgactttgatctttgctacggatgctatgcagcgaagaaatactcctacggccatttgcctacccacagcatcacggcccacccaatggtaaccattcggatcagtgaccggcagaggctcatccagccatatatccataactactcctggctgctctttgctgccctggctctctatagcgcccacctggccagtgcagaggatgtggatggggagaagctggacccccagacgcacagcagtgccaccaccctgcggagccagtgcatgcagctcgtcggggactgtctgatgaaggctcatcagggaaaaggccttaaagctctagctttgctgggtgtattgccagatggggactcgagcctagaagatcaggccctaccagtcactgtgcccaccggagcgtcagaggagcagctagagaagaaagctgtccagggtgctgagctgtcagaagcaggcaatggaaagagagctgttcatgaggaaatcagacctgtagatttcaagcagagaaataaggcagataaaggtgtatcattatcgaaggatccttcatgccagacccaaatttcagattcacctgcagatgctagcccacctacaggacttccagatgctgaagattcagaagtgtcatctcagaagcccatagaggaaaaagcagttactccaagccctgagcaagtgtttgctgagtgttcccagaagaggattttgggattactagcagccatgttacctcccttaaagtcgggccccacggttcccctgatagacctggagcacgtccttccactcatgtttcaggttgtcatctcaaacgcaggccacctgaatgaaacctaccatctcaccctgggtcttctcggccagttaattatccgtcttttgccagcagaggtagacgccgcagtgatcaaagtcctctcagccaaacacaacctgtttgctgcaggggacagttccattgtgccagatggctggaaaaccacccacctgctctttagcctgggagctgtgtgtctggacagccgggtgggcttggactgggcgtgctccatggcagagatcctgcggtcactcaacagtgccccactgtggcgtgatgtcattgccaccttcacagaccactgcatcaagcagctgccattccagctgaagcacaccaacatcttcaccctgctcgtgctggttggcttcccccaggtcctctgtgtgggaacccgctgcgtttatatggataatgccaatgaaccccataatgtgatcatcttgaagcactttactgagaagaacagggctgtgattgttgatgtcaaaactcggaagaggaaaacagtgaaggactaccagctggtccagaagggaggaggacaagagtgtggtgactctcgggcccagctgagccagtactcccagcactttgcctttatcgccagtcaccttctgcaaagcagcatggacagccattgtcccgaggcagtagaagcaacttgggtcctgtccctggccctgaaaggattgtataaaacactaaaggtaatggggagcttctccagttggcagtggatctggctataatttgacatctgcatggggattaactaggaggaaatgccatctgatttcgatggatggtaaaccataggatcttgattatttttagaaacgcgtgggccttacacacagataacttcaaagaggaaatacaattttcctgatggcttctctgtctttccattgtttcaaggaatctgatactactacttcatgggaacacaactttgtcagacgagaagaaaaattgaaaagtttcttactttcctctctaaatgacaattcctgtgcttcatcatagaagatgaagggaagaatagagggagctagcctcctaggggatgagcaacag

SEQ ID NO: 332421 - DNA, 966 bp, Homo sapiens
gtagaaaagacagtgaggctggtgccaaagtcatcaatgaagggaggcagaggggtgagcgtgattgtgtggagaggatcaaatgaggtcatttgtgaaaaatacttaacacagtatctggcacccaagtagtggtgggagggatgggtttatattcacaaagaagataaataatctcatctccatgcttctgggtaactctcttgagcccgtcagagggactcacttgctgttttgtgtgttaccttctataggtattatatttgtatttacttaagttcctgtgccgctttgctcagctgactgccacttgctctttttcatgtaagaaatcattattattattaagaaaaagatgttctggcaattaagtgaatcagtgatttcctctgtttctagttattttggacacctggaaggctgtggtgctgatctacacaaagaaattcgagacacttactatcaacttgttctgtttttggtcaaagcagttaaaggatttagtagcctaaatgacaggtccttgctccctgccttatcctgtgttcagacagccctgcttcatcttttggatatgggctgggaacccaatgatctcgccttctttgttgatattcagttaccagatctcctcatgaaaatgtcacaggagaatataagtgtccatgacagtgtgatcagccaatggagtgaagaagatgagcttgctgatgccaagcagaattcagaatggatggatgagtgtcaggatggcatgtttgaggcctggtatgaaaaaatagcccaggaagatccagagaagcagaggaaaggctgtctgaacacaggataaggcagggagcaaggacctgtcatttaggctactaaatcctttaactgctttgaccaaaaacagaacaagttgatagtaagtgtctcgaatttctttgtgtagatcagcaccacagcctttcaggtgtccaaaat

SEQ ID NO: 332422 - DNA, 2882 bp, Homo sapiens
  misc_feature (894)..(894): n is a, c, g, or t
  misc_feature (1136)..(1136): n is a, c, g, or t
  misc_feature (1324)..(1324): n is a, c, g, or t
  misc_feature (1387)..(1387): n is a, c, g, or t
  misc_feature (2320)..(2320): n is a, c, g, or t
aacgcagataaggcaactcttatggagcttacagtccagtgggcaagcgcataattgcaagaggtactaagtgctgtgaaggaaatagattgctctgttaaggaataggaagtgagaagtgatcaaatcggaaggagctgccatatatgaagcagggcatatgcagttctggcagagggaaaagtatgttcagagattgacgggactgctgaacggtactgttcaacagcatggcctggtggaagatacagaaggctggcgttgctggaggtagggagtgactcacagacagtgatgagatgagggtggtgagatcatgcaggaccttgggaaccaaggtgaggaagtaagagtttactttaaatgctttaggtagtaatcacaattttaaacagaagtgacatgatccctctgtaaatgtctgtggaaataaattgagttgaataccatttgaattttatctacagaaaagtatccagtgtattgcagcttttttcctgcaccatacagcccaattttgtcaagggtctagtctagtgataagctctgaagtttttggtattatttgctgaactggattgggttggattggattagtacactggaatcatgtagcatcagttgcctagtttgaattgagatgatctgataccctctccatttcagagtgatttattctgaaatggagtgaataaatgccacactgtgcgtcagaatgacctgtgcatcagaatggcctgtggcactttttaaacatacagatgcctgaggtacagatctcagtccaaaccgactggatcagaatctctagaacagtagttttcactctcgatgtgcattgaattcatctttcatgcatattccagattcttttatgtcatttagctcctaggncagtggagggacaggaatcaagaagagggtatggaaactgaatgcacaaaactggagggattcctatgtttacaaaagttaatttgggcatctcctgagcttggcagaaaaggatgaggatgatgtttctgtaaaatctgaaaatcaaacaaaggcaattttgtttactatagatggtttttaacacaccttagtcatggccttgacaaacctgatgtgatttaagattctgttgatagctnttgcccaagtgagatctttgaatacctactttcaattaatataacttgtaatttctctctggaaaggatagagtcctaatcttaggttcattctttttacaaattaattatgtagggtagaatttacaggattgcaacactgttgtgttagaaatctttatatagtaagaaagttatttgcttctaanattcgatgttttggggcagctgataacttgtgtagccatgactattgagtcagaactgttacnattcaggcaccctctataggtggactttccagtagttgctttaatgaaaacgtggtttttgtggcaatacttttttcctttaagtaaaaaattttaaaaaacaaaaataaaaagtctgtgtatttagtagcatacatcttacagatcttgggaaaaaaccccaagtccctttgtttatgactaaataactttcttcctatatgtagaaatgagtattgtcctgataataagcataggacaactccttgacttgagattaactccaatggcatatatggtctgtagatatttttgtgaaaaattacagttgtagatgtttcagggtttatttgtgaactcagtttcactactaacaaggcaattatactacttaacatgttaaacaggttttagaaaatagttttgtaattataagggtaataagtgaaaagtaagagaaacaaaaggcataaaacaaaacaatgaatattttaatctttatttttaaattgttttcttacttttttaaatactatcggtgaatctggttactgccagctgttgttatgtcagtcgaagacttagccagctatcaagtcatgatccgctgtggagaagacattgcaaaaaatactggctgatatctgagtgagtattcgaggaatatgtacttctgaaaactggcccttggcttcttccataacactagtttgtcctgattctcctctctaacccttgtctctttatctcctttggtggctcttctcgtgcctgctagtaaatgttggtatttgccaaggttctgtccttagcccactgctgctctcccttgctgaactctactgcatgcattgttgccgtttatagtgactatctgcatgctcctaactcccaaacctgaatctccctccctgacttccccactgaggtctagaattgtttgcacaactgtcngctggacctttctattggctgtcccacacttattaactggattcagtaaatgttaacaaatttgacagaatcaaagtacagatgacagaaagtgggagttgagaaaggtggaagaaatgagtaggaatgctgatatcttttcttagattaagtggagtcaggtagtgactaaagttggtgaagtaagaagcagaggtttaagcatattatttaaagctgcaagctttagacagaagtgaaaattaataacagagctatcaaaacattgggaggaaaaagaacagggtaaggggaattttaagtattgctagatcttcccgtgtttccctttggggtatcagtagatacatgtgaagttgataaatcaagaattagaggcataaacatttagaactatagaggtaacttctagaaatacctaagatttcctttgaggagttggacttaaaacaggagaatagtttttcatcgtaagttctttgatactttttagttttaataatctatgtgtatattatttagattaataaaaagatgctccccttccctcttctacccccgc

SEQ ID NO: 332423 - DNA, 2393 bp, Homo sapiens
aggggggggccagacctgcaccgggccaggcaagatggcggccatggagaccgagacggcgccgctgaccctagagtcgctgcccaccgatcccctgctcctcatcttatcctttttggactatcgggatctaatcaactgttgttatgtcagtcgaagacttagccagctatcaagtcatgatccgctgtggagaagacattgcaaaaaatactggctgatatctgaggaagagaaaacacagaagaatcagtgttggaaatctctcttcatagatacttactctgatgtaggaagatacattgaccattatgctgctattaaaaaggcctgggatgatctcaagaaatatttggagcccaggtgtcctcggatggttttatctctgaaagagggtgctcgagaggaagacctcgatgctgtggaagcgcagattggctgcaagcttcctgacgattatcgatgttcataccgaattcacaatggacagaagttagtggttcctgggttattgggaagcatggcactgtctaatcactatcgttctgaagatttgttagacgtcgatacagctgccggaggattccagcagagacagggactgaaatactgtctccctttaactttttgcatacatactggtttgagtcagtacatagcagtggaagctgcagagggccgaaacaaaaatgaagttttctaccaatgtccagaccaaatggctcgaaatccagctgctattgacatgtttattataggtgctacttttactgactggtttacctcttatgtcaaaaatgttgtatcaggtggcttccccatcatcagagaccaaattttcagatatgttcacgatccagaatgtgtagcaacaactggggatattactgtgtcagtttccacatcgtttctgccagaacttagctctgtacatccaccccactatttcttcacataccgaatcaggattgaaatgtcaaaagatgcacttcctgagaaggcctgtcagttggacagtcgctattggagaataacaaatgctaagggtgacgtggaagaagttcaaggacctggagtagttggtgaatttccaatcatcagcccaggtcgggtatatgaatacacaagctgtaccacattctctacaacatcaggatacatggaaggatattataccttccattttctttactttaaagacaagatctttaatgttgccattccccgattccatatggcatgtccaacattcagggtgtctatagcccgattggaaatgggtcctgatgaatatgaagagatggaagaagaggaggaggaggaagaggaggaagacgaggatgatgattcagcagatatggatgaatcagatgaagatgatgaagaggagagacggaggagagtctttgatgttcccattcgcagacgccgctgctcacgccttttttagcaagccttctgctgatggaagcactaggatgattctaggctgttaaatagatttctcaataatgtaaataactaaattgttctctgcatatagcaggaaaactagcatgaaatattgtttcaggccctgggttctatgtgacactacattaggaattggattgtttgggtttgctttgtgtttttgaggtagaggaagaaatgggaatcttttttttctcttccaggagtcagtggaagaatagttctctagctaaggaacggacatacctttgttttaaaatattttatacttacaaaaatctagaaatggagagggaactgttttgaataaggatttaaaatacctgcacaaggatagagagaaactatgtgactcattctgtgaaaagacttcttgcagttgtgagttatttagaaatgatcaaaatttgtaattaggctaatccatttagtgattcctaatattttgtactcacagagaactaattgactaaacaacttgaacgctagtggtttgtccttagacaatctgtctttgaatttaaagtctttatcgctaagaccttgactttaaatttttcatcactacaaccttgaatttaatttcaggtcttcaacatgatgaccttggatttaatttaaagtcttcaacactatgcgctttatcatattattcacagatgcatttttgaaatgtagtatgtaaaagtatgtaacgtgctgtttattaacaaaagattgttcacaacatctcatgtagtttaaatttgtaaatactgcttctgttttgtttctcctttatacacttgactgtctttgtgataagtgacatgaattttatgttaggattaagtatgttttcctgaaacttggattttttttgtaattatataattgagagttaagaatgaaatccttcaagtgttaaaaactcacatttt

SEQ ID NO: 332424 - DNA, 1656 bp, Homo sapiens
aggggggggccagacctgcaccgggccaggcaagatggcggccatggagaccgagacggcgccgctgaccctagagtcgctgcccaccgatcccctgctcctcatcttatcctttttggactatcgggatctaatcaactgttgttatgtcagtcgaagacttagccagctatcaagtcatgatccgctgtggagaagacattgcaaaaaatactggctgatatctgaggaagagaaaacacagaagaatcagtgttggaaatctctcttcatagatacttactctgatgtaggaagatacattgaccattatgctgctattaaaaaggcctgggatgatctcaagaaatatttggagcccaggtgtcctcggatggttttatctctgaaagagggtgctcgagaggaagacctcgatgctgtggaagcgcagattggctgcaagcttcctgacgattatcgatgttcataccgaattcacaatggacagaagttagtggttcctgggttattgggaagcatggcactgtctaatcactatcgttctgaagatttgttagacgtcgatacagctgccggaggattccagcagagacagggactgaaatactgtctccctttaactttttgcatacatactggtttgagtcagtacatagcagtggaagctgcagagggccgaaacaaaaatgaagttttctaccaatgtccagaccaaatggctcgaaatccagctgctattgacatgtttattataggtgctacttttactgactggtttacctcttatgtcaaaaatgttgtatcaggtggcttccccatcatcagagaccaaattttcagatatgttcacgatccagaatgtgtagcaacaactggggatattactgtgtcagtttccacatcgtttctgccagaacttagctctgtacatccaccccactatttcttcacataccgaatcaggattgaaatgtcaaaagatgcacttcctgagaaggcctgtcagttggacagtcgctattggagaataacaaatgctaagggtgacgtggaagaagttcaaggacctggagtagttggtgaatttccaatcatcagcccaggtcgggtatatgaatacacaagctgtaccacattctctacaacatcaggatacatggaaggatattataccttccattttctttactttaaagacaagatctttaatgttgccattccccgattccatatggcatgtccaacattcagggtgtctatagcccgattggtaagttaaattttcctctagtgctgatttacatgactttgtagggttaacactgcagataagccaggcaaatagttagtttataaatagtgttccagagaaccctagagattttgagaaagtatcttgggggtcatgtgaatttgttgagagaaatggacaagtaaatgaggctccatagtctctaaccagagaatttctgctgttttaaagattcaacttgtttttcactgttcagtggcctaaatgtagattatgagaaataccacattagaccagtagaatcagctttaagactgggaaaacaacttcttacagtgtttttgctcaaacttccaatttaatgtcaaataaacaaatattccataaagatcattataaag

SEQ ID NO: 332425 - DNA, 779 bp, Homo sapiens
gtctttgtcctatcaacaagtgagagatgattgttgaaatctccaaatataattatagttttttgtttctctttttagttctgtcaggtttgcttcatgtattttgaagctgtataattatatgcaaatatgctaaggattattatgtatttttaatgacataattctttcatcattatgaaatctccatctttatcgctgataatattccttgtcctaaagttcaaagagcattgaggtgtgttttggcaggcagttgagttactattgggtcgacttgatcctttggaatcttgtttgtttttaatgtttgttagggtgggtgtaaagttgtctttatttaaggacggtggttgtcaactttcagtctcatgaccccctgaaactctaaaaacttattgaggactccgaagaattcttgcttatgtggattgtattaatgcttaccatatcagaaattaaaactgagaaataagtaaaacaatatttacttattagttccttttcaaatgacaataataaacccatttcatgttcagctctctcttaactatgttctttcttattagttttcgtttccttctaaccacaaataaacatataaaatcttaaacagacaccatcccacacaacaatttggcggttcgccctgaaaagtctttaaaacatcgttggcgcgggccccgtgaggaacgtgcctcgtcccgagaccggctgactggtggttccccaaaacggggcgggttgaaacaaggttggccgcacaggcgggcgttaag

SEQ ID NO: 332426 - DNA, 926 bp, Homo sapiens
gaattccttttttgactggcccagtatctgtatgagtttggaataatcttttccctaaatgtttgatatgattcatcactgaagttatctggggctagagttctgtttgtgggaaaattttgaaatttgaatttaatttctttaatattcatattttctatttcttcttgtttcagttttggtaatttgtgcctttcaaggaatttgtccattccatctaaatgttgaatttattggtataaagttattgacagtattcccttgatatccttttaatggctacaaaagccatagtcacttgtcctcttttgttcttaatattgttaatttatatcttctcttttgttcattgctttagttaggggtttgtaatttttattgatcatttaaaggagcaacttttggttttactaattttctctatttgcttattttctatcgcattgatttctgcagttatctttatttctttccttctactttgagtttgcttttcttctagcttttttaaggtagaagtttatattagtaattttagaacttttctctctccaagcactgttttagctgcatttcacaagttttgatgtgttttcatgaacgcgtagttcaaaatagtgtcagatttcccttgtaatttaattttgatctatgacttttctagaaatgtgttaattttcaaacatttgggggagttttcagttatcttttggctatcgattttttaaatttattgtggttagagaatttgctctgtattttcaatcctaaatgttttatggcccaaaattatggtttatcttggtaaatgatccttgtatatttgaaaataatgtacattctgctattttggggaatattactctataaatgataggtcaaatcggttgacagtttttttcaagtcttctgtatacttgctgatt

SEQ ID NO: 332427 - DNA, 2407 bp, Homo sapiens
aggggggggccagacctgcaccgggccaggcaagatggcggccatggagaccgagacggcgccgctgaccctagagtcgctgcccaccgatcccctgctcctcatcttatcctttttggactatcgggatctaatcaactgttgttatgtcagtcgaagacttagccagctatcaagtcatgatccgctgtggagaagacattgcaaaaaatactggctgatatctgaggaagagaaaacacagaagaatcagtgttggaaatctctcttcatagatacttactctgatgtaggaagatacattgaccattatgctgctattaaaaaggcctggagggtgctcgagaggaagacctcgatgctgtggaagcgcagattggctgcaagcttcctgacgattatcgatgttcataccgaattcacaatggacagaagttagtggttcctgggttattgggaagcatggcactgtctaatcactatcgttctgaagatttgttagacgtcgatacagctgccggaggattccagcagagacagggactgaaatactgtctccctttaactttttgcatacatactggtttgagtcagtacatagcagtggaagctgcagagggccgaaacaaaaatgaagttttctaccaatgtccagaccaaatggctcgaaatccagctgctattgacatgtttattataggtgctacttttactgactggtttacctcttatgtcaaaaatgttgtatcaggtggcttccccatcatcagagaccaaattttcagatatgttcacgatccagaatgtgtagcaacaactggggatattactgtgtcagtttccacatcgtttctgccagaacttagctctgtacatccaccccactatttcttcacataccgaatcaggattgaaatgtcaaaagatgcacttcctgagaaggcctgtcagttggacagtcgctattggagaataacaaatgctaagggtgacgtggaagaagttcaaggacctggagtagttggtgaatttccaatcatcagcccaggtcgggtatatgaatacacaagctgtaccacattctctacaacatcaggatacatggaaggatattataccttccattttctttactttaaagacaagatctttaatgttgccattccccgattccatatggcatgtccaacattcagggtgtctatagcccgattggaaatgggtcctgatgaatatgaagagatggaagaagaggaggaggaggaagaggaggaagacgaggatgatgattcagcagatatggatgaatcagatgaagatgatgaagaggagagacggaggagagtctttgatgttcccattcgcagacgccgctgctcacgccttttttagcaagccttctgctgatggaagcactaggatgattctaggctgttaaatagatttctcaataatgtaaataactaaattgttctctgcatatagcaggaaaactagcatgaaatattgtttcaggccctgggttctatgtgacactacattaggaattggattgtttgggtttgctttgtgtttttgaggtagaggaagaaatgggaatcttttttttctcttccaggagtcagtggaagaatagttctctagctaaggaacggacatacctttgttttaaaatattttatacttacaaaaatctagaaatggagagggaactgttttgaataaggatttaaaatacctgcacaaggatagagagaaactatgtgactcattctgtgaaaagacttcttgcagttgtgagttatttagaaatgatcaaaatttgtaattaggctaatccatttagtgattcctaatattttgtactcacagagaactaattgactaaacaacttgaacgctagtggtttgtccttagacaatctgtctttgaatttaaagtctttatcgctaagaccttgactttaaatttttcatcactacaaccttgaatttaatttcaggtcttcaacatgatgaccttggatttaatttaaagtcttcaacactatgcgctttatcatattattcacagatgcatttttgaaatgtagtatgtaaaagtatgtaacgtgctgtttattaacaaaagattgttcacaacatctcatgtagtttaaatttgtaaatactgcttctgttttgtttctcctttatacacttgactgtctttgtgataagtgacatgaattttatgttaggattaagtatgttttcctgaaacttggattttttttgtaattatataattgagagttaagaatgaaatccttcaagtgttaaaaactcacattttaaaagcaaattttggttccaattctgtattttgtataattgcttattttccataaactaatattagtcagca

SEQ ID NO: 332428 - DNA, 4251 bp, Homo sapiens
  misc_feature (894)..(894): n is a, c, g, or t
  misc_feature (1136)..(1136): n is a, c, g, or t
  misc_feature (1324)..(1324): n is a, c, g, or t
  misc_feature (1387)..(1387): n is a, c, g, or t
aacgcagataaggcaactcttatggagcttacagtccagtgggcaagcgcataattgcaagaggtactaagtgctgtgaaggaaatagattgctctgttaaggaataggaagtgagaagtgatcaaatcggaaggagctgccatatatgaagcagggcatatgcagttctggcagagggaaaagtatgttcagagattgacgggactgctgaacggtactgttcaacagcatggcctggtggaagatacagaaggctggcgttgctggaggtagggagtgactcacagacagtgatgagatgagggtggtgagatcatgcaggaccttgggaaccaaggtgaggaagtaagagtttactttaaatgctttaggtagtaatcacaattttaaacagaagtgacatgatccctctgtaaatgtctgtggaaataaattgagttgaataccatttgaattttatctacagaaaagtatccagtgtattgcagcttttttcctgcaccatacagcccaattttgtcaagggtctagtctagtgataagctctgaagtttttggtattatttgctgaactggattgggttggattggattagtacactggaatcatgtagcatcagttgcctagtttgaattgagatgatctgataccctctccatttcagagtgatttattctgaaatggagtgaataaatgccacactgtgcgtcagaatgacctgtgcatcagaatggcctgtggcactttttaaacatacagatgcctgaggtacagatctcagtccaaaccgactggatcagaatctctagaacagtagttttcactctcgatgtgcattgaattcatctttcatgcatattccagattcttttatgtcatttagctcctaggncagtggagggacaggaatcaagaagagggtatggaaactgaatgcacaaaactggagggattcctatgtttacaaaagttaatttgggcatctcctgagcttggcagaaaaggatgaggatgatgtttctgtaaaatctgaaaatcaaacaaaggcaattttgtttactatagatggtttttaacacaccttagtcatggccttgacaaacctgatgtgatttaagattctgttgatagctnttgcccaagtgagatctttgaatacctactttcaattaatataacttgtaatttctctctggaaaggatagagtcctaatcttaggttcattctttttacaaattaattatgtagggtagaatttacaggattgcaacactgttgtgttagaaatctttatatagtaagaaagttatttgcttctaanattcgatgttttggggcagctgataacttgtgtagccatgactattgagtcagaactgttacnattcaggcaccctctataggtggactttccagtagttgctttaatgaaaacgtggtttttgtggcaatacttttttcctttaagtaaaaaattttaaaaaacaaaaataaaaagtctgtgtatttagtagcatacatcttacagatcttgggaaaaaaccccaagtccctttgtttatgactaaataactttcttcctatatgtagaaatgagtattgtcctgataataagcataggacaactccttgacttgagattaactccaatggcatatatggtctgtagatatttttgtgaaaaattacagttgtagatgtttcagggtttatttgtgaactcagtttcactactaacaaggcaattatactacttaacatgttaaacaggttttagaaaatagttttgtaattataagggtaataagtgaaaagtaagagaaacaaaaggcataaaacaaaacaatgaatattttaatctttatttttaaattgttttcttacttttttaaatactatcggtgaatctggttactgccagctgttgttatgtcagtcgaagacttagccagctatcaagtcatgatccgctgtggagaagacattgcaaaaaatactggctgatatctgaggaagagaaaacacagaagaatcagtgttggaaatctctcttcatagatacttactctgatgtaggaagatacattgaccattatgctgctattaaaaaggcctgggatgatctcaagaaatatttggagcccaggtgtcctcggatggttttatctctgaaagagggtgctcgagaggaagacctcgatgctgtggaagcgcagattggctgcaagcttcctgacgattatcgatgttcataccgaattcacaatggacagaagttagtggttcctgggttattgggaagcatggcactgtctaatcactatcgttctgaagatttgttagacgtcgatacagctgccggaggattccagcagagacagggactgaaatactgtctccctttaactttttgcatacatactggtttgagtcagtacatagcagtggaagctgcagagggccgaaacaaaaatgaagttttctaccaatgtccagaccaaatggctcgaaatccagctgctattgacatgtttattataggtgctacttttactgactggtttacctcttatgtcaaaaatgttgtatcaggtggcttccccatcatcagagaccaaattttcagatatgttcacgatccagaatgtgtagcaacaactggggatattactgtgtcagtttccacatcgtttctgccagaacttagctctgtacatccaccccactatttcttcacataccgaatcaggattgaaatgtcaaaagatgcacttcctgagaaggcctgtcagttggacagtcgctattggagaataacaaatgctaagggtgacgtggaagaagttcaaggacctggagtagttggtgaatttccaatcatcagcccaggtcgggtatatgaatacacaagctgtaccacattctctacaacatcaggatacatggaaggatattataccttccattttctttactttaaagacaagatctttaatgttgccattccccgattccatatggcatgtccaacattcagggtgtctatagcccgattggaaatgggtcctgatgaatatgaagagatggaagaagaggaggaggaggaagaggaggaagacgaggatgatgattcagcagatatggatgaatcagatgaagatgatgaagaggagagacggaggagagtctttgatgttcccattcgcagacgccgctgctcacgccttttttagcaagccttctgctgatggaagcactaggatgattctaggctgttaaatagatttctcaataatgtaaataactaaattgttctctgcatatagcaggaaaactagcatgaaatattgtttcaggccctgggttctatgtgacactacattaggaattggattgtttgggtttgctttgtgtttttgaggtagaggaagaaatgggaatcttttttttctcttccaggagtcagtggaagaatagttctctagctaaggaacggacatacctttgttttaaaatattttatacttacaaaaatctagaaatggagagggaactgttttgaataaggatttaaaatacctgcacaaggatagagagaaactatgtgactcattctgtgaaaagacttcttgcagttgtgagttatttagaaatgatcaaaatttgtaattaggctaatccatttagtgattcctaatattttgtactcacagagaactaattgactaaacaacttgaacgctagtggtttgtccttagacaatctgtctttgaatttaaagtctttatcgctaagaccttgactttaaatttttcatcactacaaccttgaatttaatttcaggtcttcaacatgatgaccttggatttaatttaaagtcttcaacactatgcgctttatcatattattcacagatgcatttttgaaatgtagtatgtaaaagtatgtaacgtgctgtttattaacaaaagattgttcacaacatctcatgtagtttaaatttgtaaatactgcttctgttttgtttctcctttatacacttgactgtctttgtgataagtgacatgaattttatgttaggattaagtatgttttcctgaaacttggattttttttgtaattatataattgagagttaagaatgaaatccttcaagtgttaaaaactcacattttaaaagcaaattttggttccaattctgtattttgtataattgcttattttccataaactaatattagtcagca

SEQ ID NO: 332429 - DNA, 1694 bp, Homo sapiens
ctcaacgctttatacttcctcacgcctttatattccaggtggcttccccatcatcagagaccaaattttcagatatgttcacgatccagaatgtgtagcaacaactggggatattactgtgtcagtttccacatcgtttctgccagaacttagctctgtacatccaccccactatttcttcacataccgaatcaggattgaaatgtcaaaagatgcacttcctgagaaggcctgtcagttggacagtcgctattggagaataacaaatgctaagggtgacgtggaagaagttcaaggacctggagtagttggtgaatttccaatcatcagcccaggtcgggtatatgaatacacaagctgtaccacattctctacaacatcaggatacatggaaggatattataccttccattttctttactttaaagacaagatctttaatgttgccattccccgattccatatggcatgtccaacattcagggtgtctatagcccgattggaaatgggtcctgatgaatatgaagagatggaagaagaggaggaggaggaagaggaggaagacgaggatgatgattcagcagatatggatgaatcagatgaagatgatgaagaggagagacggaggagagtctttgatgttcccattcgcagacgccgctgctcacgccttttttagcaagccttctgctgatggaagcactaggatgattctaggctgttaaatagatttctcaataatgtaaataactaaattgttctctgcatatagcaggaaaactagcatgaaatattgtttcaggccctgggttctatgtgacactacattaggaattggattgtttgggtttgctttgtgtttttgaggtagaggaagaaatgggaatcttttttttctcttccaggagtcagtggaagaatagttctctagctaaggaacggacatacctttgttttaaaatattttatacttacaaaaatctagaaatggagagggaactgttttgaataaggatttaaaatacctgcacaaggatagagagaaactatgtgactcattctgtgaaaagacttcttgcagttgtgagttatttagaaatgatcaaaatttgtaattaggctaatccatttagtgattcctaatattttgtactcacagagaactaattgactaaacaacttgaacgctagtggtttgtccttagacaatctgtctttgaatttaaagtctttatcgctaagaccttgactttaaatttttcatcactacaaccttgaatttaatttcaggtcttcaacatgatgaccttggatttaatttaaagtcttcaacactatgcgctttatcatattattcacagatgcatttttgaaatgtagtatgtaaaagtatgtaacgtgctgtttattaacaaaagattgttcacaacatctcatgtagtttaaatttgtaaatactgcttctgttttgtttctcctttatacacttgactgtctttgtgataagtgacatgaattttatgttaggattaagtatgttttcctgaaacttggattttttttgtaattatataattgagagttaagaatgaaatccttcaagtgttaaaaactcacattttaaaagcaaattttggttccaattctgtattttgtataattgcttattttccataaactaatattagtcagca

SEQ ID NO: 332430 - DNA, 3476 bp, Homo sapiens
aggggggggccagacctgcaccgggccaggcaagatggcggccatggagaccgagacggcgccgctgaccctagagtcgctgcccaccgatcccctgctcctcatcttatcctttttggactatcgggatctaatcaactgttgttatgtcagtcgaagacttagccagctatcaagtcatgatccgctgtggagaagacattgcaaaaaatactggctgatatctgaggaagagaaaacacagaagaatcagtgttggaaatctctcttcatagatacttactctgatgtaggaagatacattgaccattatgctgctattaaaaaggcctgggatgatctcaagaaatatttggagcccaggtgtcctcggatggttttatctctgaaagagggtgctcgagaggaagacctcgatgctgtggaagcgcagattggctgcaagcttcctgacgattatcgatgttcataccgaattcacaatggacagaagttagtggttcctgggttattgggaagcatggcactgtctaatcactatcgttctgaagatttgttagacgtcgatacagctgccggaggattccagcagagacagggactgaaatactgtctccctttaactttttgcatacatactggtttgagtcagtacatagcagtggaagctgcagagggccgaaacaaaaatgaagttttctaccaatgtccagaccaaatggctcgaaatccagctgctattgacatgtttattataggtgctacttttactgactggtttacctcttatgtcaaaaatgttgtatcaggtggcttccccatcatcagagaccaaattttcagatatgttcacgatccagaatgtgtagcaacaactggggatattactgtgtcagtttccacatcgtttctgccagaacttagctctgtacatccaccccactatttcttcacataccgaatcaggattgaaatgtcaaaagatgcacttcctgagaaggcctgtcagttggacagtcgctattggagaataacaaatgctaagggtgacgtggaagaagttcaaggacctggagtagttggtgaatttccaatcatcagcccaggtcgggtatatgaatacacaagctgtaccacattctctacaacatcaggatacatggaaggatattataccttccattttctttactttaaagacaagatctttaatgttgccattccccgattccatatggcatgtccaacattcagggtgtctatagcccgattgttttggtaatttgtgcctttcaaggaatttgtccattccatctaaatgttgaatttattggtataaagttattgacagtattcccttgatatccttttaatggctacaaaagccatagtcacttgtcctcttttgttcttaatattgttaatttatatcttctcttttgttcattgctttagttaggggtttgtaatttttattgatcatttaaaggagcaacttttggttttactaattttctctatttgcttattttctatcgcattgatttctgcagttatctttatttctttccttctactttgagtttgcttttcttctagcttttttaaggtagaagtttatattagtaattttagaacttttctctctccaagcactgttttagctgcatttcacaagttttgatgtgttttcatgaacgcgtagttcaaaatagtgtcagatttcccttgtaatttaattttgatctatgacttttctagaaatgtgttaattttcaaacatttgggggagttttcattactattgggtcgacttgatcctttggaatcttgtttgtttttaatgtttgttagggtgggtgtaaagttgtctttatttaaggacggtggttgtcaactttcagtctcatgaccccctgaaactctaaaaacttattgaggactccgaagaattcttgcttatgtggattgtattaatgcttaccatatcagaaattaaaactgagaaataagtaaaacaatatttacttattagttccttttcaaatgacaataataaacccatttcatgttcagctctctcttaactatgttctttcttattagttttcgtttccttctaaccacaaataaacatataaaatcttgacctgccttgtggaaaatgttttctctcaaggatgagaaataaaatgagaattctggacttacttcttatcaacattaaaaaagccatgggggttgtatttgttgacctttcctgtttgtatattagttttctgatatggagaattgttctgctttttcgtcctctaccagtctgattaattcgtaggcttaacacttcctttttctttctccttggaatgcctcttgggatatgcattagttggtcttatgtcttttcttggtctaggtggtgtgtgtgtttggcttgtttggggcacttttagaggctccagctgcacatttccactcctctctgtgtgttcctctctgcatctgctgtttgtgtgtgtacactttttttctgagcaatctttctccttagccacattgagttctttaacagtttttctgttttcttcttcattaagataattaataatcatactactcacatatcatgttttagaacttcctaagcctttccctttcccaccttttggacctcctaactgaatttcaaagtcttcattccttagattaaaaaaataaatccaaagataaaagaatgtaatgtcttataagtcgtatcagtgtatattttctctgttattgttgttagtgttataataaatcctaagtgacacaattcctttctcctacattaattcatttgcttgtacaacaactatttattgagcactgtgattaacaatataatcaaattccctgccttggaatttacattccaattcaaagagacaaactgtaacaataaacactatgtccttatattaagtagtaataagtgctgtggagaaacagcagagtaaaggggataaagaacgtattgttaggttgttctaatataaagatgtgtcaggagaggccttggtgacatttaagctgaaacgtgaaaggagcagagggaattaggtggatatgtgggagacgagaggtcgaagcaaaggagcagcacgtgtggaggttccgaaacagtaatgtgcttggtgtgcttgacccaaggaggccagtgtagctggagtgcagtgaacaacagggagaggggctggagattagatcagagtgttaatggggtggtggatcacgtaacaccataaaagccttggtggaaggactctggctgacatcacgccccaagttgccccatactttccagaataccaagtaggtccttgctgttcagaattctgttcaatgtagcagcccctcccattgcgtcttcaaatgtgtgagagagaacattgacagcagagtaagtcatggcttgattacagacattgcatggg

SEQ ID NO: 332431 - DNA, 1219 bp, Homo sapiens
tatcaaaagattgttttctctttcaaggaaatgggtcctgatgaatatgaagagatggaagaagaggaggaggaggaagaggaggaagacgaggatgatgattcagcagatatggatgaatcagatgaagatgatgaagaggagagacggaggagagtctttgatgttcccattcgcagacgccgctgctcacgccttttttagcaagccttctgctgatggaagcactaggatgattctaggctgttaaatagatttctcaataatgtaaataactaaattgttctctgcatatagcaggaaaactagcatgaaatattgtttcaggccctgggttctatgtgacactacattaggaattggattgtttgggtttgctttgtgtttttgaggtagaggaagaaatgggaatcttttttttctcttccaggagtcagtggaagaatagttctctagctaaggaacggacatacctttgttttaaaatattttatacttacaaaaatctagaaatggagagggaactgttttgaataaggatttaaaatacctgcacaaggatagagagaaactatgtgactcattctgtgaaaagacttcttgcagttgtgagttatttagaaatgatcaaaatttgtaattaggctaatccatttagtgattcctaatattttgtactcacagagaactaattgactaaacaacttgaacgctagtggtttgtccttagacaatctgtctttgaatttaaagtctttatcgctaagaccttgactttaaatttttcatcactacaaccttgaatttaatttcaggtcttcaacatgatgaccttggatttaatttaaagtcttcaacactatgcgctttatcatattattcacagatgcatttttgaaatgtagtatgtaaaagtatgtaacgtgctgtttattaacaaaagattgttcacaacatctcatgtagtttaaatttgtaaatactgcttctgttttgtttctcctttatacacttgactgtctttgtgataagtgacatgaattttatgttaggattaagtatgttttcctgaaacttggattttttttgtaattatataattgagagttaagaatgaaatccttcaagtgttaaaaactcacattttaaaagcaaattttggttccaattctgtattttgtataattgcttattttccataaactaatattagtcagca

SEQ ID NO: 332432 - DNA, 2023 bp, Homo sapiens
aggggggggccagacctgcaccgggccaggcaagatggcggccatggagaccgagacggcgccgctgaccctagagtcgctgcccaccgatcccctgctcctcatcttatcctttttggactatcgggatctaatcaactgttgttatgtcagtcgaagacttagccagctatcaagtcatgatccgctgtggagaagacattgcaaaaaatactggctgatatctgaggaagagaaaacacagaagaatcagtgttggaaatctctcttcatagatacttactctgatgtaggaagatacattgaccattatgctgctattaaaaaggcctgggatgatctcaagaaatatttggagcccaggtgtcctcggatggttttatctctgaaagagggtgctcgagaggaagacctcgatgctgtggaagcgcagattggctgcaagcttcctgacgattatcgatgttcataccgaattcacaatggacagaagttagtggttcctgggttattgggaagcatggcactgtctaatcactatcgttctgaagatttgttagacgtcgatacagctgccggaggattccagcagagacagggactgaaatactgtctccctttaactttttgcatacatactggtttgagtcagtacatagcagtggaagctgcagagggccgaaacaaaaatgaagttttctaccaatgtccagaccaaatggctcgaaatccagctgctattgacatgtttattataggtgctacttttactgactggtttacctcttatgtcaaaaatgttgtatcaggtggcttccccatcatcagagaccaaattttcagatatgttcacgatccagaatgtgtagcaacaactggggatattactgtgtcagtttccacatcgtttctgccagaacttagctctgtacatccaccccactatttcttcacataccgaatcaggattgaaatgtcaaaagatgcacttcctgagaaggcctgtcagttggacagtcgctattggagaataacaaatgctaagggtgacgtggaagaagttcaaggacctggagtagttggtgaatttccaatcatcagcccaggtcgggtatatgaatacacaagctgtaccacattctctacaacatcaggatacatggaaggatattataccttccattttctttactttaaagacaagatctttaatgttgccattccccgattccatatggcatgtccaacattcagggtgtctatagcccgattgttttggtaatttgtgcctttcaaggaatttgtccattccatctaaatgttgaatttattggtataaagttattgacagtattcccttgatatccttttaatggctacaaaagccatagtcacttgtcctcttttgttcttaatattgttaatttatatcttctcttttgttcattgctttagttaggggtttgtaatttttattgatcatttaaaggagcaacttttggttttactaattttctctatttgcttattttctatcgcattgatttctgcagttatctttatttctttccttctactttgagtttgcttttcttctagcttttttaaggtagaagtttatattagtaattttagaacttttctctctccaagcactgttttagctgcatttcacaagttttgatgtgttttcatgaacgcgtagttcaaaatagtgtcagatttcccttgtaatttaattttgatctatgacttttctagaaatgtgttaattttcaaacatttgggggagttttcagttatcttttggctatcgattttttaaatttattgtggttagagaatttgctctgtattttcaatcctaaatgttttatggcccaaaattatggtttatcttggtaaatgatccttgtatatttgaaaataatgtacattctgctattttggggaatattactctataaatgataggtcaaatcggttgacagtttttttcaagtcttctgtatacttgctgatt

SEQ ID NO: 332433 - DNA, 1939 bp, Homo sapiens
gtctttgtcctatcaacaagtgagagatgattgttgaaatctccaaatataattatagttttttgtttctctttttagttctgtcaggtttgcttcatgtattttgaagctgtataattatatgcaaatatgctaaggattattatgtatttttaatgacataattctttcatcattatgaaatctccatctttatcgctgataatattccttgtcctaaagttcaaagagcattgaggtgtgttttggcaggcagttgagttactattgggtcgacttgatcctttggaatcttgtttgtttttaatgtttgttagggtgggtgtaaagttgtctttatttaaggacggtggttgtcaactttcagtctcatgaccccctgaaactctaaaaacttattgaggactccgaagaattcttgcttatgtggattgtattaatgcttaccatatcagaaattaaaactgagaaataagtaaaacaatatttacttattagttccttttcaaatgacaataataaacccatttcatgttcagctctctcttaactatgttctttcttattagttttcgtttccttctaaccacaaataaacatataaaatcttgacctgccttgtggaaaatgttttctctcaaggatgagaaataaaatgagaattctggacttacttcttatcaacattaaaaaagccatgggggttgtatttgttgacctttcctgtttgtatattagttttctgatatggagaattgttctgctttttcgtcctctaccagtctgattaattcgtaggcttaacacttcctttttctttctccttggaatgcctcttgggatatgcattagttggtcttatgtcttttcttggtctaggtggtgtgtgtgtttggcttgtttggggcacttttagaggctccagctgcacatttccactcctctctgtgtgttcctctctgcatctgctgtttgtgtgtgtacactttttttctgagcaatctttctccttagccacattgagttctttaacagtttttctgttttcttcttcattaagataattaataatcatactactcacatatcatgttttagaacttcctaagcctttccctttcccaccttttggacctcctaactgaatttcaaagtcttcattccttagattaaaaaaataaatccaaagataaaagaatgtaatgtcttataagtcgtatcagtgtatattttctctgttattgttgttagtgttataataaatcctaagtgacacaattcctttctcctacattaattcatttgcttgtacaacaactatttattgagcactgtgattaacaatataatcaaattccctgccttggaatttacattccaattcaaagagacaaactgtaacaataaacactatgtccttatattaagtagtaataagtgctgtggagaaacagcagagtaaaggggataaagaacgtattgttaggttgttctaatataaagatgtgtcaggagaggccttggtgacatttaagctgaaacgtgaaaggagcagagggaattaggtggatatgtgggagacgagaggtcgaagcaaaggagcagcacgtgtggaggttccgaaacagtaatgtgcttggtgtgcttgacccaaggaggccagtgtagctggagtgcagtgaacaacagggagaggggctggagattagatcagagtgttaatggggtggtggatcacgtaacaccataaaagccttggtggaaggactctggctgacatcacgccccaagttgccccatactttccagaataccaagtaggtccttgctgttcagaattctgttcaatgtagcagcccctcccattgcgtcttcaaatgtgtgagagagaacattgacagcagagtaagtcatggcttgattacagacattgcatggg

SEQ ID NO: 332434 - DNA, 648 bp, Homo sapiens
gacatttaattaattttcaatttaaatcagaatcttttttccaatcaaaagagtttgaattaaatatttagaaattatagtgctttgggtattcctgatttagaattgtcatgttaattagtacttataaagttgtgagtgggaaattattattcatcagaaagatgaagcacagctctttggcactgccgtgtattacatgtttgagtctgtatgctcctcaggttattgggaagcatggcactgtctaatcactatcgttctgaagatttgttagacgtcgatacagctgccggaggattccagcagagacagggactgaaatactgtctccctttaactttttgcatacatactggtttgagtcagtacatagcagtggaagctgcagagggccgaaacaaaaatgaagttttctaccaatgtccagtaagtagaacgtgtgtttaaatatggcattaagatgtgttctgatggttgtataaatgcatgcattaggtattttcaggattgtagaatgggtatagaatattatgcattttagttatagacctctctaactagagttaatattctgacataatggcatggaacccaagagaaaacttgacagttggacataaaaaactggtgtatatacagaggaaa

SEQ ID NO: 332435 - DNA, 2465 bp, Homo sapiens
aggggggggccagacctgcaccgggccaggcaagatggcggccatggagaccgagacggcgccgctgaccctagagtcgctgcccaccgatcccctgctcctcatcttatcctttttggactatcgggatctaatcaactgttgttatgtcagtcgaagacttagccagctatcaagtcatgatccgctgtggagaagacattgcaaaaaatactggctgatatctgaggaagagaaaacacagaagaatcagtgttggaaatctctcttcatagatacttactctgatgtaggaagatacattgaccattatgctgctattaaaaaggcctgggatgatctcaagaaatatttggagcccaggtgtcctcggatggttttatctctgaaagagggtgctcgagaggaagacctcgatgctgtggaagcgcagattggctgcaagcttcctgacgattatcgatgttcataccgaattcacaatggacagaagttagtggttcctgggttattgggaagcatggcactgtctaatcactatcgttctgaagatttgttagacgtcgatacagctgccggaggattccagcagagacagggactgaaatactgtctccctttaactttttgcatacatactggtttgagtcagtacatagcagtggaagctgcagagggccgaaacaaaaatgaagttttctaccaatgtccagaccaaatggctcgaaatccagctgctattgacatgtttattataggtgctacttttactgactggtttacctcttatgtcaaaaatgttgtatcaggtggcttccccatcatcagagaccaaattttcagatatgttcacgatccagaatgtgtagcaacaactggggatattactgtgtcagtttccacatcgtttctgccagaacttagctctgtacatccaccccactatttcttcacataccgaatcaggattgaaatgtcaaaagatgcacttcctgagaaggcctgtcagttggacagtcgctattggagaataacaaatgctaagggtgacgtggaagaagttcaaggacctggagtagttggtgaatttccaatcatcagcccaggtcgggtatatgaatacacaagctgtaccacattctctacaacatcaggatacatggaaggatattataccttccattttctttactttaaagacaagatctttaatgttgccattccccgattccatatggcatgtccaacattcagggtgtctatagcccgattggaaatgggtcctgatgaatatgaagagatggaagaagaggaggaggaggaagaggaggaagacgaggatgatgattcagcagatatggatgaatcagatgaagatgatgaagaggagagacggaggagagtctttgatgttcccattcgcagacgccgctgctcacgccttttttagcaagccttctgctgatggaagcactaggatgattctaggctgttaaatagatttctcaataatgtaaataactaaattgttctctgcatatagcaggaaaactagcatgaaatattgtttcaggccctgggttctatgtgacactacattaggaattggattgtttgggtttgctttgtgtttttgaggtagaggaagaaatgggaatcttttttttctcttccaggagtcagtggaagaatagttctctagctaaggaacggacatacctttgttttaaaatattttatacttacaaaaatctagaaatggagagggaactgttttgaataaggatttaaaatacctgcacaaggatagagagaaactatgtgactcattctgtgaaaagacttcttgcagttgtgagttatttagaaatgatcaaaatttgtaattaggctaatccatttagtgattcctaatattttgtactcacagagaactaattgactaaacaacttgaacgctagtggtttgtccttagacaatctgtctttgaatttaaagtctttatcgctaagaccttgactttaaatttttcatcactacaaccttgaatttaatttcaggtcttcaacatgatgaccttggatttaatttaaagtcttcaacactatgcgctttatcatattattcacagatgcatttttgaaatgtagtatgtaaaagtatgtaacgtgctgtttattaacaaaagattgttcacaacatctcatgtagtttaaatttgtaaatactgcttctgttttgtttctcctttatacacttgactgtctttgtgataagtgacatgaattttatgttaggattaagtatgttttcctgaaacttggattttttttgtaattatataattgagagttaagaatgaaatccttcaagtgttaaaaactcacattttaaaagcaaattttggttccaattctgtattttgtataattgcttattttccataaactaatattagtcagca

SEQ ID NO: 332436 - DNA, 447 bp, Homo sapiens
aggggggggccagacctgcaccgggccaggcaagatggcggccatggagaccgagacggcgccgctgaccctagagtcgctgcccaccgatcccctgctcctcatcttatcctttttggactatcgggatctaatcaactgttgttatgtcagtcgaagacttagccagctatcaagtcatgatccgctgtggagaagacattgcaaaaaatactggctgatatctgaggaagagaaaacacagaagaatcagtgttggaaatctctcttcatagatacttactctgatgtaggaagatacattgaccattatgctgctattaaaaaggcctgggatgatctcaagaaatatttggagcccaggtgtcctcggatggttttatctctgaaaggagcgtgctcgagagcgagccctcgatgcttgcgcatgcccccttcgtctgcccg

SEQ ID NO: 332437 - DNA, 1740 bp, Homo sapiens
tccttactcttagtttggtgctcgtctgacatggtgctacttttactgactggtttacctcttatgtcaaaaatgttgtatcaggtggcttccccatcatcagagaccaaattttcagatatgttcacgatccagaatgtgtagcaacaactggggatattactgtgtcagtttccacatcgtttctgccagaacttagctctgtacatccaccccactatttcttcacataccgaatcaggattgaaatgtcaaaagatgcacttcctgagaaggcctgtcagttggacagtcgctattggagaataacaaatgctaagggtgacgtggaagaagttcaaggacctggagtagttggtgaatttccaatcatcagcccaggtcgggtatatgaatacacaagctgtaccacattctctacaacatcaggatacatggaaggatattataccttccattttctttactttaaagacaagatctttaatgttgccattccccgattccatatggcatgtccaacattcagggtgtctatagcccgattggaaatgggtcctgatgaatatgaagagatggaagaagaggaggaggaggaagaggaggaagacgaggatgatgattcagcagatatggatgaatcagatgaagatgatgaagaggagagacggaggagagtctttgatgttcccattcgcagacgccgctgctcacgccttttttagcaagccttctgctgatggaagcactaggatgattctaggctgttaaatagatttctcaataatgtaaataactaaattgttctctgcatatagcaggaaaactagcatgaaatattgtttcaggccctgggttctatgtgacactacattaggaattggattgtttgggtttgctttgtgtttttgaggtagaggaagaaatgggaatcttttttttctcttccaggagtcagtggaagaatagttctctagctaaggaacggacatacctttgttttaaaatattttatacttacaaaaatctagaaatggagagggaactgttttgaataaggatttaaaatacctgcacaaggatagagagaaactatgtgactcattctgtgaaaagacttcttgcagttgtgagttatttagaaatgatcaaaatttgtaattaggctaatccatttagtgattcctaatattttgtactcacagagaactaattgactaaacaacttgaacgctagtggtttgtccttagacaatctgtctttgaatttaaagtctttatcgctaagaccttgactttaaatttttcatcactacaaccttgaatttaatttcaggtcttcaacatgatgaccttggatttaatttaaagtcttcaacactatgcgctttatcatattattcacagatgcatttttgaaatgtagtatgtaaaagtatgtaacgtgctgtttattaacaaaagattgttcacaacatctcatgtagtttaaatttgtaaatactgcttctgttttgtttctcctttatacacttgactgtctttgtgataagtgacatgaattttatgttaggattaagtatgttttcctgaaacttggattttttttgtaattatataattgagagttaagaatgaaatccttcaagtgttaaaaactcacattttaaaagcaaattttggttccaattctgtattttgtataattgcttattttccataaactaatattagtcagca

SEQ ID NO: 332438 - DNA, 2411 bp, Homo sapiens
aggggggggccagacctgcaccgggccaggcaagatggcggccatggagaccgagacggcgccgctgaccctagagtcgctgcccaccgatcccctgctcctcatcttatcctttttggactatcgggatctaatcaactgttgttatgtcagtcgaagacttagccagctatcaagtcatgatccgctgtggagaagacattgcaaaaaatactggctgatatctgaggaagagaaaacacagaagaatcagtgttggaaatctctcttcatagatacttactctgatgtaggaagatacattgaccattatgctgctattaaaaaggcctgggatgatctcaagaaatatttggagcccaggtgtcctcggatggttttatctctgaaagagggtgctcgagaggaagacctcgatgctgtggaagcgcagattggctgcaagcttcctgacgattatcgatgttcataccgaattcacaatggacagaagttagtggttcctgggttattgggaagcatggcactgtctaatcactatcgttctgaagatttgttagacgtcgatacagctgccggaggattccagcagagacagggactgaaatactgtctccctttaactttttgcatacatactggtttgagtcagtacatagcagtggaagctgcagagggccgaaacaaaaatgaagttttctaccaatgtccagaccaaatggctcgaaatccagctgctattgacatgtttattataggtgctacttttactgactggtttacctcttatgtcaaaaatgttgtatcaggtggcttccccatcatcagagaccaaattttcagatatgttcacgatccagaatgtgtagcaacaactggggatattactgtgtcagtttccacatcgtttctgccagaacttagctctgtacatccaccccactatttcttcacataccgaatcaggattgaaatgtcaaaagatgcacttcctgagaaggcctgtcagttggacagtcgctattggagaataacaaatgctaagggtgacgtggaagaagttcaaggacctggagtagttggtgaatttccaatcatcagcccaggtcgggtatatgaatacacaagctgtaccacattctctacaacatcaggatacatggaaggatattataccttccattttctttactttaaagacaagatctttaatgttgccattccccgattccatatggcatgtccaacattcagggtgtctatagcccgattggaaatgggtcctgatgaatatgaagagatggaagaagaggaggaggaggaagaggaggaagacgaggatgatgattcagcagatatggatgaatcagatgaagatgatgaagaggagagacggaggagagtctttgatgttcccattcgcagacgccgctgctcacgccttttttagcaagccttctgctgatggaagcactaggatgattctaggctgttaaatagatttctcaataatgtaaataactaaattgttctctgcatatagcaggaaaactagcatgaaatattgtttcaggccctgggttctatgtgacactacattaggaattggattgtttgggtttgctttgtgtttttgaggtagaggaagaaatgggaatcttttttttctcttccaggagtcagtggaagaatagttctctagctaaggaacggacatacctttgttttaaaatattttatacttacaaaaatctagaaatggagagggaactgttttgaataaggatttaaaatacctgcacaaggatagagagaaactatgtgactcattctgtgaaaagacttcttgcagttgtgagttatttagaaatgatcaagaactaattgactaaacaacttgaacgctagtggtttgtccttagacaatctgtctttgaatttaaagtctttatcgctaagaccttgactttaaatttttcatcactacaaccttgaatttaatttcaggtcttcaacatgatgaccttggatttaatttaaagtcttcaacactatgcgctttatcatattattcacagatgcatttttgaaatgtagtatgtaaaagtatgtaacgtgctgtttattaacaaaagattgttcacaacatctcatgtagtttaaatttgtaaatactgcttctgttttgtttctcctttatacacttgactgtctttgtgataagtgacatgaattttatgttaggattaagtatgttttcctgaaacttggattttttttgtaattatataattgagagttaagaatgaaatccttcaagtgttaaaaactcacattttaaaagcaaattttggttccaattctgtattttgtataattgcttattttccataaactaatattagtcagca

SEQ ID NO: 332439 - DNA, 2116 bp, Homo sapiens
aggggggggccagacctgcaccgggccaggcaagatggcggccatggagaccgagacggcgccgctgaccctagagtcgctgcccaccgatcccctgctcctcatcttatcctttttggactatcgggatctaatcaactgttgttatgtcagtcgaagacttagccagctatcaagtcatgatccgctgtggagaagacattgcaaaaaatactggctgatatctgaggaagagaaaacacagaagaatcagtgttggaaatctctcttcatagatacttactctgatgtaggaagatacattgaccattatgctgctattaaaaaggcctgggatgatctcaagaaatatttggagcccaggtgtcctcggatggttttatctctgaaagagggtgctcgagaggaagacctcgatgctgtggaagcgcagattggctgcaagcttcctgacgattatcgatgttcataccgaattcacaatggacagaagttagtggttcctgggttattgggaagcatggcactgtctaatcactatcgttctgaagatttgttagacgtcgatacagctgccggaggattccagcagagacagggactgaaatactgtctccctttaactttttgcatacatactggtttgagtcagtacatagcagtggaagctgcagagggccgaaacaaaaatgaagttttctaccaatgtccagaccaaatggctcgaaatccagctgctattgacatgtttattataggtgctacttttactgactggtttacctcttatgtcaaaaatgttgtatcaggtggcttccccatcatcagagaccaaattttcagatatgttcacgatccagaatgtgtagcaacaactggggatattactgtgtcagtttccacatcgtttctgccagaacttagctctgtacatccaccccactatttcttcacataccgaatcaggattgaaatgtcaaaagatgcacttcctgagaaggcctgtcagttggacagtcgctattggagaataacaaatgctaagggtgacgtggaagaagttcaaggacctggagtagttggtgaatttccaatcatcagcccaggtcgggtatatgaatacacaagctgtaccacattctctacaacatcaggatacatggaaggatattataccttccattttctttactttaaagacaagatctttaatgttgccattccccgattccatatggcatgtccaacattcagggtgtctatagcccgattggtaagttaaattttcctctagtgctgatttacatgactttgtagggttaacactgcagataagccaggcaaatagttagtttataaatagtgttccagagaaccctagagattttgagaaagtatcttgggggtcatgtgaatttgttgagagaaatggacaagtaaatgaggctccatagtctctaaccagagaatttctgctgttttaaagattcaacttgtttttcactgttcagtggcctaaatgtagattatgagaaataccacattagaccagtagaatcagctttaagactgggaaaacaacttcttacagtgtttttgctcaaacttccaatttaatgtcaaataaacaaatattccataaagatcattataaagaaaatttaatgtgtggatgtgtacttttggcagtctctctgggatcatttcttaatcaactaggtatattttttaaaatctcgtttttagggttaccttatgacaagtgtaacagtaactccaaccttagagactataacatgattaaagaaagttatgaagctccagttatacaatggggataaaatatgaattatatacccagaatgcaattgagttgtaggtgttgaatctttggaaaatgccctctagcttctggaatgaccctgatggatgggtttaagtttggaaagatggacatgatattaatctgatccagagctgacacattttcaactccagtttgaaaagagaaggatgataatgagactttgggccattacctgtgtggcatatctagtgaaaagaatctacagtgtgcgtttggaagtgaagatttagatttcttcccagtggagga

SEQ ID NO: 332440 - DNA, 435 bp, Homo sapiens
  misc_feature (376)..(376): n is a, c, g, or t
  misc_feature (414)..(414): n is a, c, g, or t
tatgacaggtatataacaggtatatataagtgttagcctacttatcaaattagaagggataaataaaaacagattgtcaattctcaggcccattctaagaattcttatgtccattctataagtaagttagcagcgccaaaagtaacaatgaggtggggtgcagtggctcacaactagcactttgggaggccaaggtgggaggacagcctgaggccaagagtttgagaccagcctggacaacatagcaagatcccgtctctatgaaatttttaaaaatagccaggcatggtggtgcacacctgcatttccagctacacgggaggatgaagtgcgtacagaggggctcgcagtgctgttcatcggagccatcagagcnatcacgcagaccatcacaatgtttgctggatgggatgnaagtgccattgggtcagcggg

SEQ ID NO: 332441 - DNA, 3596 bp, Homo sapiens
acttactgtcattaaaccagtatgatgatggagtggggaatgcctcagtttctcccaccgccgagggcctataggactacagttcccagggccccgtgctgcaggctagcggcctcccgccaatgctggccagtaacctgagcatccctctccaaaaggtcacttcagggctccttgagggacagcaacagggggagcctagagctgctcagcttcggtgggggtggagtgagggctgtggccctgcctcacacaacctccctcacaccacccctgcaatgcagggtcgtgggcccctttctcaaagacatccagtggcctctgctagttgcacctcttccgtcaggggacactgacttggctcctgcaccacagcctgcagggggtcctggttccttttgccacaacacatggcctcccatcctggttcagccactgacagacagctccccaatccagcactctgcctgctccttcttgtatccaaccctccaaaaggcagggacaagggacagaagaccatgtgcaaggcctggaggaagtgggtcagcacaggcctgtgaacaagccaggccagtcttggcggcccaagtggagctcacctctccctcccctctcctctcctccccttgccctcaaaatagctccctgagctgccaggccaagaccctcccattgcaggggaggcggggcgtgctgcccagagccaggctttaaatccccttgaggctggggagctccactccttggctggaggcagtgctgaggccgccgtcccctctaccatcagtccagtccggcccgccctcctgcagccatgtcccggcccctgtcagaccaagagaaaagaaagcaaatcagtgtgcgtggcctggccggcgtggagaacgtgactgagctgaaaaagaacttcaaccggcacctgcatttcacactcgtaaaggaccgcaatgtggccaccccacgagactactactttgctctggcccataccgtgcgcgaccacctcgtggggcgctggatccgcacgcagcagcactactatgagaaggaccccaagaggatctactacctgtctttagagttctatatgggacggacgctacagaacaccatggtgaacctggccttagagaatgcctgtgacgaggccacctaccagctgggcctggacatggaggagctggaggaaattgaggaggatgcggggctgggcaacgggggcctgggccggctggcagcctgctttcttgactccatggcaacactgggcctggccgcctatggctacgggattcgctatgagtttgggatttttaaccagaagatctccgggggctggcagatggaggaggccgatgactggcttcgctacggcaacccctgggagaaggcccggcccgagttcacgctacctgtgcacttctacggccatgtggagcacaccagccagggtgccaagtgggtggacacacaggtggtactggccatgccctacgatacgcccgtgcctggctatcgcaacaatgttgtcaacaccatgcgcctctggtctgccaaggctcccaatgacttcaacctcaaggacttcaatgtcggtggctacatccaggctgtgttggaccgaaacctggcggagaacatctctcgtgtcctgtaccccaatgataatttcttcgaagggaaggagctgcggctgaagcaggagtatttcgtggtggctgccaccctccaggacatcatccgtcgcttcaagtcttccaagttcggctgccgtgatcccgtgcgcacgaacttcgatgccttcccagataaggtggccatccagctcaatgacacccacccctccctggccatccccgagctgatgaggatcctggtggacctggaacggatggactgggacaaggcgtgggatgtgacagtgaggacctgtgcctacaccaaccacacggtgctgcccgaggccctggagcgctggccggtgcacctcttggagacgctgctgccgcggcacctccagatcatctacgagatcaaccagcgcttcctcaaccgggtggcggccgcattcccaggggacgtagaccggctgcggcgcatgtcgctggtggaggagggcgcagtgaagcgcatcaacatggcacacctgtgcatcgcggggtcgcacgccgtcaacggcgtggcgcgcatccactccgagatcctcaagaagaccatcttcaaagacttctatgagctggagcctcataagttccagaataagaccaacggcatcacccctcggcgctggctggttctgtgtaaccccgggctggcagaggtcattgctgagcgcatcggggaggacttcatctctgacctggaccagctgcgcaaactgctctcctttgtggatgatgaagctttcattcgggatgtggccaaagtgaagcaggaaaacaagttgaagtttgctgcctacctagagagggaatacaaagtccacatcaaccccaactcactcttcgacatccaggtgaagcggattcacgaatataaacgacagctcctcaactgcctccatgtcatcaccctgtacaaccgcatcaagagggagcccaataagttttttgtgcctcggactgtgatgattggagggaaggctgcacctgggtaccacatggccaagatgatcatcagactcgtcacagccatcggggatgtggtcaaccatgacccggcagtgggtgaccgcctccgtgtcatcttcctggagaactaccgagtctcactggccgagaaagtgatcccagctgcagacctctctgagcagatctccactgcgggcactgaagcctcaggcaccggcaacatgaagttcatgctcaacggggctctgaccattggcaccatggacggggccaatgtggagatggcagaagaggcgggagaggaaaacttcttcatctttggcatgcgggtggaggatgtggataagcttgaccaaagagggtacaatgcccaggagtactacgatcgcattcctgagcttcggcaggtcattgagcagctgagcagtggcttcttctcccccaaacagcccgacctgttcaaggacattgtcaatatgctcatgcaccatgaccggtttaaagtcttcgcagattatgaagactacattaaatgccaggagaaagtcagcgccttgtacaagaacccaagagagtggacgcggatggtgatccggaacatagccacctctggcaagttctccagtgaccgcaccattgcccagtatgcccgggagatctggggtgtggagccttcccgccagcgcctgccagccccggatgaggccatctgagcctccagaccagaccccaaaccagcccttgagtctgtcacactctcttgggccagccccagcacctcatgcagagggtggggtactggagttagatctctaagcccctcctggaaccctcattttccccactctcaatgtcccagtgtccagcgtgactaaggacacgggccgatgactggcttcgctacggcaatccctgggagaaggcccggcccgagttcacgctacctgtgcacatccgtactgg

SEQ ID NO: 332442 - DNA, 437 bp, Homo sapiens
actgcctccatgtcatcaccctgtacaaccgtgagtggcagccactctaccctgtctctcagtgctcccccgtgttcctgcggcatagtacatattgcccaaccaacatctcctttggacttgggactactcttgggacatggaattatccccatttcacagatgggcaaactgaggctaagagagcatagcaagtgattgttcgagtcaggcctacggtgtcccagcccagcctctgtcaggagctactacccagagggaaaggtaggcccactggatccctctcgtttctccacaggcatcaagagggagcccaataagttttttgtgcctcggactgtgatgattggagggaaggtgagaagccaggctccagccctgggctcccgtcctttgatatatccaggttgaggtcagcccagctgagttgcaggata

SEQ ID NO: 332443 - DNA, 3616 bp, Homo sapiens
acttactgtcattaaaccagtatgatgatggagtggggaatgcctcagtttctcccaccgccgagggcctataggactacagttcccagggccccgtgctgcaggctagcggcctcccgccaatgctggccagtaacctgagcatccctctccaaaaggtcacttcagggctccttgagggacagcaacagggggagcctagagctgctcagcttcggtgggggtggagtgagggctgtggccctgcctcacacaacctccctcacaccacccctgcaatgcagggtcgtgggcccctttctcaaagacatccagtggcctctgctagttgcacctcttccgtcaggggacactgacttggctcctgcaccacagcctgcagggggtcctggttccttttgccacaacacatggcctcccatcctggttcagccactgacagacagctccccaatccagcactctgcctgctccttcttgtatccaaccctccaaaaggcagggacaagggacagaagaccatgtgcaaggcctggaggaagtgggtcagcacaggcctgtgaacaagccaggccagtcttggcggcccaagtggagctcacctctccctcccctctcctctcctccccttgccctcaaaatagctccctgagctgccaggccaagaccctcccattgcaggggaggcggggcgtgctgcccagagccaggctttaaatccccttgaggctggggagctccactccttggctggaggcagtgctgaggccgccgtcccctctaccatcagtccagtccggcccgccctcctgcagccatgtcccggcccctgtcagaccaagagaaaagaaagcaaatcagtgtgcgtggcctggccggcgtggagaacgtgactgagctgaaaaagaacttcaaccggcacctgcatttcacactcgtaaaggaccgcaatgtggccaccccacgagactactactttgctctggcccataccgtgcgcgaccacctcgtggggcgctggatccgcacgcagcagcactactatgagaaggaccccaagaggatctactacctgtctttagagttctatatgggacggacgctacagaacaccatggtgaacctggccttagagaatgcctgtgacgaggccacctaccagctgggcctggacatggaggagctggaggaaattgaggaggatgcggggctgggcaacgggggcctgggccggctggcagcctgctttcttgactccatggcaacactgggcctggccgcctatggctacgggattcgctatgagtttgggatttttaaccagaagatctccgggggctggcagatggaggaggccgatgactggcttcgctacggcaacccctgggagaaggcccggcccgagttcacgctacctgtgcacttctacggccatgtggagcacaccagccagggtgccaagtgggtggacacacaggtggtactggccatgccctacgatacgcccgtgcctggctatcgcaacaatgttgtcaacaccatgcgcctctggtctgccaaggctcccaatgacttcaacctcaaggacttcaatgtcggtggctacatccaggctgtgttggaccgaaacctggcggagaacatctctcgtgtcctgtaccccaatgataatttcttcgaagggaaggagctgcggctgaagcaggagtatttcgtggtggctgccaccctccaggacatcatccgtcgcttcaagtcttccaagttcggctgccgtgatcccgtgcgcacgaacttcgatgccttcccagataaggtggccatccagctcaatgacacccacccctccctggccatccccgagctgatgaggatcctggtggacctggaacggatggactgggacaaggcgtgggatgtgacagtgaggacctgtgcctacaccaaccacacggtgctgcccgaggccctggagcgctggccggtgcacctcttggagacgctgctgccgcggcacctccagatcatctacgagatcaaccagcgcttcctcaaccgggtggcggccgcattcccaggggacgtagaccggctgcggcgcatgtcgctggtggaggagggcgcagtgaagcgcatcaacatggcacacctgtgcatcgcggggtcgcacgccgtcaacggcgtggcgcgcatccactccgagatcctcaagaagaccatcttcaaagacttctatgagctggagcctcataagttccagaataagaccaacggcatcacccctcggcgctggctggttctgtgtaaccccgggctggcagaggtcattgctgagcgcatcggggaggacttcatctctgacctggaccagctgcgcaaactgctctcctttgtggatgatgaagctttcattcgggatgtggccaaagtgaagcaggaaaacaagttgaagtttgctgcctacctagagagggaatacaaagtccacatcaaccccaactcactcttcgacatccaggtgaagcggattcacgaatataaacgacagctcctcaactgcctccatgtcatcaccctgtacaaccgcatcaagagggagcccaataagttttttgtgcctcggactgtgatgattggagggaaggctgcacctgggtaccacatggccaagatgatcatcagactcgtcacagccatcggggatgtggtcaaccatgacccggcagtgggtgaccgcctccgtgtcatcttcctggagaactaccgagtctcactggccgagaaagtgatcccagctgcagacctctctgagcagatctccactgcgggcactgaagcctcaggcaccggcaacatgaagttcatgctcaacggggctctgaccattggcaccatggacggggccaatgtggagatggcagaagaggcgggagaggaaaacttcttcatctttggcatgcgggtggaggatgtggataagcttgaccaaagagggtacaatgcccaggagtactacgatcgcattcctgagcttcggcaggtcattgagcagctgagcagtggcttcttctcccccaaacagcccgacctgttcaaggacattgtcaatatgctcatgcaccatgaccggtttaaagtcttcgcagattatgaagactacattaaatgccaggagaaagtcagcgccttgtacaagaacccaagagagtggacgcggatggtgatccggaacatagccacctctggcaagttctccagtgaccgcaccattgcccagtatgcccgggagatctggggtgtggagccttcccgccagcgcctgccagccccggatgaggccatctgagcctccagaccagaccccaaaccagcccttgagtctgtcacactctcttgggccagccccagcacctcatgcagagggtggggtactggagttagatctctaagcccctcctggaaccctcattttccccactctcaatgtcccagtgtccagcgtgactaaggacacgggcccccttccgtcctcgggctcccggtcccctcctatttatggggtctgaccaactgcacccactccctaataaattcattctccttgggagcctcctta

SEQ ID NO: 332444 - DNA, 3589 bp, Homo sapiens
acttactgtcattaaaccagtatgatgatggagtggggaatgcctcagtttctcccaccgccgagggcctataggactacagttcccagggccccgtgctgcaggctagcggcctcccgccaatgctggccagtaacctgagcatccctctccaaaaggtcacttcagggctccttgagggacagcaacagggggagcctagagctgctcagcttcggtgggggtggagtgagggctgtggccctgcctcacacaacctccctcacaccacccctgcaatgcagggtcgtgggcccctttctcaaagacatccagtggcctctgctagttgcacctcttccgtcaggggacactgacttggctcctgcaccacagcctgcagggggtcctggttccttttgccacaacacatggcctcccatcctggttcagccactgacagacagctccccaatccagcactctgcctgctccttcttgtatccaaccctccaaaaggcagggacaagggacagaagaccatgtgcaaggcctggaggaagtgggtcagcacaggcctgtgaacaagccaggccagtcttggcggcccaagtggagctcacctctccctcccctctcctctcctccccttgccctcaaaatagctccctgagctgccaggccaagaccctcccattgcaggggaggcggggcgtgctgcccagagccaggctttaaatccccttgaggctggggagctccactccttggctggaggcagtgctgaggccgccgtcccctctaccatcagtccagtccggcccgccctcctgcagccatgtcccggcccctgtcagaccaagagaaaagaaagcaaatcagtgtgcgtggcctggccggcgtggagaacgtgactgagctgaaaaagaacttcaaccggcacctgcatttcacactcgtaaaggaccgcaatgtggccaccccacgagactactactttgctctggcccataccgtgcgcgaccacctcgtggggcgctggatccgcacgcagcagcactactatgagaaggaccccaagaggatctactacctgtctttagagttctatatgggacggacgctacagaacaccatggtgaacctggccttagagaatgcctgtgacgaggccacctaccagctgggcctggacatggaggagctggaggaaattgaggaggatgcggggctgggcaacgggggcctgggccggctggcagcctgctttcttgactccatggcaacactgggcctggccgcctatggctacgggattcgctatgagtttgggatttttaaccagaagatctccgggggctggcagatggaggaggccgatgactggcttcgctacggcaacccctgggagaaggcccggcccgagttcacgctacctgtgcacttctacggccatgtggagcacaccagccagggtgccaagtgggtggacacacaggtggtactggccatgccctacgatacgcccgtgcctggctatcgcaacaatgttgtcaacaccatgcgcctctggtctgccaaggctcccaatgacttcaacctcaaggacttcaatgtcggtggctacatccaggctgtgttggaccgaaacctggcggagaacatctctcgtgtcctgtaccccaatgataatttcttcgaagggaaggagctgcggctgaagcaggagtatttcgtggtggctgccaccctccaggacatcatccgtcgcttcaagtcttccaagttcggctgccgtgatcccgtgcgcacgaacttcgatgccttcccagataaggtggccatccagctcaatgacacccacccctccctggccatccccgagctgatgaggatcctggtggacctggaacggatggactgggacaaggcgtgggatgtgacagtgaggacctgtgcctacaccaaccacacggtgctgcccgaggccctggagcgctggccggtgcacctcttggagacgctgctgccgcggcacctccagatcatctacgagatcaaccagcgcttcctcaaccgggtggcggccgcattcccaggggacgtagaccggctgcggcgcatgtcgctggtggaggagggcgcagtgaagcgcatcaacatggcacacctgtgcatcgcggggtcgcacgccgtcaacggcgtggcgcgcatccactccgagatcctcaagaagaccatcttcaaagacttctatgagctggagcctcataagttccagaataagaccaacggcatcacccctcggcgctggctggttctgtgtaaccccgggctggcagaggtcattgctgagcgcatcggggaggacttcatctctgacctggaccagctgcgcaaactgctctcctttgtggatgatgaagctttcattcgggatgtggccaaagtgaagcaggaaaacaagttgaagtttgctgcctacctagagagggaatacaaagtccacatcaaccccaactcactcttcgacatccaggtgaagcggattcacgaatataaacgacagctcctcaactgcctccatgtcatcaccctgtacaaccgcatcaagagggagcccaataagttttttgtgcctcggactgtgatgattggagggaaggctgcacctgggtaccacatggccaagatgatcatcagactcgtcacagccatcgtgggtgaccgcctccgtgtcatcttcctggagaactaccgagtctcactggccgagaaagtgatcccagctgcagacctctctgagcagatctccactgcgggcactgaagcctcaggcaccggcaacatgaagttcatgctcaacggggctctgaccattggcaccatggacggggccaatgtggagatggcagaagaggcgggagaggaaaacttcttcatctttggcatgcgggtggaggatgtggataagcttgaccaaagagggtacaatgcccaggagtactacgatcgcattcctgagcttcggcaggtcattgagcagctgagcagtggcttcttctcccccaaacagcccgacctgttcaaggacattgtcaatatgctcatgcaccatgaccggtttaaagtcttcgcagattatgaagactacattaaatgccaggagaaagtcagcgccttgtacaagaacccaagagagtggacgcggatggtgatccggaacatagccacctctggcaagttctccagtgaccgcaccattgcccagtatgcccgggagatctggggtgtggagccttcccgccagcgcctgccagccccggatgaggccatctgagcctccagaccagaccccaaaccagcccttgagtctgtcacactctcttgggccagccccagcacctcatgcagagggtggggtactggagttagatctctaagcccctcctggaaccctcattttccccactctcaatgtcccagtgtccagcgtgactaaggacacgggcccccttccgtcctcgggctcccggtcccctcctatttatggggtctgaccaactgcacccactccctaataaattcattctccttgggagcctcctta

SEQ ID NO: 332445 - DNA, 640 bp, Homo sapiens
acagctctgtcctggcaggtacaatgcccaggagtactacgatcgcattcctgagcttcggcaggtcattgagcagctgagcagtggcttcttctcccccaaacagcccgacctgttcaaggacattgtcaatatgctcatgcaccatgaccggtttaaagtcttcgcagattatgaagactacattaaatgccaggagaaagtcagcgccttgtacaagaacccaagagagtggacgcggatggtgatccggaacatagccacctctggcaagttctccagtgaccgcaccattgcccagtatgcccgggagatctggggtgtggagccttcccgccagcgcctgccagccccggatgaggccatctgagcctccagaccagaccccaaaccagcccttgagtctgtcacactctcttgggccagccccagcacctcatgcagagggtggggtactggagttagatctctaagcccctcctggaaccctcattttccccactctcaatgtcccagtgtccagcgtgactaaggacacgggcccccttccgtcctcgggctcccggtcccctcctatttatggggtctgaccaactgcacccactccctaataaattcattctccttgggagcctcctta

SEQ ID NO: 332446 - DNA, 226 bp, Homo sapiens
aggtgtgctaggtagttgtcgatctgatctagaggctttgctggctcatcaggcttatgtcttgggccgactggggttgcacaatacaagcccaagtgcacctgaggggcaggggctgttttcctcagctccagagcaatcctcatcccctcttccagcaggatcttgctccaggttacttacgagacaacctctgtgtatgtgtctgcctgtctgtgtgtctggg

SEQ ID NO: 332447 - DNA, 446 bp, Homo sapiens
atcaatataataggtcagtgcatttaaaccaagattgtgccatttttaatatttcacattgcctcttttaacagaaccaaatcagaacagctcagcaacccctgaatttgacagtctcaccaatttcagaaaatcattaaaaagaaaatattgaaaggaaaatgttttctttttgaagacttctggcttcattttatactactttggcatggactgtatttattttcaaatggctttttcgtttttgtttttcttggcaagttttattgtgagtttttctaattatgaagcaaaatttcttttctccaccatgctttatgtgatagtatttaaaattgatgtgagttattatgtcaaaaaaactgatctattaaagaagtaattggcctttctgagctgatttttccatcttttgtaattatctttattaaaaaattgtacttgga

SEQ ID NO: 332448 - DNA, 2088 bp, Homo sapiens
gcgctcacctccctgcggcctcctgaggtggtttggtggccccctcctcgcgagttggtgccgctgccacctccgattccgagctttcggcacctctgccgggtggtaccgagccttcccggcgccccctcctctcctcccaccggcctgcccttccccgcgggactatcgcccccacgtttccctcagcccttttctctcccggccgagccgcggcggcagcagcagcagcagcagcagcaggaggaggagcccggtggcggcggtggccggggagcccatggcgtacagtcaaggaggcggcaaaaaaaaagtctgctactactacgacggtgatattggaaattattattatggacagggtcatcccatgaagcctcatagaatccgcatgacccataacttgctgttaaattatggcttatacagaaaaatggaaatatataggccccataaagccactgccgaagaaatgacaaaatatcacagtgatgagtatatcaaatttctacggtcaataagaccagataacatgtctgagtatagtaagcagatgcagagatttaatgttggagaagattgtccagtgtttgatggactctttgagttttgtcagctctcaactggcggttcagttgctggagctgtgaagttaaaccgacaacagactgatatggctgttaattgggctggaggattacatcatgctaagaaatcagaagcatcaggattctgttacgttaatgatattgtgcttgccatccttgaattactaaagtatcatcagagagtcttatatattgatatagatattcatcatggtgatggtgttgaagaagctttttatacaacagatcgtgtaatgacggtatcattccataaatatggggaatactttcctggcacaggagacttgagggatattggtgctggaaaaggcaaatactatgctgtcaattttccaatgagagatggtatagatgatgagtcatatgggcagatatttaagcctattatctcaaaggtgatggagatgtatcaacctagtgctgtggtattacagtgtggtgcagactcattatctggtgatagactgggttgtttcaatctaacagtcaaaggtcatgctaaatgtgtagaagttgtaaaaacttttaacttaccattactgatgcttggaggaggtggctacacaatccgtaatgttgctcgatgttggacatatgagactgcagttgcccttgattgtgagattcccaatgagttgccatataatgattactttgagtattttggaccagacttcaaactgcatattagtccttcaaacatgacaaaccagaacactccagaatatatggaaaagataaaacagcgtttgtttgaaaatttgcgcatgttacctcatgcacctggtgtccagatgcaagctattccagaagatgctgttcatgaagacagtggagatgaagatggagaagatccagacaagagaatttctattcgagcatcagacaagcggatagcttgtgatgaagaattctcagattctgaggatgaaggagaaggaggtcgaagaaatgtggctgatcataagaaaggagcaaagaaagctagaattgaagaagataagaaagaaacagaggacaaaaaaacagacgttaaggaagaagataaatccaaggacaacagtggtgaaaaaacagataccaaaggaaccaaatcagaacagctcagcaacccctgaatttgacagtctcaccaatttcagaaaatcattaaaaagaaaatattgaaaggaaaatgttttctttttgaagacttctggcttcattttatactactttggcatggactgtatttattttcaaatggctttttcgtttttgtttttcttggcaagttttattgtgagtttttctaattatgaagcaaaatttcttttctccaccatgctttatgtgatagtatttaaaattgatgtgagttattatgtcaaaaaaactgatctattaaagaagtaattggcctttctgagctgatttttccatcttttgtaattatctttattaaaaaattgtacttgga

SEQ ID NO: 332449 - DNA, 2318 bp, Homo sapiens
gcgctcacctccctgcggcctcctgaggtggtttggtggccccctcctcgcgagttggtgccgctgccacctccgattccgagctttcggcacctctgccgggtggtaccgagccttcccggcgccccctcctctcctcccaccggcctgcccttccccgcgggactatcgcccccacgtttccctcagcccttttctctcccggccgagccgcggcggcagcagcagcagcagcagcagcaggaggaggagcccggtggcggcggtggccggggagcccatggcgtacagtcaaggaggcggcaaaaaaaaagtctgctactactacgacggtgatattggaaattattattatggacagggtcatcccatgaagcctcatagaatccgcatgacccataacttgctgttaaattatggcttatacagaaaaatggaaatatataggccccataaagccactgccgaagaaatgacaaaatatcacagtgatgagtatatcaaatttctacggtcaataagaccagataacatgtctgagtatagtaagcagatgcagagatttaatgttggagaagattgtccagtgtttgatggactctttgagttttgtcagctctcaactggcggttcagttgctggagctgtgaagttaaaccgacaacagactgatatggctgttaattgggctggaggattacatcatgctaagaaatcagaagcatcaggattctgttacgttaatgatattgtgcttgccatccttgaattactaaagtatcatcagagagtcttatatattgatatagatattcatcatggtgatggtgttgaagaagctttttatacaacagatcgtgtaatgacggtatcattccataaatatggggaatactttcctggcacaggagacttgagggatattggtgctggaaaaggcaaatactatgctgtcaattttccaatgagagatggtatagatgatgagtcatatgggcagatatttaagcctattatctcaaaggtgatggagatgtatcaacctagtgctgtggtattacagtgtggtgcagactcattatctggtgatagactgggttgtttcaatctaacagtcaaaggtcatgctaaatgtgtagaagttgtaaaaacttttaacttaccattactgatgcttggaggaggtggctacacaatccgtaatgttgctcgatgttggacatatgagactgcagttgcccttgattgtgagattcccaatgagttgccatataatgattactttgagtattttggaccagacttcaaactgcatattagtccttcaaacatgacaaaccagaacactccagaatatatggaaaagataaaacagcgtttgtttgaaaatttgcgcatgttacctcatgcacctggtgtccagatgcaagctattccagaagatgctgttcatgaagacagtggagatgaagatggagaagatccagacaagagaatttctattcgagcatcagacaagcggatagcttgtgatgaagaattctcagattctgaggatgaaggagaaggaggtcgaagaaatgtggctgatcataagaaaggagcaaagaaagctagaattgaagaagataagaaagaaacagaggacaaaaaaacagacgttaaggaagaagataaatccaaggacaacagtggtgaaaaaacagataccaaaggaaccaaatcagaacagctcagcaacccctgaatttgacagtctcaccaatttcagaaaatcattaaaaagaaaatattgaaaggaaaatgttttctttttgaagacttctggcttcattttatactactttggcatggactgtatttattttcaaatggctttttcgtttttgtttttcttggcaagttttattgtgagtttttctaattatgaagcaaaatttcttttctccaccatgctttatgtgatagtatttaaaattgatgtgagttattatgtcaaaaaaactgatctattaaagaagtaattggcctttctgagctgatttttccatcttttgtaattatctttattaaaaaattgtacttggattatcttttgtctgtttattactacaatatgaagtcttgtttcagtggctaatgacatcatttctgtagacttacaatacactctaggtgaaagataatgattacagcttgaaagataactatttgctgtttctttgggaagagtatttatagtaattattacttatctttgcaatagaaattctaccaccttgccctctatagcttagccagttagtatcagtgaagat

SEQ ID NO: 332450 - DNA, 1912 bp, Homo sapiens
gcgctcacctccctgcggcctcctgaggtggtttggtggccccctcctcgcgagttggtgccgctgccacctccgattccgagctttcggcacctctgccgggtggtaccgagccttcccggcgccccctcctctcctcccaccggcctgcccttccccgcgggactatcgcccccacgtttccctcagcccttttctctcccggccgagccgcggcggcagcagcagcagcagcagcagcaggaggaggagcccggtggcggcggtggccggggagcccatggcgtacagtcaaggaggcggcaaaaaaaaagtctgctactactacgacggtgatattggaaattattattatggacagggtcatcccatgaagcctcatagaatccgcatgacccataacttgctgttaaattatggcttatacagaaaaatggaaatatataggccccataaagccactgccgaagaaatgacaaaatatcacagtgatgagtatatcaaatttctacggtcaataagaccagataacatgtctgagtatagtaagcagatgcagagatttaatgttggagaagattgtccagtgtttgatggactctttgagttttgtcagctctcaactggcggttcagttgctggagctgtgaagttaaaccgacaacagactgatatggctgttaattgggctggaggattacatcatgctaagaaatcagaagcatcaggattctgttacgttaatgatattgtgcttgccatccttgaattactaaagtatcatcagagagtcttatatattgatatagatattcatcatggtgatggtgttgaagaagctttttatacaacagatcgtgtaatgacggtatcattccataaatatggggaatactttcctggcacaggagacttgagggatattggtgctggaaaaggcaaatactatgctgtcaattttccaatgagagatggtatagatgatgagtcatatgggcagatatttaagcctattatctcaaaggtgatggagatgtatcaacctagtgctgtggtattacagtgtggtgcagactcattatctggtgatagactgggttgtttcaatctaacagtcaaaggtcatgctaaatgtgtagaagttgtaaaaacttttaacttaccattactgatgcttggaggaggtggctacacaatccgtaatgttgctcgatgttggacatatgagactgcagttgcccttgattgtgagattcccaatgagttgccatataatgattactttgagtattttggaccagacttcaaactgcatattagtccttcaaacatgacaaaccagaacactccagaatatatggaaaagataaaacagcgtttgtttgaaaatttgcgcatgttacctcatgcacctggtgtccagatgcaagctattccagaagatgctgttcatgaagacagtggagatgaagatggagaagatccagacaagagaatttctattcgagcatcagacaagcggatagcttgtgatgaagaattctcagattctgaggatgaaggagaaggaggtcgaagaaatgtggctgatcataagaaaggagcaaagaaagctagaattgaagaagataagaaagaaacagaggacaaaaaaacagacgttaaggaagaagataaatccaaggacaacagtggtgaaaaaacagataccaaaggaaccaaatcagaacagctcagcaacccctgaatttgacagtctcaccaatttcagaaaatcattaaaaagaaaatattgaaaggaaaatgttttctttttgaagacttctggcttcattttatactactttggcccttatcgagggcccttgtcgagtggcccttatcgactggttatgagttggcccttatcgag

SEQ ID NO: 332451 - DNA, 2206 bp, Homo sapiens
  misc_feature (2202)..(2202): n is a, c, g, or t
  misc_feature (2205)..(2205): n is a, c, g, or t
gcgctcacctccctgcggcctcctgaggtggtttggtggccccctcctcgcgagttggtgccgctgccacctccgattccgagctttcggcacctctgccgggtggtaccgagccttcccggcgccccctcctctcctcccaccggcctgcccttccccgcgggactatcgcccccacgtttccctcagcccttttctctcccggccgagccgcggcggcagcagcagcagcagcagcagcaggaggaggagcccggtggcggcggtggccggggagcccatggcgtacagtcaaggaggcggcaaaaaaaaagtctgctactactacgacggtgatattggaaattattattatggacagggtcatcccatgaagcctcatagaatccgcatgacccataacttgctgttaaattatggcttatacagaaaaatggaaatatataggccccataaagccactgccgaagaaatgacaaaatatcacagtgatgagtatatcaaatttctacggtcaataagaccagataacatgtctgagtatagtaagcagatgcagagatttaatgttggagaagattgtccagtgtttgatggactctttgagttttgtcagctctcaactggcggttcagttgctggagctgtgaagttaaaccgacaacagactgatatggctgttaattgggctggaggattacatcatgctaagaaatcagaagcatcaggattctgttacgttaatgatattgtgcttgccatccttgaattactaaagtatcatcagagagtcttatatattgatatagatattcatcatggtgatggtgttgaagaagctttttatacaacagatcgtgtaatgacggtatcattccataaatatggggaatactttcctggcacaggagacttgagggatattggtgctggaaaaggcaaatactatgctgtcaattttccaatgagagatggtatagatgatgagtcatatgggcagatatttaagcctattatctcaaaggtgatggagatgtatcaacctagtgctgtggtattacagtgtggtgcagactcattatctggtgatagactgggttgtttcaatctaacagtcaaaggtcatgctaaatgtgtagaagttgtaaaaacttttaacttaccattactgatgcttggaggaggtggctacacaatccgtaatgttgctcgatgttggacatatgagactgcagttgcccttgattgtgagattcccaatgagttgccatataatgattactttgagtattttggaccagacttcaaactgcatattagtccttcaaacatgacaaaccagaacactccagaatatatggaaaagataaaacagcgtttgtttgaaaatttgcgcatgttacctcatgcacctggtgtccagatgcaagctattccagaagatgctgttcatgaagacagtggagatgaagatggagaagatccagacaagagaatttctattcgagcatcagacaagcggatagcttgtgatgaagaattctcagattctgaggatgaaggagaaggaggtcgaagaaatgtggctgatcataagaaaaaaaaaaaaaaaaaaaaaaaaaaaaaaaaaaaaaaaaaaaaaaaaaggagggggggcgccgccccagaagaaattccccccgaggggggcccccgagtgaaggcggccaccccgtttttgtgtggaaagaagggggcgccccaaagagagggagcggatatatagatacggctgcagcgcacgcgaggggcgcgcgcggtattataacaagagcggcgcgtggagagggaggaaagaagtgtgcgacagccgtggcgagaacacctttgtgggaggagaggacgaccctttaaattgtggggggggggaggagacaccaatatggggggaacaacactcaccaccaagagagagatattataaacagcgctcagaagggaggagaaaaatataataaacaatgttttagaagggggggtgtatcaatgggtgggtgctaacaacaaaaatagggcggctgaaatatatgtgcggtggcgagaggtgatgatgagaaaatattgtggggcattaaaacgagcgggaataatgagtatttttgtggagagacaaacttattttatatacccgggagggagctagaatagtataaataaaggggnggna

SEQ ID NO: 332452 - DNA, 1905 bp, Homo sapiens
gcgctcacctccctgcggcctcctgaggtggtttggtggccccctcctcgcgagttggtgccgctgccacctccgattccgagctttcggcacctctgccgggtggtaccgagccttcccggcgccccctcctctcctcccaccggcctgcccttccccgcgggactatcgcccccacgtttccctcagcccttttctctcccggccgagccgcggcggcagcagcagcagcagcagcagcaggaggaggagcccggtggcggcggtggccggggagcccatggcgtacagtcaaggaggcggcaaaaaaaaagtctgctactactacgacggtgatattggaaattattattatggacagggtcatcccatgaagcctcatagaatccgcatgacccataacttgctgttaaattatggcttatacagaaaaatggaaatatataggccccataaagccactgccgaagaaatgacaaaatatcacagtgatgagtatatcaaatttctacggtcaataagaccagataacatgtctgagtatagtaagcagatgcagagatttaatgttggagaagattgtccagtgtttgatggactctttgagttttgtcagctctcaactggcggttcagttgctggagctgtgaagttaaaccgacaacagactgatatggctgttaattgggctggaggattacatcatgctaagaaatcagaagcatcaggattctgttacgttaatgatattgtgcttgccatccttgaattactaaagtatcatcagagagtcttatatattgatatagatattcatcatggtgatggtgttgaagaagctttttatacaacagatcgtgtaatgacggtatcattccataaatatggggaatactttcctggcacaggagacttgagggatattggtgctggaaaaggcaaatactatgctgtcaattttccaatgagagatggtatagatgatgagtcatatgggcagatatttaagcctattatctcaaaggtgatggagatgtatcaacctagtgctgtggtattacagtgtggtgcagactcattatctggtgatagactgggttgtttcaatctaacagtcaaaggtcatgctaaatgtgtagaagttgtaaaaacttttaacttaccattactgatgcttggaggaggtggctacacaatccgtaatgttgctcgatgttggacatatgagactgcagttgcccttgattgtgagattcccaatgagttgccatataatgattactttgagtattttggaccagacttcaaactgcatattagtccttcaaacatgacaaaccagaacactccagaatatatggaaaagataaaacagcgtttgtttgaaaatttgcgcatgttacctcatgcacctggtgtccagatgcaagctattccagaagatgctgttcatgaagacagtggagatgaagatggagaagatccagacaagagaatttctattcgagcatcagacaagcggatagcttgtgatgaagaattctcagattctgaggatgaaggagaaggaggtcatggatccgagatctccaaaaaaccttagcaaacatttaccaataagtataggcgatcgaaattggagactggcgcatagatatagttgccgcaggcatgatcgcacattttaccaggcattatatagcaggagaaccctttctctgcttatgattagttgaatacttgcaaggaagcaagtagacccgaaacagagaggtctaaaagtaaaagcgcccttttgcaatatgggagtttgtgggcgcaccccgcgtgtggggtccgaaaatctgactatcgcacctcctgttggaaaaacaaaaaggggtcggggccttggctgttacggga

SEQ ID NO: 332453 - DNA, 872 bp, Homo sapiens
gcgctcacctccctgcggcctcctgaggtggtttggtggccccctcctcgcgagttggtgccgctgccacctccgattccgagctttcggcacctctgccgggtggtaccgagccttcccggcgccccctcctctcctcccaccggcctgcccttccccgcgggactatcgcccccacgtttccctcagcccttttctctcccggccgagccgcggcggcagcagcagcagcagcagcagcaggaggaggagcccggtggcggcggtggccggggagcccatggcgtacagtcaaggaggcggcaaaaaaaaagtctgctactactacgacggtgatattggaaattattattatggacagggtcatcccatgaagcctcatagaatccgcatgacccataacttgctgttaaattatggcttatacagaaaaatggaaatatataggccccataaagccactgccgaagaaatgacaaaatatcacagtgatgagtatatcaaatttctacggtcaataagaccagataacatgtctgagtatagtaagcagatgcagagatttaatgttggagaagattgtccagtgtttgatggactctttgagttttgtcagctctcaactggcggttcagttgctggagctgtgaagttaaaccgacaacagactgatatggctgttaattgggctggaggattacatcatgctaagaaatcagaagcatcaggattctgttacgttaatgatattgtgcttgccatccttgaattactaaagtatgttaatttatattgatactcttttcagtgataaagtgttttcattaaaacacaataaataaagtctatggctttaaaaaatattaggtaaa

SEQ ID NO: 332454 - DNA, 438 bp, Homo sapiens
aaaaggacgagaggtcgtgaacaaagatttagaattgaaaactcttgtagtgagtgatttcattgatgaaatcactggatgttttatcatggaaaaggagagaaagtagagtttatgaacatatggatttgactttttactcgaactgtttccactaaaataaggagtgattaaatcatagttgatatgcctgtgtaatgcttttaaaggagtttgaattagttttgagattgattactgttttctaaaacacatataagtttgggttagttttggaatttatatattttgttctggtagacttggttcttttgaggggaccgataggggaatttgtatatttgtttgataatactgatataaccggttgtaattccacagttctgacatttatttctcttcacagaggccccataaagccactgccgaagaaatgac

SEQ ID NO: 332455 - DNA, 338 bp, Homo sapiens
aggagttttagacttgacattttttacatttttatttgtttttaaaatatttagaaaacccattttggttgagtaacatttgcacttattatctttttaaaatttatttttcgaactgttgcagtatgcagattttgttgttacccaaatcttcttgtcttaggtcatgctaaatgtgtagaagttgtaaaaacttttaacttaccattactgatgcttggaggaggtggctacacaatccgtaatgttgctcgatgttggacatatgagactgcagttgcccttgattgtgagattcccaatggtaagtgttctcattacaatatctttattgtatg

SEQ ID NO: 332456 - DNA, 244 bp, Homo sapiens
agttgccatataatgattactttgagtattttggaccagacttcaaactgcatattagtccttcaaacatgacaaaccagaacactccagaatatatggaaaagataaagtaagaaatcattgaattgttttgataaacattttatcttgacaaagatttagtatgctttaaagggccaagtatgatgggtctttttaactttattagatattttgtttttttctaaaggatttgaaacattaa

SEQ ID NO: 332457 - DNA, 2041 bp, Homo sapiens
gcgctcacctccctgcggcctcctgaggtggtttggtggccccctcctcgcgagttggtgccgctgccacctccgattccgagctttcggcacctctgccgggtggtaccgagccttcccggcgccccctcctctcctcccaccggcctgcccttccccgcgggactatcgcccccacgtttccctcagcccttttctctcccggccgagccgcggcggcagcagcagcagcagcagcagcaggaggaggagcccggtggcggcggtggccggggagcccatggcgtacagtcaaggaggcggcaaaaaaaaagtctgctactactacgacggtgatattggaaattattattatggacagggtcatcccatgaagcctcatagaatccgcatgacccataacttgctgttaaattatggcttatacagaaaaatggaaatatataggccccataaagccactgccgaagaaatgacaaaatatcacagtgatgagtatatcaaatttctacggtcaataagaccagataacatgtctgagtatagtaagcagatgcagagatttaatgttggagaagattgtccagtgtttgatggactctttgagttttgtcagctctcaactggcggttcagttgctggagctgtgaagttaaaccgacaacagactgatatggctgttaattgggctggaggattacatcatgctaagaaatcagaagcatcaggattctgttacgttaatgatattgtgcttgccatccttgaattactaaagtatcatcagagagtcttatatattgatatagatattcatcatggtgatggtgttgaagaagctttttatacaacagatcgtgtaatgacggtatcattccataaatatggggaatactttcctggcacaggagacttgagggatattggtgctggaaaaggcaaatactatgctgtcaattttccaatgagagatggtatagatgatgagtcatatgggcagatatttaagcctattatctcaaaggtgatggagatgtatcaacctagtgctgtggtattacagtgtggtgcagactcattatctggtgatagactgggttgtttcaatctaacagtcaaaggtcatgctaaatgtgtagaagttgtaaaaacttttaacttaccattactgatgcttggaggaggtggctacacaatccgtaatgttgctcgatgttggacatatgagactgcagttgcccttgattgtgagattcccaatgagttgccatataatgattactttgagtattttggaccagacttcaaactgcatattagtccttcaaacatgacaaaccagaacactccagaatatatggaaaagataaaacagcgtttgtttgaaaatttgcgcatgttacctcatgcacctggtgtccagatgcaagctattccagaagatgctgttcatgaagacagtggagatgaagatggagaagatccagacaagagaatttctattcgagcatcagacaagcggatagcttgtgatgaagaattctcagattctgaggatgaaggagaaggaggtcgaagaaatgtggctgatcataagaaaggagcaaagaaagctagaattgaagaagataagaaagaaacagaggacaaaaaaacagacgttaaggaagaagataaatccaaggacaacagtggtgaaaaaacagataccaaaggaaccaaatcagaacagctcagcaacccctgaatttgacagtctcaccaatttcagaaaatcattaaaaagaaaatattgaaaggaaaatgttttctttttgaagacttctggcttcattttatactactttggcatggactgtatttattttcaaatggctttttcgtttttgtttttcttggcaagttttattgtgagtttttctaattatgaagcaaaatttcttttctccaccatgctttatgtgatagtatttaaaattgatgtgagttattatgtcaaaaaaactgatctattaaagaagtaattggcctttctgagctg

SEQ ID NO: 332458 - DNA, 799 bp, Homo sapiens
gcgctcacctccctgcggcctcctgaggtggtttggtggccccctcctcgcgagttggtgccgctgccacctccgattccgagctttcggcacctctgccgggtggtaccgagccttcccggcgccccctcctctcctcccaccggcagcagcagcagcagcagcagcaggaggaggagcccggtggcggcggtggccggggagcccatggcgtacagtcaaggaggcggcaaaaaaaaagtctgctactactacgacggtgatattggaaattattattatggacagggtcatcccatgaagcctcatagaatccgcatgacccataacttgctgttaaattatggcttatacagaaaaatggaaatatataggccccataaagccactgccgaagaaatgacaaaatatcacagtgatgagtatatcaaatttctacggtcaataagaccagataacatgtctgagtatagtaagcagatgcagagatttaatgttggagaagattgtccagtgtttgatggactctttgagttttgtcagctctcaactggcggttcagttgctggagctgtgaagttaaaccgacaacagactgatatggctgttaattgggctggaggattacatcatgctaagaaatcagaagcatcaggattctgttacgttaatgatattgtgcttgccatccttgaattactaaagtatgttaatttatattgatactcttttcagtgataaagtgttttcattaaaacacaataaataaagtctatggctttaaaaaatattaggtaaa

SEQ ID NO: 332459 - DNA, 1865 bp, Homo sapiens
agcatggctgtctttcagtaaaactttttttatggacactgaaatttgaattttgtataattatcacacgtcagaaaatactcttgttttggttttgtttttaaaccatttaaaaaataataaaaacttcttagttcaaagctgaaaaaagaggcaattggccaaatttgggccatgggccatagttagccaatccctattttatactattgaagatttactacagaggtgttttaattaacaatcttgagtatggtataatcttcagtttttaatatattagaaatatgtgctatgtttttgaagcatgtagaatagaacagatttcacaaagagtaaatatatattttttaacctacattgggccacaagtgggtatttaaaggcctgaggctcaaacctcagatatttgaataacctcttaggctgaatgtaaaaggtgattaaacattctggaatgcaagagctcaaaaatgggtttcctgaatttgtggtgcttcttcccatcttagaacctttaaaggaaaaaccaaaacttatggatttgttttcaggtatcatcagagagtcttatatattgatatagatattcatcatggtgatggtgttgaagaagctttttatacaacagatcgtgtaatgacggtatcattccataaatatggggaatactttcctggcacaggagacttgagggatattggtgctggaaaaggcaaatactatgctgtcaattttccaatgagagatggtatagatgatgagtcatatgggcagatatttaagcctattatctcaaaggtgatggagatgtatcaacctagtgctgtggtattacagtgtggtgcagactcattatctggtgatagactgggttgtttcaatctaacagtcaaaggtcatgctaaatgtgtagaagttgtaaaaacttttaacttaccattactgatgcttggaggaggtggctacacaatccgtaatgttgctcgatgttggacatatgagactgcagttgcccttgattgtgagattcccaatgagttgccatataatgattactttgagtattttggaccagacttcaaactgcatattagtccttcaaacatgacaaaccagaacactccagaatatatggaaaagataaaacagcgtttgtttgaaaatttgcgcatgttacctcatgcacctggtgtccagatgcaagctattccagaagatgctgttcatgaagacagtggagatgaagatggagaagatccagacaagagaatttctattcgagcatcagacaagcggatagcttgtgatgaagaattctcagattctgaggatgaaggagaaggaggtcgaagaaatgtggctgatcataagaaaggagcaaagaaagctagaattgaagaagataagaaagaaacagaggacaaaaaaacagacgttaaggaagaagataaatccaaggacaacagtggtgaaaaaacagataccaaaggaaccaaatcagaacagctcagcaacccctgaatttgacagtctcaccaatttcagaaaatcattaaaaagaaaatattgaaaggaaaatgttttctttttgaagacttctggcttcattttatactactttggcatggactgtatttattttcaaatggctttttcgtttttgtttttcttggcaagttttattgtgagtttttctaattatgaagcaaaatttcttttctccaccatgctttatgtgatagtatttaaaattgatgtgagttattatgtcaaaaaaactgatctattaaagaagtaattggcctttctgagctgatttttccatcttttgtaattatctttattaaaaaattgtacttgga

SEQ ID NO: 332460 - DNA, 527 bp, Homo sapiens
gcggccgcctactactactacaactgctcgaattcaagcttctaacgatgtacggggacatggactgtatttattttcaaatggctttttcgtttttgtttttcttggcaagttttattgtgagtttttctaattatgaagcaaaatttcttttctccaccatgctttatgtgatagtatttaaaattgatgtgagttattatgtcaaaaaaactgatctattaaagaagtaattggcctttctgagctgatttttccatcttttgtaattatctttattaaaaaattgtacttggattatcttttgtctgtttattactacaatatgaagtcttgtttcagtggctaatgacatcatttctgtagacttacaatacactctaggtgaaagataatgattacagcttgaaagataactatttgctgtttctttgggaagagtatttatagtaattattacttatctttgcaatagaaattctaccaccttgccctctatagcttagccagttagtatcagtgaagat

SEQ ID NO: 332461 - DNA, 310 bp, Homo sapiens
agttgtttcttctggtaacacttcgagaaatttcaaatttggatctgtgttaagaaaattgaaactataaggaaaaaatgactgcctccctctgactggcagacattttaaagtgagaaaagcaactgaaataatttataatcaagcggcttttagtatttagtattcggcatttattagaattataaattaacatagattttaagtaaaacatactttaatacgaagtgtcatagaaaatttattgaatttagattgcatgacttctcttctactaacacaactttttttttttttttttttttttttt

SEQ ID NO: 332462 - DNA, 445 bp, Homo sapiens
ggagagggaaaagcaaaaagctaacagcacaacaacaaaacaaaaaccacttcagacttcaaggagtttttaatcatgagaatgtacagcctgtgtcctaaccatctttcagccctaaacatattcccacagacaggcagcacattcatacaccctcagacaacacactactccgtcctcacactttagagtagaacgcaagttacaagacaatgtcaattaatgttgttgtaggaaacagtccattggaaggactggaactgtcagctgtatgtcaggctctttccctgtactgtctcattcaatcttcgtcactttagagaaaactgaggcctaagaaagttcattacctttctgaagaccacacagataattatgaaagttttagaattcaaccctcattctgacttcaaagcctacaacaccaccacaccacagtacagag

SEQ ID NO: 332463 - DNA, 277 bp, Homo sapiens
tcctcactggagtcctgcctagaacagagattgaactctgtgctggttaaagtcgaacccatttcccatagagcgggagtgggtagaaaaaaagcagcaagctgagagctgtctggaggcagttggggatataataaattaggaagtcacacagctgtgtgttctgaaacacaagattgaaaatagatcatttttttcctcttgggggaacatactgtagtgttgatattttctaattcaaatttggactcagtgggccttctcaaccaaattaccc

SEQ ID NO: 332464 - DNA, 193 bp, Homo sapiens
ccaccactctctgtgagtacaccatgtgtgcccatggccagatggccagcatgcatgatgagaatggagtcaggtaataccaatgtctcagactaagaagctcgaagatataatcttgtgctccatcactcctaaataccattttcaaagtattccctcttggaaacataaacgtccctaacccaggtctgaa

SEQ ID NO: 332465 - DNA, 286 bp, Homo sapiens
ggacttttccaaccagaggaggaaagctcatagtggcttaaattgaggggaaggtaatcacattttcttcctttctctattccaacaccttagctatttcttgacatacaataggtgctcgaaatgacaaagatggctattgtcccccagtatgcatttcatgacttgtgctttgtcaatagaatcccctggtttagccgaggacaaggctacttgccagtaggtgttttcaagttctggctaatgggagcagaagagatgtataccacttctagattatactctt

SEQ ID NO: 332466 - DNA, 189 bp, Homo sapiens
ttcccatgaggtcagtccttatgcatcgccatcctgactgttggtggccgcagcgctcatcctcagccccaggtgtgcaacaaaaaaggagcttctcccaactcctaattgcatggaaaggctgcaggtatttcctggctttacttgcataacctttaggtatgtgttgtctgaaaccacgtctttccc

SEQ ID NO: 332467 - DNA, 318 bp, Homo sapiens
tccatgttctatgctttaaaagaagagctggttttttgaatgtaaatataaacagagcagacataagcctgaaggaccaagtgtgtgagactctacaaggcttgaaccaaccataggacacactgaggggactccagagagatttggattagccttactaccatcactgatggcagtgaacatggtatgcctccatcttctcaagccctgacagggccaaaaggaggcttcttcttccacactattcttccactgaggatccttggcttctccctcccctcccctcaaagacagactcttctacaccaaagccctcag

SEQ ID NO: 332468 - DNA, 117 bp, Homo sapiens
cctacagcacccggtattcccaggcggtctcccatgcaagtgctaaccaggcccgacactgcttagcttccgagatcagacgagatcgggcgcgttcagggtggtatggccgtagac

SEQ ID NO: 332469 - DNA, 356 bp, Homo sapiens
acacaagttattcaacatctgaaagcctcagtttcccccacaagtttgttaactcagagaaaacttgtaaaatgctagggactgaactaggcacagactaagctcaataacagttttcagtcttggttttctccttatgctttttttgactcccaccactgtaccttgagtttcttttttttgtatttttatttatttatctatttgagacagagtcttgctctgtcgccccaggctggagggctgtgacacaatctccactcactgcagcctccgcctcccgagttcaagcgactttcctgcctcagcctcctgagtgagtagctgagattacaggcatgagccaccacacctgg

SEQ ID NO: 332470 - DNA, 218 bp, Homo sapiens
gataaaagattcctctgggtggggtatgctttccataccagggtaagaaaacagcccttacagagacttggaattgaaggctgcaatggacctacataaactgaacaaagtaacctttatcttccacctatccatccccccaccacctacaaccatgtatctcctagtgactaccctagagccaagcatggtgactcacacctgtaaccccagcactt

SEQ ID NO: 332471 - DNA, 255 bp, Homo sapiens
agatggagtttctgttgaacaggctggagtgcagtggtgtgatcttggattactgcaacctctgcctcccaggatcaagcaagtctccggcctcagcctcccatgtagctgggattacaggcatgtgccattgagcccggctatttcactgtggacgttgtcatctttgaaggcatcactcatgctctatctcatctagatactgagtgtcacttggtgtgtcaataaaagtttctaacattttttttttttttt

SEQ ID NO: 332472 - DNA, 488 bp, Homo sapiens
tcttggttctagttttagtttttcctttaagtaaatcatgaccttgagcaagatacttaaccgtattcttctttttctcttcacttgcccaactacttactcacagagttttcatgaaaatgcaataacaagtataaaaatgctttatcacatactaataatgtaatagtccgagtaattgtgcacatgctgttcaaactgtctttccccctggcctctactgtaattttgttaaagtattcctaccacaaagacatacagaaaaaaattgagttttctgtatatttctgtatatatgagaaaatttaattaggttacacagttaaattcagtaaattcttgaatgtcaagatatgattttcaactatgttaggcaatccttaaagcccatacaaccttgtttaaaatatgaatttggctgggcacagtggctcatgtctgtaatcccagcactttgggaggccaaggtgagtggactgcttgagccc

SEQ ID NO: 332473 - DNA, 490 bp, Homo sapiens
ggagtgagattgtggctgtatccggcacctggctgagcaggagagtgaaccccgtgggtgtgtgtttgctggtgacgttcctggagctgtcttgaagtccgagctgccttgcagcttgtagtctgcctctgtttttggctttcccagatagtttcaattcttactctcagtttgtgaacctcccttcagtgaacctcccttcacttatgctggatatctcttgcaaccggatgagcttcactaaagcagagtcatttggacctggattcgaatccctggttttccactttttagctgtgactttgagcaattatttaatttctgtaagcatcagtatccagtagctgtatccttatagtgttgtacagattaaatgagataataaaagcaaaagaccactgtagagtgtttaacacataggaggtactcaaaaatttgttaggtacctttcttcccctttccttcatgtgttaaagctttttcagtacat

SEQ ID NO: 332474 - DNA, 537 bp, Homo sapiens
tcctgattattggtacagttaaaacctagaaaggctcattcatataagggatacattgtgttggaagagcttataacaactttgttttatattttgccaaaaagcctttggattctttagctcgagggtgtagtccagattccaggtccaacttctagagttctggaggagtggcagatatccatttcttggggatcagtcagaagtgagctcattaattaattggaaactttttgttttggatgtttcagtggtaaatgaaaacaataccccctactagaattattgtgaggattctgttacattatgtgtgaaagaactgattacaggtgtcacaaattactttcttactcattaatttattaattatgtgctatgcactgttttgttttgtttttgagacagggtctctgttgtccaggctggagtatagctgtgcagtgtttttaagtgctgggaatactgtgatgagcagaatagacattgtgtctgccctcatggatccttcagtaaagtgagaaaggcaaacatcaaaca

SEQ ID NO: 332475 - DNA, 987 bp, Homo sapiens
acatacaacaatgaaaatggaattatactgttcattgtgttggtaagtttttcccacttggtaatgtgtcataaatcgttttgtcattaaataatctacaacatgatttttcatgactccatatggatgtgccatgatttagctaactaatctactatcgttaggtatttaggtcttctgttttcactagtacaaataaaatgttttaacttccttatgtgtggagctctgtaaaaagatttgtttccttaggcacctagaagtgggattgctgagtcaagggttacaccagagtttctcagcctcaacattattgacctttggggccagataactgtttgttgtgtggggcttacgtttagtggcatccctggcctgtacccaaaagattccggtagcacccctctccccaagttgtgacaatcaaaaatgtctccagatgttgctaaatgtcccctaagaagcaaaattgcctccttttaagaaccactgggttatacaatttacactccagttaggagtgtatgtaaatgtttttgttcctgtatcctcaataacagtgaatattaccaattttaaatcttcatatactaagaaaagggggttggggtgtggacaatcaatatacctagcagtgtattgtgaattatccccatactgtggcttctaatatgctgttatctgactctaccgggatcattagtaaatgccaatatatgttaataatttcctaggtttatatactattttgagttaatagcaattttcagacatcttaaagaccattttcatgattctaaaaaattacaaaatccaaaatgttttaatttttgaagggaactattaccttaggaaaatgggtgaggggcctggtgcaatggctcacgcctgtaatcccagcactttgggaggccgaggtgggtggatcacttgaggtcaggagtttaagaccatcctggccagtgtggtgaaacccccatctctact

SEQ ID NO: 332476 - DNA, 1197 bp, Homo sapiens
ggctgggcgttgtggctcacacctgtaatcccagcactttgggaggccaaggcaggtggatcatttgaggtcaggagttcgagaccagcctggccaacatggtgaaaccccatctttactaaaaatacaaaaattagccaggcgtggtggcgcatgcctgtaatcccagctactcaggaggctgagacaggagaattgcttgaacacaggaggcagagtttgcactttgctgagatcctgccactgcactccagcctggggcacagagcaagactccatctcaaaaacaaacaacaacaaataatctacaacatgatttttcatgactccatatggatgtgccatgatttagctaactaatctactatcgttaggtatttaggtcttctgttttcactagtacaaataaaatgttttaacttccttatgtgtggagctctgtaaaaagatttgtttccttaggcacctagaagtgggattgctgagtcaagggttacaccagagtttctcagcctcaacattattgacctttggggccagataactgtttgttgtgtggggcttacgtttagtggcatccctggcctgtacccaaaagattccggtagcacccctctccccaagttgtgacaatcaaaaatgtctccagatgttgctaaatgtcccctaagaagcaaaattgcctccttttaagaaccactgggttatacaatttacactccagttaggagtgtatgtaaatgtttttgttcctgtatcctcaataacagtgaatattaccaattttaaatcttcatatactaagaaaagggggttggggtgtggacaatcaatatacctagcagtgtattgtgaattatccccatactgtggcttctaatatgctgttatctgactctaccgggatcattagtaaatgccaatatatgttaataatttcctaggtttatatactattttgagttaatagcaattttcagacatcttaaagaccattttcatgattctaaaaaattacaaaatccaaaatgttttaatttttgaagggaactattaccttaggaaaatgggtgaggggcctggtgcaatggctcacgcctgtaatcccagcactttgggaggccgaggtgggtggatcacttgaggtcaggagtttaagaccatcctggccagtgtggtgaaacccccatctctact

SEQ ID NO: 332477 - DNA, 441 bp, Homo sapiens
accaacctggccaacatggtgaaaccccgtctccactaaaaatataaaaaatcagctgggtgtggtggtgggcacctgtaatcccaactacttgggaggctaaggcagggagaatcgcttgaagtagggaggaggaggttgcagtgagctgagattgtgccactacactccagcctgggcaacagagtgagactccgtctcaaaaacaacaaaaaaatgaacaccagattattatcttctgatcctggaggtcaaaggtctagaaatcaaggtttgggcagggctgcattcctcgggaaggctccaggggagaaaccttttccttgccttgagaggcacccccttcctccgtcatcacagccccttcctccaacatcaaagcatctcactccagcctctgcttctgtttccctgtcttgggatccttaatttactcatatt

SEQ ID NO: 332478 - DNA, 399 bp, Homo sapiens
ttcctacaatatgttttgaaacaaatatatactttttttaagacagggtctcactctgtcacacagggctgagtgcaatggtgtgatctcgccccactgcaacctctgcattccatgctcaaatgatcctcccaagtagctgggattacaggtatgcgctatgacatctggctactttttgtattttttgtagagacagggtttcactatgttgtccaggctggtctccaactcctggactcaagcaatctgcctgcatcagccttccaaagtgctcagattacaggcgtgagccatcgcgcccagccaggattttgttttatacgatcaacatatatatatgtaagtgcaagtgtatatagatatttattaaatttaaaatgattaagaattaagcaa

SEQ ID NO: 332479 - DNA, 5165 bp, Homo sapiens
cgaggggggaggcggaggcgccgggagccgcgcgaggagccgccgccgccgcgccatggagcccgagtgagcgcggcgcgggcccgtccggccgccggacaacatggaggcagcgccgcccgggccgccgtggccgctgctgctgctgctgctgctgctgctggcgctgtgcggctgcccggcccccgccgcggcctcgccgctcctgctatttgccaaccgccgggacgtacggctggtggacgccggcggagtcaagctggagtccaccatcgtggtcagcggcctggaggatgcggccgcagtggacttccagttttccaagggagccgtgtactggacagacgtgagcgaggaggccatcaagcagacctacctgaaccagacgggggccgccgtgcagaacgtggtcatctccggcctggtctctcccgacggcctcgcctgcgactgggtgggcaagaagctgtactggacggactcagagaccaaccgcatcgaggtggccaacctcaatggcacatcccggaaggtgctcttctggcaggaccttgaccagccgagggccatcgccttggaccccgctcacgggtacatgtactggacagactggggtgagacgccccggattgagcgggcagggatggatggcagcacccggaagatcattgtggactcggacatttactggcccaatggactgaccatcgacctggaggagcagaagctctactgggctgacgccaagctcagcttcatccaccgtgccaacctggacggctcgttccggcagaaggtggtggagggcagcctgacgcaccccttcgccctgacgctctccggggacactctgtactggacagactggcagacccgctccatccatgcctgcaacaagcgcactggggggaagaggaaggagatcctgagtgccctctactcacccatggacatccaggtgctgagccaggagcggcagcctttcttccacactcgctgtgaggaggacaatggcggctgctcccacctgtgcctgctgtccccaagcgagcctttctacacatgcgcctgccccacgggtgtgcagctgcaggacaacggcaggacgtgtaaggcaggagccgaggaggtgctgctgctggcccggcggacggacctacggaggatctcgctggacacgccggacttcaccgacatcgtgctgcaggtggacgacatccggcacgccattgccatcgactacgacccgctagagggctatgtctactggacagatgacgaggtgcgggccatccgcagggcgtacctggacgggtctggggcgcagacgctggtcaacaccgagatcaacgaccccgatggcatcgcggtcgactgggtggcccgaaacctctactggaccgacacgggcacggaccgcatcgaggtgacgcgcctcaacggcacctcccgcaagatcctggtgtcggaggacctggacgagccccgagccatcgcactgcaccccgtgatgggcctcatgtactggacagactggggagagaaccctaaaatcgagtgtgccaacttggatgggcaggagcggcgtgtgctggtcaatgcctccctcgggtggcccaacggcctggccctggacctgcaggaggggaagctctactggggagacgccaagacagacaagatcgaggtgatcaatgttgatgggacgaagaggcggaccctcctggaggacaagctcccgcacattttcgggttcacgctgctgggggacttcatctactggactgactggcagcgccgcagcatcgagcgggtgcacaaggtcaaggccagccgggacgtcatcattgaccagctgcccgacctgatggggctcaaagctgtgaatgtggccaaggtcgtcggaaccaacccgtgtgcggacaggaacggggggtgcagccacctgtgcttcttcacaccccacgcaacccggtgtggctgccccatcggcctggagctgctgagtgacatgaagacctgcatcgtgcctgaggccttcttggtcttcaccagcagagccgccatccacaggatctccctcgagaccaataacaacgacgtggccatcccgctcacgggcgtcaaggaggcctcagccctggactttgatgtgtccaacaaccacatctactggacagacgtcagcctgaagaccatcagccgcgccttcatgaacgggagctcggtggagcacgtggtggagtttggccttgactaccccgagggcatggccgttgactggatgggcaagaacctctactgggccgacactgggaccaacagaatcgaagtggcgcggctggacgggcagttccggcaagtcctcgtgtggagggacttggacaacccgaggtcgctggccctggatcccaccaagggctacatctactggaccgagtggggcggcaagccgaggatcgtgcgggccttcatggacgggaccaactgcatgacgctggtggacaaggtgggccgggccaacgacctcaccattgactacgctgaccagcgcctctactggaccgacctggacaccaacatgatcgagtcgtccaacatgctgggtcaggagcgggtcgtgattgccgacgatctcccgcacccgttcggtctgacgcagtacagcgattatatctactggacagactggaatctgcacagcattgagcgggccgacaagactagcggccggaaccgcaccctcatccagggccacctggacttcgtgatggacatcctggtgttccactcctcccgccaggatggcctcaatgactgtatgcacaacaacgggcagtgtgggcagctgtgccttgccatccccggcggccaccgctgcggctgcgcctcacactacaccctggaccccagcagccgcaactgcagcccgcccaccaccttcttgctgttcagccagaaatctgccatcagtcggatgatcccggacgaccagcacagcccggatctcatcctgcccctgcatggactgaggaacgtcaaagccatcgactatgacccactggacaagttcatctactgggtggatgggcgccagaacatcaagcgagccaaggacgacgggacccagccctttgttttgacctctctgagccaaggccaaaacccagacaggcagccccacgacctcagcatcgacatctacagccggacactgttctggacgtgcgaggccaccaataccatcaacgtccacaggctgagcggggaagccatgggggtggtgctgcgtggggaccgcgacaagcccagggccatcgtcgtcaacgcggagcgagggtacctgtacttcaccaacatgcaggaccgggcagccaagatcgaacgcgcagccctggacggcaccgagcgcgaggtcctcttcaccaccggcctcatccgccctgtggccctggtggtagacaacacactgggcaagctgttctgggtggacgcggacctgaagcgcattgagagctgtgacctgtcaggggccaaccgcctgaccctggaggacgccaacatcgtgcagcctctgggcctgaccatccttggcaagcatctctactggatcgaccgccagcagcagatgatcgagcgtgtggagaagaccaccggggacaagcggactcgcatccagggccgtgtcgcccacctcactggcatccatgcagtggaggaagtcagcctggaggagttctcagcccacccatgtgcccgtgacaatggtggctgctcccacatctgtattgccaagggtgatgggacaccacggtgctcatgcccagtccacctcgtgctcctgcagaacctgctgacctgtggagagccgcccacctgctccccggaccagtttgcatgtgccacaggggagatcgactgtatccccggggcctggcgctgtgacggctttcccgagtgcgatgaccagagcgacgaggagggctgccccgtgtgctccgccgcccagttcccctgcgcgcggggtcagtgtgtggacctgcgcctgcgctgcgacggcgaggcagactgtcaggaccgctcagacgaggcggactgtgacgccatctgcctgcccaaccagttccggtgtgcgagcggccagtgtgtcctcatcaaacagcagtgcgactccttccccgactgtatcgacggctccgacgagctcatgtgtgaaatcaccaagccgccctcagacgacagcccggcccacagcagtgccatcgggcccgtcattggcatcatcctctctctcttcgtcatgggtggtgtctattttgtgtgccagcgcgtggtgtgccagcgctatgcgggggccaacgggcccttcccgcacgagtatgtcagcgggaccccgcacgtgcccctcaatttcatagccccgggcggttcccagcatggccccttcacaggcatcgcatgcggaaagtccatgatgagctccgtgagcctgatggggggccggggcggggtgcccctctacgaccggaaccacgtcacaggggcctcgtccagcagctcgtccagcacgaaggccacgctgtacccgccgatcctgaacccgccgccctccccggccacggacccctccctgtacaacatggacatgttctactcttcaaacattccggccactgcgagaccgtacaggccctacatcattcgaggaatggcgcccccgacgacgccctgcagcaccgacgtgtgtgacagcgactacagcgccagccgctggaaggccagcaagtactacctggatttgaactcggactcagacccctatccacccccacccacgccccacagccagtacctgtcggcggaggacagctgcccgccctcgcccgccaccgagaggagctacttccatctcttcccgccccctccgtccccctgcacggactcatcctgacctcggccgggccactctggcttctctgtgcccctgtaaatagttttaaatatgaacaaagaaaaaaatatattttatgatttaaaaaataaatataattgggattttaaaaacatgagaaatgtgaactgtgatggggtgggcagggctgggagaactttgtacagtggagaaatatttataaacttaattttgtaaaacagaactgccattc

SEQ ID NO: 332480 - DNA, 481 bp, Homo sapiens
  misc_feature (104)..(104): n is a, c, g, or t
  misc_feature (121)..(121): n is a, c, g, or t
tgaaagcgaatcatcagtagacgcacaagtcctgttatgacctgggttgtcgcttggcaaagtcagcatgtaataagacctttcttccatccgagcatcccctnccccatgtactttggtnagggctcagacccctatccacccccacccacgccccacagccagtacctgtcggcggaggacagctgcccgccctcgcccgccaccgagaggagctacttccatctcttcccgccccctccgtccccctgcacggactcatcctgacctcggccgggccactctggcttctctgtgcccctgtaaatagttttaaatatgaacaaagaaaaaaatatattttatgatttaaaaaataaatataattgggattttaaaaacatgagaaatgtgaactgtgatggggtgggcagggctgggagaactttgtacagtggagaaatatttataaacttaattttgtaaaacagaactgccattc

SEQ ID NO: 332481 - DNA, 599 bp, Homo sapiens
  misc_feature (536)..(536): n is a, c, g, or t
  misc_feature (540)..(540): n is a, c, g, or t
ccttcgtgcccacagtgaccccgtctgcaaatgtagttccttgccctactcgcactggggagcaggacgcagagccgtgcaactcacaggtgccaagctcaggactccctcctgggtctgcctgggctgggctgtgcttgttgcccctgtggcccacgcatgtgcaccttccacctgaaagccaggatcttcaggacgctccccgaggaggtcgttgtctggcacaatgatttgtctcttcctgaaaaggtgacagagttacactggagagagcagcatccaggtgcggcagggacaggcctggggctcgcgggcagggactctgtgtcctgccggggtcccacactgcacctgcttgtcagaggcactcagtcaatctttgctgatgaaggatgagaggacagaggacgtgatgcttgctgctgcattgcctgcagtcctgggaaccaacccgtgtgcggacaggaacggggggtgcagccacctgtgcttcttcacaccccacgctccgcgacgctggtcgctgactagtgcanccgngggaaatattcgcgtgagctcggtacccagcgctgcttgttttaaaccagcgtgttcat

SEQ ID NO: 332482 - DNA, 435 bp, Homo sapiens
cctagactcggcaccgttcggtctgacgcagtacagcgattatatctactggacagactggaatctgcacagcattgagcgggccgacaagactagcggcgtgtgctggtcaatgcctccctcgggtggcccaacggcctggccctggacctgcaggaggggaagctctactggggagacgccaagacagacaagatcgaggtgatcaatgttgatgggacgaagaggcggaccctcctggaggacaagctcccgcacattttcgggttcacgctgctgggggacttcatctactggactgactggcagcgccgcagcatcgagcgggtgcacaaggtcaaggccagccgggacgtcatcattgaccagctgcccgacctgatggggctcaaagctgtgaatgtggccaaggtcgtcggtgagtccggggggtcc

SEQ ID NO: 332483 - DNA, 401 bp, Homo sapiens
gagagcctctgagcacgtcagccatgtcgaaccgctcaggaagggcagcaagaatttggcttctgacctctgcctctcctactcgccatctgcactgggtgtggttgtgcccattttacagatgaggaggctggggcatcgaccagctgaatgccttgtcccaggtactgcgtaggcagagctggcagttgaaccccgtgtcctggttgtcgctgggggtgggctgcaccctgacttgtgaggccagtagcaaggtttgcacgtgacttcgtgaccgtcacccagctctgcagcacatcccgtgacccagctcatccaggccgcatgcaaacctgttgccaggcgagaaaccagtcaccgcacagctgtggttgcctgaaatgattaagctcattaatcac

SEQ ID NO: 332484 - DNA, 3769 bp, Homo sapiens
ccgagatcttgccactgcactccagcctgggcaacagagtgagacgctgtctcaaaatctcaaacaaacaaacaaacaaaaaacaaacaaacaaagcgtcatttatccagcacccctggggaaccatgctacctggtgttttatggtacctggcaaggtgcaggtgaagttgctgctcttgggcattgaacccgtcttgtttggggcagctcaggccccaggcagggtccgggttggctctcgttggtgtggccctggcccatccagacctatatttctgccgtcctgcaggtgatcaatgttgatgggacgaagaggcggaccctcctggaggacaagctcccgcacattttcgggttcacgctgctgggggacttcatctactggactgactggcagcgccgcagcatcgagcgggtgcacaaggtcaaggccagccgggacgtcatcattgaccagctgcccgacctgatggggctcaaagctgtgaatgtggccaaggtcgtcggaaccaacccgtgtgcggacaggaacggggggtgcagccacctgtgcttcttcacaccccacgcaacccggtgtggctgccccatcggcctggagctgctgagtgacatgaagacctgcatcgtgcctgaggccttcttggtcttcaccagcagagccgccatccacaggatctccctcgagaccaataacaacgacgtggccatcccgctcacgggcgtcaaggaggcctcagccctggactttgatgtgtccaacaaccacatctactggacagacgtcagcctgaagaccatcagccgcgccttcatgaacgggagctcggtggagcacgtggtggagtttggccttgactaccccgagggcatggccgttgactggatgggcaagaacctctactgggccgacactgggaccaacagaatcgaagtggcgcggctggacgggcagttccggcaagtcctcgtgtggagggacttggacaacccgaggtcgctggccctggatcccaccaagggctacatctactggaccgagtggggcggcaagccgaggatcgtgcgggccttcatggacgggaccaactgcatgacgctggtggacaaggtgggccgggccaacgacctcaccattgactacgctgaccagcgcctctactggaccgacctggacaccaacatgatcgagtcgtccaacatgctgggtcaggagcgggtcgtgattgccgacgatctcccgcacccgttcggtctgacgcagtacagcgattatatctactggacagactggaatctgcacagcattgagcgggccgacaagactagcggccggaaccgcaccctcatccagggccacctggacttcgtgatggacatcctggtgttccactcctcccgccaggatggcctcaatgactgtatgcacaacaacgggcagtgtgggcagctgtgccttgccatccccggcggccaccgctgcggctgcgcctcacactacaccctggaccccagcagccgcaactgcagcccgcccaccaccttcttgctgttcagccagaaatctgccatcagtcggatgatcccggacgaccagcacagcccggatctcatcctgcccctgcatggactgaggaacgtcaaagccatcgactatgacccactggacaagttcatctactgggtggatgggcgccagaacatcaagcgagccaaggacgacgggacccagccctttgttttgacctctctgagccaaggccaaaacccagacaggcagccccacgacctcagcatcgacatctacagccggacactgttctggacgtgcgaggccaccaataccatcaacgtccacaggctgagcggggaagccatgggggtggtgctgcgtggggaccgcgacaagcccagggccatcgtcgtcaacgcggagcgagggtacctgtacttcaccaacatgcaggaccgggcagccaagatcgaacgcgcagccctggacggcaccgagcgcgaggtcctcttcaccaccggcctcatccgccctgtggccctggtggtagacaacacactgggcaagctgttctgggtggacgcggacctgaagcgcattgagagctgtgacctgtcaggggccaaccgcctgaccctggaggacgccaacatcgtgcagcctctgggcctgaccatccttggcaagcatctctactggatcgaccgccagcagcagatgatcgagcgtgtggagaagaccaccggggacaagcggactcgcatccagggccgtgtcgcccacctcactggcatccatgcagtggaggaagtcagcctggaggagttctcagcccacccatgtgcccgtgacaatggtggctgctcccacatctgtattgccaagggtgatgggacaccacggtgctcatgcccagtccacctcgtgctcctgcagaacctgctgacctgtggagagccgcccacctgctccccggaccagtttgcatgtgccacaggggagatcgactgtatccccggggcctggcgctgtgacggctttcccgagtgcgatgaccagagcgacgaggagggctgccccgtgtgctccgccgcccagttcccctgcgcgcggggtcagtgtgtggacctgcgcctgcgctgcgacggcgaggcagactgtcaggaccgctcagacgaggcggactgtgacgccatctgcctgcccaaccagttccggtgtgcgagcggccagtgtgtcctcatcaaacagcagtgcgactccttccccgactgtatcgacggctccgacgagctcatgtgtgaaatcaccaagccgccctcagacgacagcccggcccacagcagtgccatcgggcccgtcattggcatcatcctctctctcttcgtcatgggtggtgtctattttgtgtgccagcgcgtggtgtgccagcgctatgcgggggccaacgggcccttcccgcacgagtatgtcagcgggaccccgcacgtgcccctcaatttcatagccccgggcggttcccagcatggccccttcacaggcatcgcatgcggaaagtccatgatgagctccgtgagcctgatggggggccggggcggggtgcccctctacgaccggaaccacgtcacaggggcctcgtccagcagctcgtccagcacgaaggccacgctgtacccgccgatcctgaacccgccgccctccccggccacggacccctccctgtacaacatggacatgttctactcttcaaacattccggccactgcgagaccgtacaggccctacatcattcgaggaatggcgcccccgacgacgccctgcagcaccgacgtgtgtgacagcgactacagcgccagccgctggaaggccagcaagtactacctggatttgaactcggactcagacccctatccacccccacccacgccccacagccagtacctgtcggcggaggacagctgcccgccctcgcccgccaccgagaggagctacttccatctcttcccgccccctccgtccccctgcacggactcatcctgacctcggccgggccactctggcttctctgtgcccctgtaaatagttttaaatatgaacaaagaaaaaaatatattttatgatttaaaaaataaatataattgggattttaaaaacatgagaaatgtgaactgtgatggggtgggcagggctgggagaactttgtacagtggagaaatatttataaacttaattttgtaaaacagaactgccattc

SEQ ID NO: 332485 - DNA, 3704 bp, Homo sapiens
ccttcgtgcccacagtgaccccgtctgcaaatgtagttccttgccctactcgcactggggagcaggacgcagagccgtgcaactcacaggtgccaagctcaggactccctcctgggtctgcctgggctgggctgtgcttgttgcccctgtggcccacgcatgtgcaccttccacctgaaagccaggatcttcaggacgctccccgaggaggtcgttgtctggcacaatgatttgtctcttcctgaaaaggtgacagagttacactggagagagcagcatccaggtgcggcagggacaggcctggggctcgcgggcagggactctgtgtcctgccggggtcccacactgcacctgcttgtcagaggcactcagtcaatctttgctgatgaaggatgagaggacagaggacgtgatgcttgctgctgcattgcctgcagtcctgggaaccaacccgtgtgcggacaggaacggggggtgcagccacctgtgcttcttcacaccccacgcaacccggtgtggctgccccatcggcctggagctgctgagtgacatgaagacctgcatcgtgcctgaggccttcttggtcttcaccagcagagccgccatccacaggatctccctcgagaccaataacaacgacgtggccatcccgctcacgggcgtcaaggaggcctcagccctggactttgatgtgtccaacaaccacatctactggacagacgtcagcctgaagaccatcagccgcgccttcatgaacgggagctcggtggagcacgtggtggagtttggccttgactaccccgagggcatggccgttgactggatgggcaagaacctctactgggccgacactgggaccaacagaatcgaagtggcgcggctggacgggcagttccggcaagtcctcgtgtggagggacttggacaacccgaggtcgctggccctggatcccaccaagggctacatctactggaccgagtggggcggcaagccgaggatcgtgcgggccttcatggacgggaccaactgcatgacgctggtggacaaggtgggccgggccaacgacctcaccattgactacgctgaccagcgcctctactggaccgacctggacaccaacatgatcgagtcgtccaacatgctgggtcaggagcgggtcgtgattgccgacgatctcccgcacccgttcggtctgacgcagtacagcgattatatctactggacagactggaatctgcacagcattgagcgggccgacaagactagcggccggaaccgcaccctcatccagggccacctggacttcgtgatggacatcctggtgttccactcctcccgccaggatggcctcaatgactgtatgcacaacaacgggcagtgtgggcagctgtgccttgccatccccggcggccaccgctgcggctgcgcctcacactacaccctggaccccagcagccgcaactgcagcccgcccaccaccttcttgctgttcagccagaaatctgccatcagtcggatgatcccggacgaccagcacagcccggatctcatcctgcccctgcatggactgaggaacgtcaaagccatcgactatgacccactggacaagttcatctactgggtggatgggcgccagaacatcaagcgagccaaggacgacgggacccagccctttgttttgacctctctgagccaaggccaaaacccagacaggcagccccacgacctcagcatcgacatctacagccggacactgttctggacgtgcgaggccaccaataccatcaacgtccacaggctgagcggggaagccatgggggtggtgctgcgtggggaccgcgacaagcccagggccatcgtcgtcaacgcggagcgagggtacctgtacttcaccaacatgcaggaccgggcagccaagatcgaacgcgcagccctggacggcaccgagcgcgaggtcctcttcaccaccggcctcatccgccctgtggccctggtggtagacaacacactgggcaagctgttctgggtggacgcggacctgaagcgcattgagagctgtgacctgtcaggggccaaccgcctgaccctggaggacgccaacatcgtgcagcctctgggcctgaccatccttggcaagcatctctactggatcgaccgccagcagcagatgatcgagcgtgtggagaagaccaccggggacaagcggactcgcatccagggccgtgtcgcccacctcactggcatccatgcagtggaggaagtcagcctggaggagttctcagcccacccatgtgcccgtgacaatggtggctgctcccacatctgtattgccaagggtgatgggacaccacggtgctcatgcccagtccacctcgtgctcctgcagaacctgctgacctgtggagagccgcccacctgctccccggaccagtttgcatgtgccacaggggagatcgactgtatccccggggcctggcgctgtgacggctttcccgagtgcgatgaccagagcgacgaggagggctgccccgtgtgctccgccgcccagttcccctgcgcgcggggtcagtgtgtggacctgcgcctgcgctgcgacggcgaggcagactgtcaggaccgctcagacgaggcggactgtgacgccatctgcctgcccaaccagttccggtgtgcgagcggccagtgtgtcctcatcaaacagcagtgcgactccttccccgactgtatcgacggctccgacgagctcatgtgtgaaatcaccaagccgccctcagacgacagcccggcccacagcagtgccatcgggcccgtcattggcatcatcctctctctcttcgtcatgggtggtgtctattttgtgtgccagcgcgtggtgtgccagcgctatgcgggggccaacgggcccttcccgcacgagtatgtcagcgggaccccgcacgtgcccctcaatttcatagccccgggcggttcccagcatggccccttcacaggcatcgcatgcggaaagtccatgatgagctccgtgagcctgatggggggccggggcggggtgcccctctacgaccggaaccacgtcacaggggcctcgtccagcagctcgtccagcacgaaggccacgctgtacccgccgatcctgaacccgccgccctccccggccacggacccctccctgtacaacatggacatgttctactcttcaaacattccggccactgcgagaccgtacaggccctacatcattcgaggaatggcgcccccgacgacgccctgcagcaccgacgtgtgtgacagcgactacagcgccagccgctggaaggccagcaagtactacctggatttgaactcggactcagacccctatccacccccacccacgccccacagccagtacctgtcggcggaggacagctgcccgccctcgcccgccaccgagaggagctacttccatctcttcccgccccctccgtccccctgcacggactcatcctgacctcggccgggccactctggcttctctgtgcccctgtaaatagttttaaatatgaacaaagaaaaaaatatattttatgatttaaaaaataaatataattgggattttaaaaacatgagaaatgtgaactgtgatggggtgggcagggctgggagaactttgtacagtggagaaatatttataaacttaattttgtaaaacagaactgccattc

SEQ ID NO: 332486 - DNA, 4628 bp, Homo sapiens
cgaggggggaggcggaggcgccgggagccgcgcgaggagccgccgccgccgcgccatggagcccgagtgagcgcggcgcgggcccgtccggccgccggacaacatggaggcagcgccgcccgggccgccgtggccgctgctgctgctgctgctgctgctgctggcgctgtgcggctgcccggcccccgccgcggcctcgccgctcctgctatttgccaaccgccgggacgtacggctggtggacgccggcggagtcaagctggagtccaccatcgtggtcagcggcctggaggatgcggccgcagtggacttccagttttccaagggagccgtgtactggacagacgtgagcgaggaggccatcaagcagacctacctgaaccagacgggggccgccgtgcagaacgtggtcatctccggcctggtctctcccgacggcctcgcctgcgactgggtgggcaagaagctgtactggacggactcagagaccaaccgcatcgaggtggccaacctcaatggcacatcccggaaggtgctcttctggcaggaccttgaccagccgagggccatcgccttggaccccgctcacgggtacatgtactggacagactggggtgagacgccccggattgagcgggcagggatggatggcagcacccggaagatcattgtggactcggacatttactggcccaatggactgaccatcgacctggaggagcagaagctctactgggctgacgccaagctcagcttcatccaccgtgccaacctggacggctcgttccggcagaaggtggtggagggcagcctgacgcaccccttcgccctgacgctctccggggacactctgtactggacagactggcagacccgctccatccatgcctgcaacaagcgcactggggggaagaggaaggagatcctgagtgccctctactcacccatggacatccaggtgctgagccaggagcggcagcctttcttccacactcgctgtgaggaggacaatggcggctgctcccacctgtgcctgctgtccccaagcgagcctttctacacatgcgcctgccccacgggtgtgcagctgcaggacaacggcaggacgtgtaaggcaggagccgaggaggtgctgctgctggcccggcggacggacctacggaggatctcgctggacacgccggacttcaccgacatcgtgctgcaggtggacgacatccggcacgccattgccatcgactacgacccgctagagggctatgtctactggacagatgacgaggtgcgggccatccgcagggcgtacctggacgggtctggggcgcagacgctggtcaacaccgagatcaacgaccccgatggcatcgcggtcgactgggtggcccgaaacctctactggaccgacacgggcacggaccgcatcgaggtgacgcgcctcaacggcacctcccgcaagatcctggtgtcggaggacctggacgagccccgagccatcgcactgcaccccgtgatgggcctcatgtactggacagactggggagagaaccctaaaatcgagtgtgccaacttggatgggcaggagcggcgtgtgctggtcaatgcctccctcgggtggcccaacggcctggccctggacctgcaggaggggaagctctactggggagacgccaagacagacaagatcgaggtgatcaatgttgatgggacgaagaggcggaccctcctggaggacaagctcccgcacattttcgggttcacgctgctgggggacttcatctactggactgactggcagcgccgcagcatcgagcgggtgcacaaggtcaaggccagccgggacgtcatcattgaccagctgcccgacctgatggggctcaaagctgtgaatgtggccaaggtcgtcggaaccaacccgtgtgcggacaggaacggggggtgcagccacctgtgcttcttcacaccccacgcaacccggtgtggctgccccatcggcctggagctgctgagtgacatgaagacctgcatcgtgcctgaggccttcttggtcttcaccagcagagccgccatccacaggatctccctcgagaccaataacaacgacgtggccatcccgctcacgggcgtcaaggaggcctcagccctggactttgatgtgtccaacaaccacatctactggacagacgtcagcctgaagaccatcagccgcgccttcatgaacgggagctcggtggagcacgtggtggagtttggccttgactaccccgagggcatggccgttgactggatgggcaagaacctctactgggccgacactgggaccaacagaatcgaagtggcgcggctggacgggcagttccggcaagtcctcgtgtggagggacttggacaacccgaggtcgctggccctggatcccaccaagggctacatctactggaccgagtggggcggcaagccgaggatcgtgcgggccttcatggacgggaccaactgcatgacgctggtggacaaggtgggccgggccaacgacctcaccattgactacgctgaccagcgcctctactggaccgacctggacaccaacatgatcgagtcgtccaacatgctgggtcaggagcgggtcgtgattgccgacgatctcccgcacccgttcggtctgacgcagtacagcgattatatctactggacagactggaatctgcacagcattgagcgggccgacaagactagcggccggaaccgcaccctcatccagggccacctggacttcgtgatggacatcctggtgttccactcctcccgccaggatggcctcaatgactgtatgcacaacaacgggcagtgtgggcagctgtgccttgccatccccggcggccaccgctgcggctgcgcctcacactacaccctggaccccagcagccgcaactgcagcccgcccaccaccttcttgctgttcagccagaaatctgccatcagtcggatgatcccggacgaccagcacagcccggatctcatcctgcccctgcatggactgaggaacgtcaaagccatcgactatgacccactggacaagttcatctactgggtggatgggcgccagaacatcaagcgagccaaggacgacgggacccagccctttgttttgacctctctgagccaaggccaaaacccagacaggcagccccacgacctcagcatcgacatctacagccggacactgttctggacgtgcgaggccaccaataccatcaacgtccacaggctgagcggggaagccatgggggtggtgctgcgtggggaccgcgacaagcccagggccatcgtcgtcaacgcggagcgagggtacctgtacttcaccaacatgcaggaccgggcagccaagatcgaacgcgcagccctggacggcaccgagcgcgaggtcctcttcaccaccggcctcatccgccctgtggccctggtggtagacaacacactgggcaagctgttctgggtggacgcggacctgaagcgcattgagagctgtgacctgtcaggggccaaccgcctgaccctggaggacgccaacatcgtgcagcctctgggcctgaccatccttggcaagcatctctactggatcgaccgccagcagcagatgatcgagcgtgtggagaagaccaccggggacaagcggactcgcatccagggccgtgtcgcccacctcactggcatccatgcagtggaggaagtcagcctggaggagttctcagcccacccatgtgcccgtgacaatggtggctgctcccacatctgtattgccaagggtgatgggacaccacggtgctcatgcccagtccacctcgtgctcctgcagaacctgctgacctgtggagagccgcccacctgctccccggaccagtttgcatgtgccacaggggagatcgactgtatccccggggcctggcgctgtgacggctttcccgagtgcgatgaccagagcgacgaggagggctgccccgtgtgctccgccgcccagttcccctgcgcgcggggtcagtgtgtggacctgcgcctgcgctgcgacggcgaggcagactgtcaggaccgctcagacgaggcggactgtgacgccatctgcctgcccaaccagttccggtgtgcgagcggccagtgtgtcctcatcaaacagcagtgcgactccttccccgactgtatcgacggctccgacgagctcatgtgtgaaatcaccaagccgccctcagacgacagcccggcccacagcagtgccatcgggcccgtcattggcatcatcctctctctcttcgtcatgggtggtgtctattttgtgtgccagcgcgtggtgtgccagcgctatgcgggggccaacgggcccttcccgcacgagtatgtcagcgggaccccgcacgtgcccctcaatttcatagccccgggcggttcccagcatggccccttcacaggcatcgcatgcggaaagtccatgatgagctccgtgagcctgatggggggccggggcggggtgcccctctacgaccggaaccacgtcacaggggcctcgtccagcagctcgtccagcacgaaggccacgctgtacccgccggtgaggggcggggccggggaggggcggggcgggatgg

SEQ ID NO: 332487 - DNA, 1421 bp, Homo sapiens
tgctgacctgtggactgggcatgagcaccgtggtgtcccatcacccttggcaatacagatgtgggagcagccaccattgtcacgggcacatgggtgggctgagaacctgctgacctgtggagagccgcccacctgctccccggaccagtttgcatgtgccacaggggagatcgactgtatccccggggcctggcgctgtgacggctttcccgagtgcgatgaccagagcgacgaggagggctgccccgtgtgctccgccgcccagttcccctgcgcgcggggtcagtgtgtggacctgcgcctgcgctgcgacggcgaggcagactgtcaggaccgctcagacgaggcggactgtgacgccatctgcctgcccaaccagttccggtgtgcgagcggccagtgtgtcctcatcaaacagcagtgcgactccttccccgactgtatcgacggctccgacgagctcatgtgtgaaatcaccaagccgccctcagacgacagcccggcccacagcagtgccatcgggcccgtcattggcatcatcctctctctcttcgtcatgggtggtgtctattttgtgtgccagcgcgtggtgtgccagcgctatgcgggggccaacgggcccttcccgcacgagtatgtcagcgggaccccgcacgtgcccctcaatttcatagccccgggcggttcccagcatggccccttcacaggcatcgcatgcggaaagtccatgatgagctccgtgagcctgatggggggccggggcggggtgcccctctacgaccggaaccacgtcacaggggcctcgtccagcagctcgtccagcacgaaggccacgctgtacccgccgatcctgaacccgccgccctccccggccacggacccctccctgtacaacatggacatgttctactcttcaaacattccggccactgcgagaccgtacaggccctacatcattcgaggaatggcgcccccgacgacgccctgcagcaccgacgtgtgtgacagcgactacagcgccagccgctggaaggccagcaagtactacctggatttgaactcggactcagacccctatccacccccacccacgccccacagccagtacctgtcggcggaggacagctgcccgccctcgcccgccaccgagaggagctacttccatctcttcccgccccctccgtccccctgcacggactcatcctgacctcggccgggccactctggcttctctgtgcccctgtaaatagttttaaatatgaacaaagaaaaaaatatattttatgatttaaaaaataaatataattgggattttaaaaacatgagaaatgtgaactgtgatggggtgggcagggctgggagaactttgtacagtggagaaatatttataaacttaattttgtaaaacagaactgccattc

SEQ ID NO: 332488 - DNA, 2843 bp, Homo sapiens
cgaggggggaggcggaggcgccgggagccgcgcgaggagccgccgccgccgcgccatggagcccgagtgagcgcggcgcgggcccgtccggccgccggacaacatggaggcagcgccgcccgggccgccgtggccgctgctgctgctgctgctgctgctgctggcgctgtgcggctgcccggcccccgccgcggcctcgccgctcctgctatttgccaaccgccgggacgtacggctggtggacgccggcggagtcaagctggagtccaccatcgtggtcagcggcctggaggatgcggccgcagtggacttccagttttccaagggagccgtgtactggacagacgtgagcgaggaggccatcaagcagacctacctgaaccagacgggggccgccgtgcagaacgtggtcatctccggcctggtctctcccgacggcctcgcctgcgactgggtgggcaagaagctgtactggacggactcagagaccaaccgcatcgaggtggccaacctcaatggcacatcccggaaggtgctcttctggcaggaccttgaccagccgagggccatcgccttggaccccgctcacgggtacatgtactggacagactggggtgagacgccccggattgagcgggcagggatggatggcagcacccggaagatcattgtggactcggacatttactggcccaatggactgaccatcgacctggaggagcagaagctctactgggctgacgccaagctcagcttcatccaccgtgccaacctggacggctcgttccggcagaaggtggtggagggcagcctgacgcaccccttcgccctgacgctctccggggacactctgtactggacagactggcagacccgctccatccatgcctgcaacaagcgcactggggggaagaggaaggagatcctgagtgccctctactcacccatggacatccaggtgctgagccaggagcggcagcctttcttccacactcgctgtgaggaggacaatggcggctgctcccacctgtgcctgctgtccccaagcgagcctttctacacatgcgcctgccccacgggtgtgcagctgcaggacaacggcaggacgtgtaaggcaggagccgaggaggtgctgctgctggcccggcggacggacctacggaggatctcgctggacacgccggacttcaccgacatcgtgctgcaggtggacgacatccggcacgccattgccatcgactacgacccgctagagggctatgtctactggacagatgacgaggtgcgggccatccgcagggcgtacctggacgggtctggggcgcagacgctggtcaacaccgagatcaacgaccccgatggcatcgcggtcgactgggtggcccgaaacctctactggaccgacacgggcacggaccgcatcgaggtgacgcgcctcaacggcacctcccgcaagatcctggtgtcggaggacctggacgagccccgagccatcgcactgcaccccgtgatgggcctcatgtactggacagactggggagagaaccctaaaatcgagtgtgccaacttggatgggcaggagcggcgtgtgctggtcaatgcctccctcgggtggcccaacggcctggccctggacctgcaggaggggaagctctactggggagacgccaagacagacaagatcgaggtgatcaatgttgatgggacgaagaggcggaccctcctggaggacaagctcccgcacattttcgggttcacgctgctgggggacttcatctactggactgactggcagcgccgcagcatcgagcgggtgcacaaggtcaaggccagccgggacgtcatcattgaccagctgcccgacctgatggggctcaaagctgtgaatgtggccaaggtcgtcggaaccaacccgtgtgcggacaggaacggggggtgcagccacctgtgcttcttcacaccccacgcaacccggtgtggctgccccatcggcctggagctgctgagtgacatgaagacctgcatcgtgcctgaggccttcttggtcttcaccagcagagccgccatccacaggatctccctcgagaccaataacaacgacgtggccatcccgctcacgggcgtcaaggaggcctcagccctggactttgatgtgtccaacaaccacatctactggacagacgtcagcctgaagaccatcagccgcgccttcatgaacgggagctcggtggagcacgtggtggagtttggccttgactaccccgagggcatggccgttgactggatgggcaagaacctctactgggccgacactgggaccaacagaatcgaagtggcgcggctggacgggcagttccggcaagtcctcgtgtggagggacttggacaacccgaggtcgctggccctggatcccaccaagggctacatctactggaccgagtggggcggcaagccgaggatcgtgcgggccttcatggacgggaccaactgcatgacgctggtggacaaggtgggccgggccaacgacctcaccattgactacgctgaccagcgcctctactggaccgacctggacaccaacatgatcgagtcgtccaacatgctgggtactgcgtaggcagagctggcagttgaaccccgtgtcctggttgtcgctgggggtgggctgcaccctgacttgtgaggccagtagcaaggtttgcacgtgacttcgtgaccgtcacccagctctgcagcacatcccgtgacccagctcatccaggccgcatgcaaacctgttgccaggcgagaaaccagtcaccgcacagctgtggttgcctgaaatgattaagctcattaatcac

SEQ ID NO: 332489 - DNA, 2351 bp, Homo sapiens
cgaggggggaggcggaggcgccgggagccgcgcgaggagccgccgccgccgcgccatggagcccgagtgagcgcggcgcgggcccgtccggccgccggacaacatggaggcagcgccgcccgggccgccgtggccgctgctgctgctgctgctgctgctgctggcgctgtgcggctgcccggcccccgccgcggcctcgccgctcctgctatttgccaaccgccgggacgtacggctggtggacgccggcggagtcaagctggagtccaccatcgtggtcagcggcctggaggatgcggccgcagtggacttccagttttccaagggagccgtgtactggacagacgtgagcgaggaggccatcaagcagacctacctgaaccagacgggggccgccgtgcagaacgtggtcatctccggcctggtctctcccgacggcctcgcctgcgactgggtgggcaagaagctgtactggacggactcagagaccaaccgcatcgaggtggccaacctcaatggcacatcccggaaggtgctcttctggcaggaccttgaccagccgagggccatcgccttggaccccgctcacgggtacatgtactggacagactggggtgagacgccccggattgagcgggcagggatggatggcagcacccggaagatcattgtggactcggacatttactggcccaatggactgaccatcgacctggaggagcagaagctctactgggctgacgccaagctcagcttcatccaccgtgccaacctggacggctcgttccggcagaaggtggtggagggcagcctgacgcaccccttcgccctgacgctctccggggacactctgtactggacagactggcagacccgctccatccatgcctgcaacaagcgcactggggggaagaggaaggagatcctgagtgccctctactcacccatggacatccaggtgctgagccaggagcggcagcctttcttccacactcgctgtgaggaggacaatggcggctgctcccacctgtgcctgctgtccccaagcgagcctttctacacatgcgcctgccccacgggtgtgcagctgcaggacaacggcaggacgtgtaaggcaggagccgaggaggtgctgctgctggcccggcggacggacctacggaggatctcgctggacacgccggacttcaccgacatcgtgctgcaggtggacgacatccggcacgccattgccatcgactacgacccgctagagggctatgtctactggacagatgacgaggtgcgggccatccgcagggcgtacctggacgggtctggggcgcagacgctggtcaacaccgagatcaacgaccccgatggcatcgcggtcgactgggtggcccgaaacctctactggaccgacacgggcacggaccgcatcgaggtgacgcgcctcaacggcacctcccgcaagatcctggtgtcggaggacctggacgagccccgagccatcgcactgcaccccgtgatgggcctcatgtactggacagactggggagagaaccctaaaatcgagtgtgccaacttggatgggcaggagcggcgtgtgctggtcaatgcctccctcgggtggcccaacggcctggccctggacctgcaggaggggaagctctactggggagacgccaagacagacaagatcgaggtgatcaatgttgatgggacgaagaggcggaccctcctggaggacaagctcccgcacattttcgggttcacgctgctgggggacttcatctactggactgactggcagcgccgcagcatcgagcgggtgcacaaggtcaaggccagccgggacgtcatcattgaccagctgcccgacctgatggggctcaaagctgtgaatgtggccaaggtcgtcggaaccaacccgtgtgcggacaggaacggggggtgcagccacctgtgcttcttcacaccccacgcaacccggtgtggctgccccatcggcctggagctgctgagtgacatgaagacctgcatcgtgcctgaggccttcttggtcttcaccagcagagccgccatccacaggatctccctcgagaccaataacaacgacgtggccatcccgctcacgggcgtcaaggaggcctcagccctggactttgatgtgtccaacaaccacatctactggacagacgtcagcctgaaggtagcgtgggccagaacgtgcacacaggcagcctttatgggaaaaccttgcctctgttcctgcctcaaaggcttcagacacttttcttaaagcactatcgtatttattgtaacgcagttcaagctaatcaaatatgagcaagcctatttaaaaaaaa

SEQ ID NO: 332490 - DNA, 900 bp, Homo sapiens
gacactgtttctagcaccttccaggcagaatctcatgtatccttcactttcgaaatgggtactatttcatccccacttttatcaatgagaaactaaagctcgaagaggtcaagtaagttcctggccaaggtcagctagcaggctctagaggcctcgttctccttagaggcagccttgccagggcccaggcttggcaggctgcagggcaggtgcgggcatgcccatggtagaggtgggaccattgaggctcagagagggtaagtgatgagccctggcgacacagcggggtgggtccagagtccggcctgcatcttctggagctggccagtggacaggcctttcccgttcacagccccggggctgctgtgcccaccagggcggatgtgcctaccgaatcccactcctctgtgtgtgtccctttcaggccctacatcattcgaggaatggcgcccccgacgacgccctgcagcaccgacgtgtgtgacagcgactacagcgccagccgctggaaggccagcaagtactacctggatttgaactcggactcagacccctatccacccccacccacgccccacagccagtacctgtcggcggaggacagctgcccgccctcgcccgccaccgagaggagctacttccatctcttcccgccccctccgtccccctgcacggactcatcctgacctcggccgggccactctggcttctctgtgcccctgtaaatagttttaaatatgaacaaagaaaaaaatatattttatgatttaaaaaataaatataattgggattttaaaaacatgagaaatgtgaactgtgatggggtgggcagggctgggagaactttgtacagtggagaaatatttataaacttaattttgtaaaacagaactgccattc

SEQ ID NO: 332491 - DNA, 470 bp, Homo sapiens
gagggcatggccgttgactggatgggcaagaacctctactgggccgacactgggaccaacagaatcgaagtggcgcggctggacgggcagttccggcaagtcctcgtgtggagggacttggacaacccgaggtcgctggccctggatcccaccaaggggtaagtgtttgcctgtcccgtgcgtccttgtgttcacctcgtatgagacagtgcgggggtgccaactgggcaaggtggcaggctgtccgtgtggccctcagtgattagagctgtactgatgtcattagccttgatggtggccaggactggtagggccctcagaggtcatggagttccttcgtggagcgggtgctgaggctgtatcaggcacagtgctggctgctttcacctgggccgtctcaccgaagtgtccatggagcctgcgtagggtgggtatctgtgtcgattttacagatgcagaaacaggctcag

SEQ ID NO: 332492 - DNA, 5060 bp, Homo sapiens
cgaggggggaggcggaggcgccgggagccgcgcgaggagccgccgccgccgcgccatggagcccgagtgagcgcggcgcgggcccgtccggccgccggacaacatggaggcagcgccgcccgggccgccgtggccgctgctgctgctgctgctgctgctgctggcgctgtgcggctgcccggcccccgccgcggcctcgccgctcctgctatttgccaaccgccgggacgtacggctggtggacgccggcggagtcaagctggagtccaccatcgtggtcagcggcctggaggatgcggccgcagtggacttccagttttccaagggagccgtgtactggacagacgtgagcgaggaggccatcaagcagacctacctgaaccagacgggggccgccgtgcagaacgtggtcatctccggcctggtctctcccgacggcctcgcctgcgactgggtgggcaagaagctgtactggacggactcagagaccaaccgcatcgaggtggccaacctcaatggcacatcccggaaggtgctcttctggcaggaccttgaccagccgagggccatcgccttggaccccgctcacgggtacatgtactggacagactggggtgagacgccccggattgagcgggcagggatggatggcagcacccggaagatcattgtggactcggacatttactggcccaatggactgaccatcgacctggaggagcagaagctctactgggctgacgccaagctcagcttcatccaccgtgccaacctggacggctcgttccggcagaaggtggtggagggcagcctgacgcaccccttcgccctgacgctctccggggacactctgtactggacagactggcagacccgctccatccatgcctgcaacaagcgcactggggggaagaggaaggagatcctgagtgccctctactcacccatggacatccaggtgctgagccaggagcggcagcctttcttccacactcgctgtgaggaggacaatggcggctgctcccacctgtgcctgctgtccccaagcgagcctttctacacatgcgcctgccccacgggtgtgcagctgcaggacaacggcaggacgtgtaaggcaggagccgaggaggtgctgctgctggcccggcggacggacctacggaggatctcgctggacacgccggacttcaccgacatcgtgctgcaggtggacgacatccggcacgccattgccatcgactacgacccgctagagggctatgtctactggacagatgacgaggtgcgggccatccgcagggcgtacctggacgggtctggggcgcagacgctggtcaacaccgagatcaacgaccccgatggcatcgcggtcgactgggtggcccgaaacctctactggaccgacacgggcacggaccgcatcgaggtgacgcgcctcaacggcacctcccgcaagatcctggtgtcggaggacctggacgagccccgagccatcgcactgcaccccgtgatgggcctcatgtactggacagactggggagagaaccctaaaatcgagtgtgccaacttggatgggcaggagcggcgtgtgctggtcaatgcctccctcgggtggcccaacggcctggccctggacctgcaggaggggaagctctactggggagacgccaagacagacaagatcgaggtgatcaatgttgatgggacgaagaggcggaccctcctggaggacaagctcccgcacattttcgggttcacgctgctgggggacttcatctactggactgactggcagcgccgcagcatcgagcgggtgcacaaggtcaaggccagccgggacgtcatcattgaccagctgcccgacctgatggggctcaaagctgtgaatgtggccaaggtcgtcggaaccaacccgtgtgcggacaggaacggggggtgcagccacctgtgcttcttcacaccccacgcaacccggtgtggctgccccatcggcctggagctgctgagtgacatgaagacctgcatcgtgcctgaggccttcttggtcttcaccagcagagccgccatccacaggatctccctcgagaccaataacaacgacgtggccatcccgctcacgggcgtcaaggaggcctcagccctggactttgatgtgtccaacaaccacatctactggacagacgtcagcctgaagaccatcagccgcgccttcatgaacgggagctcggtggagcacgtggtggagtttggccttgactaccccgagggcatggccgttgactggatgggcaagaacctctactgggccgacactgggaccaacagaatcgaagtggcgcggctggacgggcagttccggcaagtcctcgtgtggagggacttggacaacccgaggtcgctggccctggatcccaccaagggctacatctactggaccgagtggggcggcaagccgaggatcgtgcgggccttcatggacgggaccaactgcatgacgctggtggacaaggtgggccgggccaacgacctcaccattgactacgctgaccagcgcctctactggaccgacctggacaccaacatgatcgagtcgtccaacatgctgggtcaggagcgggtcgtgattgccgacgatctcccgcacccgttcggtctgacgcagtacagcgattatatctactggacagactggaatctgcacagcattgagcgggccgacaagactagcggccggaaccgcaccctcatccagggccacctggacttcgtgatggacatcctggtgttccactcctcccgccaggatggcctcaatgactgtatgcacaacaacgggcagtgtgggcagctgtgccttgccatccccggcggccaccgctgcggctgcgcctcacactacaccctggaccccagcagccgcaactgcagcccgcccaccaccttcttgctgttcagccagaaatctgccatcagtcggatgatcccggacgaccagcacagcccggatctcatcctgcccctgcatggactgaggaacgtcaaagccatcgactatgacccactggacaagttcatctactgggtggatgggcgccagaacatcaagcgagccaaggacgacgggacccagccctttgttttgacctctctgagccaaggccaaaacccagacaggcagccccacgacctcagcatcgacatctacagccggacactgttctggacgtgcgaggccaccaataccatcaacgtccacaggctgagcggggaagccatgggggtggtgctgcgtggggaccgcgacaagcccagggccatcgtcgtcaacgcggagcgagggtacctgtacttcaccaacatgcaggaccgggcagccaagatcgaacgcgcagccctggacggcaccgagcgcgaggtcctcttcaccaccggcctcatccgccctgtggccctggtggtagacaacacactgggcaagctgttctgggtggacgcggacctgaagcgcattgagagctgtgacctgtcaggggccaaccgcctgaccctggaggacgccaacatcgtgcagcctctgggcctgaccatccttggcaagcatctctactggatcgaccgccagcagcagatgatcgagcgtgtggagaagaccaccggggacaagcggactcgcatccagggccgtgtcgcccacctcactggcatccatgcagtggaggaagtcagcctggaggagttctcagcccacccatgtgcccgtgacaatggtggctgctcccacatctgtattgccaagggtgatgggacaccacggtgctcatgcccagtccacctcgtgctcctgcagaacctgctgacctgtggagagccgcccacctgctccccggaccagtttgcatgtgccacaggggagatcgactgtatccccggggcctggcgctgtgacggctttcccgagtgcgatgaccagagcgacgaggagggctgccccgtgtgctccgccgcccagttcccctgcgcgcggggtcagtgtgtggacctgcgcctgcgctgcgacggcgaggcagactgtcaggaccgctcagacgaggcggactgtgacgccatctgcctgcccaaccagttccggtgtgcgagcggccagtgtgtcctcatcaaacagcagtgcgactccttccccgactgtatcgacggctccgacgagctcatgtgtgaaatcaccaagccgccctcagacgacagcccggcccacagcagtgccatcgggcccgtcattggcatcatcctctctctcttcgtcatgggtggtgtctattttgtgtgccagcgcgtggtgtgccagcgctatgcgggggccaacgggcccttcccgcacgagtatgtcagcgggaccccgcacgtgcccctcaatttcatagccccgggcggttcccagcatggccccttcacaggcatcgcatgcggaaagtccatgatgagctccgtgagcctgatggggggccggggcggggtgcccctctacgaccggaaccacgtcacaggggcctcgtccagcagctcgtccagcacgaaggccacgctgtacccgccgatcctgaacccgccgccctccccggccacggacccctccctgtacaacatggacatgttctactcttcaaacattccggccactgcgagaccgtacaggccctacatcattcgaggaatggcgcccccgacgacgccctgcagcaccgacgtgtgtgacagcgactacagcgccagccgctggaaggccagcaagtactacctggatttgaactcggactcagacccctatccacccccacccacgccccacagccagtacctgtcggcggaggacagctgcccgccctcgcccgccaccgagaggagctacttccatctcttcccgccccctccgtccccctgcacggactcatcctgacctcggccgggccactctggcttctctgtgcccctgtaaatagttttaaatatgaacaaagaaaaaaatatattttatgatttaaaaaataaatataattgggatttta

SEQ ID NO: 332493 - DNA, 4386 bp, Homo sapiens
cgaggggggaggcggaggcgccgggagccgcgcgaggagccgccgccgccgcgccatggagcccgagtgagcgcggcgcgggcccgtccggccgccggacaacatggaggcagcgccgcccgggccgccgtggccgctgctgctgctgctgctgctgctgctggcgctgtgcggctgcccggcccccgccgcggcctcgccgctcctgctatttgccaaccgccgggacgtacggctggtggacgccggcggagtcaagctggagtccaccatcgtggtcagcggcctggaggatgcggccgcagtggacttccagttttccaagggagccgtgtactggacagacgtgagcgaggaggccatcaagcagacctacctgaaccagacgggggccgccgtgcagaacgtggtcatctccggcctggtctctcccgacggcctcgcctgcgactgggtgggcaagaagctgtactggacggactcagagaccaaccgcatcgaggtggccaacctcaatggcacatcccggaaggtgctcttctggcaggaccttgaccagccgagggccatcgccttggaccccgctcacgggtacatgtactggacagactggggtgagacgccccggattgagcgggcagggatggatggcagcacccggaagatcattgtggactcggacatttactggcccaatggactgaccatcgacctggaggagcagaagctctactgggctgacgccaagctcagcttcatccaccgtgccaacctggacggctcgttccggcagaaggtggtggagggcagcctgacgcaccccttcgccctgacgctctccggggacactctgtactggacagactggcagacccgctccatccatgcctgcaacaagcgcactggggggaagaggaaggagatcctgagtgccctctactcacccatggacatccaggtgctgagccaggagcggcagcctttcttccacactcgctgtgaggaggacaatggcggctgctcccacctgtgcctgctgtccccaagcgagcctttctacacatgcgcctgccccacgggtgtgcagctgcaggacaacggcaggacgtgtaaggcaggagccgaggaggtgctgctgctggcccggcggacggacctacggaggatctcgctggacacgccggacttcaccgacatcgtgctgcaggtggacgacatccggcacgccattgccatcgactacgacccgctagagggctatgtctactggacagatgacgaggtgcgggccatccgcagggcgtacctggacgggtctggggcgcagacgctggtcaacaccgagatcaacgaccccgatggcatcgcggtcgactgggtggcccgaaacctctactggaccgacacgggcacggaccgcatcgaggtgacgcgcctcaacggcacctcccgcaagatcctggtgtcggaggacctggacgagccccgagccatcgcactgcaccccgtgatgggcctcatgtactggacagactggggagagaaccctaaaatcgagtgtgccaacttggatgggcaggagcggcgtgtgctggtcaatgcctccctcgggtggcccaacggcctggccctggacctgcaggaggggaagctctactggggagacgccaagacagacaagatcgaggtgatcaatgttgatgggacgaagaggcggaccctcctggaggacaagctcccgcacattttcgggttcacgctgctgggggacttcatctactggactgactggcagcgccgcagcatcgagcgggtgcacaaggtcaaggccagccgggacgtcatcattgaccagctgcccgacctgatggggctcaaagctgtgaatgtggccaaggtcgtcggaaccaacccgtgtgcggacaggaacggggggtgcagccacctgtgcttcttcacaccccacgcaacccggtgtggctgccccatcggcctggagctgctgagtgacatgaagacctgcatcgtgcctgaggccttcttggtcttcaccagcagagccgccatccacaggatctccctcgagaccaataacaacgacgtggccatcccgctcacgggcgtcaaggaggcctcagccctggactttgatgtgtccaacaaccacatctactggacagacgtcagcctgaagaccatcagccgcgccttcatgaacgggagctcggtggagcacgtggtggagtttggccttgactaccccgagggcatggccgttgactggatgggcaagaacctctactgggccgacactgggaccaacagaatcgaagtggcgcggctggacgggcagttccggcaagtcctcgtgtggagggacttggacaacccgaggtcgctggccctggatcccaccaagggctacatctactggaccgagtggggcggcaagccgaggatcgtgcgggccttcatggacgggaccaactgcatgacgctggtggacaaggtgggccgggccaacgacctcaccattgactacgctgaccagcgcctctactggaccgacctggacaccaacatgatcgagtcgtccaacatgctgggtcaggagcgggtcgtgattgccgacgatctcccgcacccgttcggtctgacgcagtacagcgattatatctactggacagactggaatctgcacagcattgagcgggccgacaagactagcggccggaaccgcaccctcatccagggccacctggacttcgtgatggacatcctggtgttccactcctcccgccaggatggcctcaatgactgtatgcacaacaacgggcagtgtgggcagctgtgccttgccatccccggcggccaccgctgcggctgcgcctcacactacaccctggaccccagcagccgcaactgcagcccgcccaccaccttcttgctgttcagccagaaatctgccatcagtcggatgatcccggacgaccagcacagcccggatctcatcctgcccctgcatggactgaggaacgtcaaagccatcgactatgacccactggacaagttcatctactgggtggatgggcgccagaacatcaagcgagccaaggacgacgggacccagccctttgttttgacctctctgagccaaggccaaaacccagacaggcagccccacgacctcagcatcgacatctacagccggacactgttctggacgtgcgaggccaccaataccatcaacgtccacaggctgagcggggaagccatgggggtggtgctgcgtggggaccgcgacaagcccagggccatcgtcgtcaacgcggagcgagggtacctgtacttcaccaacatgcaggaccgggcagccaagatcgaacgcgcagccctggacggcaccgagcgcgaggtcctcttcaccaccggcctcatccgccctgtggccctggtggtagacaacacactgggcaagctgttctgggtggacgcggacctgaagcgcattgagagctgtgacctgtcaggggccaaccgcctgaccctggaggacgccaacatcgtgcagcctctgggcctgaccatccttggcaagcatctctactggatcgaccgccagcagcagatgatcgagcgtgtggagaagaccaccggggacaagcggactcgcatccagggccgtgtcgcccacctcactggcatccatgcagtggaggaagtcagcctggaggagttctcagcccacccatgtgcccgtgacaatggtggctgctcccacatctgtattgccaagggtgatgggacaccacggtgctcatgcccagtccacctcgtgctcctgcagaacctgctgacctgtggagagccgcccacctgctccccggaccagtttgcatgtgccacaggggagatcgactgtatccccggggcctggcgctgtgacggctttcccgagtgcgatgaccagagcgacgaggagggctgccccgtgtgctccgccgcccagttcccctgcgcgcggggtcagtgtgtggacctgcgcctgcgctgcgacggcgaggcagactgtcaggaccgctcagacgaggcggactgtgacgccatctgcctgcccaaccagttccggtgtgcgagcggccagtgtgtccccctgcacggactcatcctgacctcggccgggccactctggcttctctgtgcccctgtaaatagttttaaatatgaacaaagaaaaaaatatattttatgatttaaaaaataaatataattgggattttaaaaacatgagaaatgtgaactgtgatggggtgggcagggctgggagaactttgtacagtggagaaatatttataaacttaattttgtaaaacagaactgccattc

SEQ ID NO: 332494 - DNA, 4008 bp, Homo sapiens
cgaggggggaggcggaggcgccgggagccgcgcgaggagccgccgccgccgcgccatggagcccgagtgagcgcggcgcgggcccgtccggccgccggacaacatggaggcagcgccgcccgggccgccgtggccgctgctgctgctgctgctgctgctgctggcgctgtgcggctgcccggcccccgccgcggcctcgccgctcctgctatttgccaaccgccgggacgtacggctggtggacgccggcggagtcaagctggagtccaccatcgtggtcagcggcctggaggatgcggccgcagtggacttccagttttccaagggagccgtgtactggacagacgtgagcgaggaggccatcaagcagacctacctgaaccagacgggggccgccgtgcagaacgtggtcatctccggcctggtctctcccgacggcctcgcctgcgactgggtgggcaagaagctgtactggacggactcagagaccaaccgcatcgaggtggccaacctcaatggcacatcccggaaggtgctcttctggcaggaccttgaccagccgagggccatcgccttggaccccgctcacgggtacatgtactggacagactggggtgagacgccccggattgagcgggcagggatggatggcagcacccggaagatcattgtggactcggacatttactggcccaatggactgaccatcgacctggaggagcagaagctctactgggctgacgccaagctcagcttcatccaccgtgccaacctggacggctcgttccggcagaaggtggtggagggcagcctgacgcaccccttcgccctgacgctctccggggacactctgtactggacagactggcagacccgctccatccatgcctgcaacaagcgcactggggggaagaggaaggagatcctgagtgccctctactcacccatggacatccaggtgctgagccaggagcggcagcctttcttccacactcgctgtgaggaggacaatggcggctgctcccacctgtgcctgctgtccccaagcgagcctttctacacatgcgcctgccccacgggtgtgcagctgcaggacaacggcaggacgtgtaaggcaggagccgaggaggtgctgctgctggcccggcggacggacctacggaggatctcgctggacacgccggacttcaccgacatcgtgctgcaggtggacgacatccggcacgccattgccatcgactacgacccgctagagggctatgtctactggacagatgacgaggtgcgggccatccgcagggcgtacctggacgggtctggggcgcagacgctggtcaacaccgagatcaacgaccccgatggcatcgcggtcgactgggtggcccgaaacctctactggaccgacacgggcacggaccgcatcgaggtgacgcgcctcaacggcacctcccgcaagatcctggtgtcggaggacctggacgagccccgagccatcgcactgcaccccgtgatgggcctcatgtactggacagactggggagagaaccctaaaatcgagtgtgccaacttggatgggcaggagcggcgtgtgctggtcaatgcctccctcgggtggcccaacggcctggccctggacctgcaggaggggaagctctactggggagacgccaagacagacaagatcgaggtgatcaatgttgatgggacgaagaggcggaccctcctggaggacaagctcccgcacattttcgggttcacgctgctgggggacttcatctactggactgactggcagcgccgcagcatcgagcgggtgcacaaggtcaaggccagccgggacgtcatcattgaccagctgcccgacctgatggggctcaaagctgtgaatgtggccaaggtcgtcggaaccaacccgtgtgcggacaggaacggggggtgcagccacctgtgcttcttcacaccccacgcaacccggtgtggctgccccatcggcctggagctgctgagtgacatgaagacctgcatcgtgcctgaggccttcttggtcttcaccagcagagccgccatccacaggatctccctcgagaccaataacaacgacgtggccatcccgctcacgggcgtcaaggaggcctcagccctggactttgatgtgtccaacaaccacatctactggacagacgtcagcctgaagaccatcagccgcgccttcatgaacgggagctcggtggagcacgtggtggagtttggccttgactaccccgagggcatggccgttgactggatgggcaagaacctctactgggccgacactgggaccaacagaatcgaagtggcgcggctggacgggcagttccggcaagtcctcgtgtggagggacttggacaacccgaggtcgctggccctggatcccaccaagggctacatctactggaccgagtggggcggcaagccgaggatcgtgcgggccttcatggacgggaccaactgcatgacgctggtggacaaggtgggccgggccaacgacctcaccattgactacgctgaccagcgcctctactggaccgacctggacaccaacatgatcgagtcgtccaacatgctgggtcaggagcgggtcgtgattgccgacgatctcccgcacccgttcggtctgacgcagtacagcgattatatctactggacagactggaatctgcacagcattgagcgggccgacaagactagcggccggaaccgcaccctcatccagggccacctggacttcgtgatggacatcctggtgttccactcctcccgccaggatggcctcaatgactgtatgcacaacaacgggcagtgtgggcagctgtgccttgccatccccggcggccaccgctgcggctgcgcctcacactacaccctggaccccagcagccgcaactgcagcccgcccaccaccttcttgctgttcagccagaaatctgccatcagtcggatgatcccggacgaccagcacagcccggatctcatcctgcccctgcatggactgaggaacgtcaaagccatcgactatgacccactggacaagttcatctactgggtggatgggcgccagaacatcaagcgagccaaggacgacgggacccagccctttgttttgacctctctgagccaaggccaaaacccagacaggcagccccacgacctcagcatcgacatctacagccggacactgttctggacgtgcgaggccaccaataccatcaacgtccacaggctgagcggggaagccatgggggtggtgctgcgtggggaccgcgacaagcccagggccatcgtcgtcaacgcggagcgagggtacctgtacttcaccaacatgcaggaccgggcagccaagatcgaacgcgcagccctggacggcaccgagcgcgaggtcctcttcaccaccggcctcatccgccctgtggccctggtggtagacaacacactgggcaagctgttctgggtggacgcggacctgaagcgcattgagagctgtgacctgtcaggggccaaccgcctgaccctggaggacgccaacatcgtgcagcctctgggcctgaccatccttggcaagcatctctactggatcgaccgccagcagcagatgatcgagcgtgtggagaagaccaccggggacaagcggactcgcatccagggccgtgtcgcccacctcactggcatccatgcagtggaggaagtcagcctggaggagttctcagcccacccatgtgcccgtgacaatggtggctgctcccacatctgtattgccaagggtgatgggacaccacggtgctcatgcccagtccacccagaacagcttgcccagtgtgttgtctaccaccagggccacagggcggatgaggccggtggtgaagaggacctcgcgctcggtgccgtccagggctgcgcgttcgatcttggctgcccggtcctgcatgttggtgaagtacaggtaccctcgctccgcgttgacgacgatggccc

SEQ ID NO: 332495 - DNA, 3194 bp, Homo sapiens
cgaggggggaggcggaggcgccgggagccgcgcgaggagccgccgccgccgcgccatggagcccgagtgagcgcggcgcgggcccgtccggccgccggacaacatggaggcagcgccgcccgggccgccgtggccgctgctgctgctgctgctgctgctgctggcgctgtgcggctgcccggcccccgccgcggcctcgccgctcctgctatttgccaaccgccgggacgtacggctggtggacgccggcggagtcaagctggagtccaccatcgtggtcagcggcctggaggatgcggccgcagtggacttccagttttccaagggagccgtgtactggacagacgtgagcgaggaggccatcaagcagacctacctgaaccagacgggggccgccgtgcagaacgtggtcatctccggcctggtctctcccgacggcctcgcctgcgactgggtgggcaagaagctgtactggacggactcagagaccaaccgcatcgaggtggccaacctcaatggcacatcccggaaggtgctcttctggcaggaccttgaccagccgagggccatcgccttggaccccgctcacgggtacatgtactggacagactggggtgagacgccccggattgagcgggcagggatggatggcagcacccggaagatcattgtggactcggacatttactggcccaatggactgaccatcgacctggaggagcagaagctctactgggctgacgccaagctcagcttcatccaccgtgccaacctggacggctcgttccggcagaaggtggtggagggcagcctgacgcaccccttcgccctgacgctctccggggacactctgtactggacagactggcagacccgctccatccatgcctgcaacaagcgcactggggggaagaggaaggagatcctgagtgccctctactcacccatggacatccaggtgctgagccaggagcggcagcctttcttccacactcgctgtgaggaggacaatggcggctgctcccacctgtgcctgctgtccccaagcgagcctttctacacatgcgcctgccccacgggtgtgcagctgcaggacaacggcaggacgtgtaaggcaggagccgaggaggtgctgctgctggcccggcggacggacctacggaggatctcgctggacacgccggacttcaccgacatcgtgctgcaggtggacgacatccggcacgccattgccatcgactacgacccgctagagggctatgtctactggacagatgacgaggtgcgggccatccgcagggcgtacctggacgggtctggggcgcagacgctggtcaacaccgagatcaacgaccccgatggcatcgcggtcgactgggtggcccgaaacctctactggaccgacacgggcacggaccgcatcgaggtgacgcgcctcaacggcacctcccgcaagatcctggtgtcggaggacctggacgagccccgagccatcgcactgcaccccgtgatgggcctcatgtactggacagactggggagagaaccctaaaatcgagtgtgccaacttggatgggcaggagcggcgtgtgctggtcaatgcctccctcgggtggcccaacggcctggccctggacctgcaggaggggaagctctactggggagacgccaagacagacaagatcgaggtgatcaatgttgatgggacgaagaggcggaccctcctggaggacaagctcccgcacattttcgggttcacgctgctgggggacttcatctactggactgactggcagcgccgcagcatcgagcgggtgcacaaggtcaaggccagccgggacgtcatcattgaccagctgcccgacctgatggggctcaaagctgtgaatgtggccaaggtcgtcggaaccaacccgtgtgcggacaggaacggggggtgcagccacctgtgcttcttcacaccccacgcaacccggtgtggctgccccatcggcctggagctgctgagtgacatgaagacctgcatcgtgcctgaggccttcttggtcttcaccagcagagccgccatccacaggatctccctcgagaccaataacaacgacgtggccatcccgctcacgggcgtcaaggaggcctcagccctggactttgatgtgtccaacaaccacatctactggacagacgtcagcctgaagaccatcagccgcgccttcatgaacgggagctcggtggagcacgtggtggagtttggccttgactaccccgagggcatggccgttgactggatgggcaagaacctctactgggccgacactgggaccaacagaatcgaagtggcgcggctggacgggcagttccggcaagtcctcgtgtggagggacttggacaacccgaggtcgctggccctggatcccaccaagggctacatctactggaccgagtggggcggcaagccgaggatcgtgcgggccttcatggacgggaccaactgcatgacgctggtggacaaggtgggccgggccaacgacctcaccattgactacgctgaccagcgcctctactggaccgacctggacaccaacatgatcgagtcgtccaacatgctgggtgagggccgggctggggccttctggtcatggagggcggggcagccgggcgttggccacctcccagcctcgccgcacgtaccctgtggcctgcaagttccccaacctggcaggagctgtggccacacccacgactgcccagcagcctcaccctctgctgtgggagttgtccccgtccacccctgggtgcctttgctgcagttatgtcgggagaggctctggtgacagctgtttcctgtgcacctgctgggcactaggtcccagctaatccctgtgccaggactctaatttcaccctaacacacatggtggttttcattgctggggaagctgaggcctgagcacatgacttgccttaggtcacatagctggtgagttcaggatcccccagagataccagggccagcactcgatccccacccagccctgaaccccaccatgtgctgggattgtgctgggagtgtccacacgcctgggaccccagggctggtgctctcatctcctttttccagatcatgagaatgaggctcagggaagtttgaaaaaaacctatcccaagtcacacagcaacaggagcaggatttgaaccc

SEQ ID NO: 332496 - DNA, 2372 bp, Homo sapiens
cgaggggggaggcggaggcgccgggagccgcgcgaggagccgccgccgccgcgccatggagcccgagtgagcgcggcgcgggcccgtccggccgccggacaacatggaggcagcgccgcccgggccgccgtggccgctgctgctgctgctgctgctgctgctggcgctgtgcggctgcccggcccccgccgcggcctcgccgctcctgctatttgccaaccgccgggacgtacggctggtggacgccggcggagtcaagctggagtccaccatcgtggtcagcggcctggaggatgcggccgcagtggacttccagttttccaagggagccgtgtactggacagacgtgagcgaggaggccatcaagcagacctacctgaaccagacgggggccgccgtgcagaacgtggtcatctccggcctggtctctcccgacggcctcgcctgcgactgggtgggcaagaagctgtactggacggactcagagaccaaccgcatcgaggtggccaacctcaatggcacatcccggaaggtgctcttctggcaggaccttgaccagccgagggccatcgccttggaccccgctcacgggtacatgtactggacagactggggtgagacgccccggattgagcgggcagggatggatggcagcacccggaagatcattgtggactcggacatttactggcccaatggactgaccatcgacctggaggagcagaagctctactgggctgacgccaagctcagcttcatccaccgtgccaacctggacggctcgttccggcagaaggtggtggagggcagcctgacgcaccccttcgccctgacgctctccggggacactctgtactggacagactggcagacccgctccatccatgcctgcaacaagcgcactggggggaagaggaaggagatcctgagtgccctctactcacccatggacatccaggtgctgagccaggagcggcagcctttcttccacactcgctgtgaggaggacaatggcggctgctcccacctgtgcctgctgtccccaagcgagcctttctacacatgcgcctgccccacgggtgtgcagctgcaggacaacggcaggacgtgtaaggcaggagccgaggaggtgctgctgctggcccggcggacggacctacggaggatctcgctggacacgccggacttcaccgacatcgtgctgcaggtggacgacatccggcacgccattgccatcgactacgacccgctagagggctatgtctactggacagatgacgaggtgcgggccatccgcagggcgtacctggacgggtctggggcgcagacgctggtcaacaccgagatcaacgaccccgatggcatcgcggtcgactgggtggcccgaaacctctactggaccgacacgggcacggaccgcatcgaggtgacgcgcctcaacggcacctcccgcaagatcctggtgtcggaggacctggacgagccccgagccatcgcactgcaccccgtgatgggcctcatgtactggacagactggggagagaaccctaaaatcgagtgtgccaacttggatgggcaggagcggcgtgtgctggtcaatgcctccctcgggtggcccaacggcctggccctggacctgcaggaggggaagctctactggggagacgccaagacagacaagatcgaggtgatcaatgttgatgggacgaagaggcggaccctcctggaggacaagctcccgcacattttcgggttcacgctgctgggggacttcatctactggactgactggcagcgccgcagcatcgagcgggtgcacaaggtcaaggccagccgggacgtcatcattgaccagctgcccgacctgatggggctcaaagctgtgaatgtggccaaggtcgtcggaaccaacccgtgtgcggacaggaacggggggtgcagccacctgtgcttcttcacaccccacgcaacccggtgtggctgccccatcggcctggagctgctgagtgacatgaagacctgcatcgtgcctgaggccttcttggtcttcaccagcagagccgccatccacaggatctccctcgagaccaataacaacgacgtggccatcccgctcacgggcgtcaaggaggcctcagccctggactttgatgtgtccaacaaccacatctactggacagacgtcagcctgaagaccatcagccgcgccttcatgaacgggagctcggtggagcacgtggtggagtttggccttgactaccccgagggcatggccgttgactggatgggcaagaacctctactgggccggagacgccaagacagacaagatcgaggtgatcaatgttgatgggacgcagaggcggaccctcc

SEQ ID NO: 332497 - DNA, 857 bp, Homo sapiens
cgaggggggaggcggaggcgccgggagccgcgcgaggagccgccgccgccgcgccatggagcccgagtgagcgcggcgcgggcccgtccggccgccggacaacatggaggcagcgccgcccgggccgccgtggccgctgctgctgctgctgctgctgctgctggcgctgtgcggctgcccggcccccgccgcggcctcgccgctcctgctatttgccaaccgccgggacgtacggctggtggacgccggcggagtcaagctggagtccaccatcgtggtcagcggcctggaggatgcggccgcagtggacttccagttttccaagggagccgtgtactggacagacgtgagcgaggaggccatcaagcagacctacctgaaccagacgatcctgaacccgccgccctccccggccacggacccctccctgtacaacatggacatgttctactcttcaaacattccggccactgcgagaccgtacaggccctacatcattcgaggaatggcgcccccgacgacgccctgcagcaccgacgtgtgtgacagcgactacagcgccagccgctggaaggccagcaagtactacctggatttgaactcggactcagacccctatccacccccacccacgccccacagccagtacctgtcggcggaggacagctgcccgccctcgcccgccaccgagaggagctacttccatctcttcccgccccctccgtccccctgcacggactcatcctgacctcggccgggccactctggcttctctgtgcccctgtaaatagttttaaatatgaacaaagaaaaaaatatattttatgatttaaaaaataaatataattgggatttta

SEQ ID NO: 332498 - DNA, 116 bp, Homo sapiens
ctccgccagtgctcaggagtcttggtttctttgtcttacagccctttgttttgacctctctgagccaaggccaaaacccagacaggcagccccacgacctcagcatcgacatctac

SEQ ID NO: 332499 - DNA, 353 bp, Homo sapiens
aacaacagtggtcagcagcaggtgggaagcccatcgggccagagcacaggtgagacacaggtttgtgtatagatactggctagggtgatctgttcatggacttacaggtgaatacatggaatgcaaggcatcaagggcacgaagaaagtaacagaaggcctaggatggacagacgggagacaggagtctgcggggagtgagggtcagaggactgaatgatgcagctcaccagtaaccaaaagcggggcagggaaacagactgaacagagaagcaagaggccaggctcctcggggtaagtttattcgcctctgtgacagcagctcgcccctgagttgcagctcgcccctgagtt

SEQ ID NO: 332500 - DNA, 835 bp, Homo sapiens
aacaacagtggtcagcagcaggtgggaagcccatcgggccagagcacaggtgagacacaggtttgtgtatagatactggctagggtgatctgttcatggacttacaggtgaatacatggaatgcaaggcatcaagggcacgaagaaagtaacagaaggcctaggatggacagacgggagacaggagtctgcggggagtgagggtcagaggactgaatgatgcagctcaccagtaaccaaaagcggggcagggaaacagactgaacagagaagcaagaggccaggctcctcggggtaagtttattcgcctctgtgacacatgtagacgacctgtcccttcctgaccttttctttttggagatggagtcttgctctgtcgcccacgctgagtgcagtggcacaagcttggctcacggcaacctgtgcctcccaggttcaagtgactctcaagtgactaccagcgcccgccaccatgcccaactaatttttgcatttttaatagagatggggtttcaccatattggtcaggctggtcttgaactactaacttcaggtgatccacctgcctcagcctcccgaagtgctgggattacaggcatgggccgccgcgtctggcccttcctgaacttttgtactcaatttgccatagaatcacttcatcctaactgcgcaggagccttgaaaggtcacaaggtctgagcatccacctgctgctttgtcattcatctcatgctaatcctcctccacctgcatctaaactaaacatggaacagactgctcagtgactgggttttccatgactccagacagtgtcattctatcctaaccttccaaat

SEQ ID NO: 332501 - DNA, 3356 bp, Homo sapiens
gtggcggcgctggagtcggcgcgggtgctggcgccatggaggccgagcggggtcccgagcgccggcctgcggagcgtagcagcccgggccagacgccggaggagggcgcgcaggccttggccgagttcgcggcgctgcacggcccggcgctgcgcgcttcgggggtccccgaacgttactggggccgcctcctgcacaagctggagcacgaggttttcgacgctggggaagtgtttgggatcatgcaagtggaggaggtagaagaggaggaggacgaggcagcccgggaggtgcggaagcagcagcccaacccggggaacgagctgtgctacaaggtcatcgtgaccagggagagcgggctccaggcagcccaccccaacagcatcttcctcatcgaccacgcctggacgtgccgtgtggagcacgcgcgccagcagctgcagcaggtgcccgggctgctgcaccgcatggccaacctgatgggcattgagttccacggtgagctgcccagtacagaggctgtggccctggtgctggaggagatgtggaagttcaaccagacctaccagctggcccatgggacagctgaggagaagatgccggtgtggtatatcatggacgagttcggttcgcggatccagcacgcggacgtgcccagcttcgccacggcacccttcttctacatgccgcagcaggtggcctacacgctgctgtggcccctgagggacctggacactggcgaggaggtgacccgagactttgcctacggagagacggaccccctgatccggaagtgcatgctgctgccctgggcccccaccgacatgctggacctcagctcttgcacacccgagccgcccgccgagcactaccaggccattctggaggaaaacaaggagaagctgccacttgacatcaaccccgtggtgcacccccacggccacatcttcaaggtctacacggacgtgcagcaggtggccagcagcctcacccacccgcgcttcaccctcacccagagtgaggcggacgccgacatcctcttcaacttctcacacttcaaggactacaggaaactcagccaggagaggccaggcgtgctgctgaaccagttcccctgcgagaacctgctgactgtcaaggactgcctggcctccatcgcgcgccgggcaggtggccccgagggcccaccctggctgccccgaaccttcaacctgcgcactgagctgccccagtttgtcagctacttccagcagcgggaaaggtggggcgaggacaaccactggatctgcaagccctggaacctggcgcgcagcctggacacccacgtcaccaagagcctgcacagcatcatccggcaccgagagagcacccccaaggttgtgtccaagtacatcgaaagtcccgtgttgttccttcgagaagacgtgggaaaggtcaagttcgacatccgctacatcgtgctgctgcggtcagtgaggcccctacggttgttcgtgtatgatgtgttctggctgcggttctccaaccgggcctttgcactcaacgacctggatgactacgagaagcacttcacggtcatgaactatgacccggatgtggtgctgaagcaggtgcactgtgaagagttcatccccgagtttgagaagcaatacccagaatttccctggacggacgtccaggctgagatcttccgggccttcacggagctgttccaggtggcctgtgccaagccaccacccctgggcctctgcgactacccctcatcccgggccatgtatgccgtcgacctcatgctgaagtgggacaacggcccagatggaaggcgggtgatgcagccgcagatcctggaggtgaacttcaaccccgactgtgagcgagcctgcaggtaccaccccaccttcttcaacgacgtcttcagcaccttgtttctggaccagcccggtggctgccacgttacctgccttgtctaggcactcgctgtccccaaaacctgtgcttggggcaggattccaacctcagttctctgagctgcttctgcaaaggcccccatgtccctccccacaccggccctgggcatagcctcagccccaggcctctgtcctgccgagccatcctcccggcgccacactccgggagcacagcatcctcctctcacctgtgggtcagagcaggacagtgatggtgtccccagggctgagcaccaccccacgccctgccctcacccctcaccaccatctgtgcactgatgagtctccagtttagccaagggcttcgttcctggcatggagaatttgttcctggctgctgtgtttccagggggtgctgggggaagggttccgtggagcgagacaaggtgtcctcgggagcagggttccaccgggaagcgtttgggagccctgtatcacacggggcaggcgggtttctcttccggggtctctgctcttatgcatcaggacgaccccgggacggctgtggggccccacactgcacccacagggctctatgcgacaggggcccaggaacagcctgaggccaccacccagcaagcccgccttatcacccattccagctcacccagaaccttcaccagcaaacctcctgctgaggtcctggcaggaggccaccgtcttgttaccgtttccttttcgtttgctgagggtcacagaccccaacagggaaatcagtatctgtcttcccagtggttgccctgctcgccgggcactccacggggtcccgcccttgtgtgagatgggccaggatccttcggcaaggggcgcctggggctggggctgattgtgggcggtggagcgccagacagaaaaggattccaatgagaacttcaggttaaagtcagatgccacctaccagggtctacagtcaaaatgttggctttttcttattttttaatgtatgggagaaaaatgtaaaattccagttcttttctaattgtgtttctgaaattaggagtcagctgccagcgtttttgtgtggctgcagtgtgcctgggcccagctcacgggcagtgggtggacctaactgcccaggcaggcgagagctacttccagagccttccagtgcatgggagggcagggctaggtgtagcggtgtctcctctttgaaattaagaactatctttcttgtagcaaagctgcacatgatgatgctgcctctcctctctgtgttgtctgggcccttgtttacaagcacgcgttacccttcctgaggggagccatgctctagcccctggagggcctgttgcaggggcagggcgggcccgttgcctttggcagctcctggagagctgtggacatgcagtccccctcagttcgtgctgcaataaaggccatcttctctta

SEQ ID NO: 332502 - DNA, 3511 bp, Homo sapiens
gtggcggcgctggagtcggcgcgggtgctggcgccatggaggccgagcggggtcccgagcgccggcctgcggagcgtagcagcccgggccagacgccggaggagggcgcgcaggccttggccgagttcgcggcgctgcacggcccggcgctgcgcgcttcgggggtccccgaacgttactggggccgcctcctgcacaagctggagcacgaggttttcgacgctggggaagtgtttgggatcatgcaagtggaggaggtagaagaggaggaggacgaggcagcccgggaggtgcggaagcagcagcccaacccggggaacgagctgtgctacaaggtcatcgtgaccagggagagcgggctccaggcagcccaccccaacagcatcttcctcatcgaccacgcctggacgtgccgtgtggagcacgcgcgccagcagctgcagcaggtgcccgggctgctgcaccgcatggccaacctgatgggcattgagttccacggtgagctgcccagtacagaggctgtggccctggtgctggaggagatgtggaagttcaaccagacctaccagctggcccatgggacagctgaggagaagatgccggtgtggtatatcatggacgagttcggttcgcggatccagcacgcggacgtgcccagcttcgccacggcacccttcttctacatgccgcagcaggtggcctacacgctgctgtggcccctgagggacctggacactggcgaggaggtgacccgagactttgcctacggagagacggaccccctgatccggaagtgcatgctgctgccctgggcccccaccgacatgctggacctcagctcttgcacacccgagccgcccgccgagcactaccaggccattctggaggaaaacaaggagaagctgccacttgacatcaaccccgtggtgcacccccacggccacatcttcaaggtctacacggacgtgcagcaggtggccagcagcctcacccacccgcgcttcaccctcacccagagtgaggcggacgccgacatcctcttcaacttctcacacttcaaggactacaggaaactcagccaggagaggccaggcgtgctgctgaaccagttcccctgcgagaacctgctgactgtcaaggactgcctggcctccatcgcgcgccgggcaggtggccccgagggcccaccctggctgccccgaaccttcaacctgcgcactgagctgccccagtttgtcagctacttccagcagcgggaaaggtggggcgaggacaaccactggatctgcaagccctggaacctggcgcgcagcctggacacccacgtcaccaagagcctgcacagcatcatccggcaccgagagagcacccccaaggttgtgtccaagtacatcgaaagtcccgtgttgttccttcgagaagacgtgggaaaggtcaagttcgacatccgctacatcgtgctgctgcggtcagtgaggcccctacggttgttcgtgtatgatgtgttctggctgcggttctccaaccgggcctttgcactcaacgacctggatgactacgagaagcacttcacggtcatgaactatgacccggatgtggtgctgaagcaggtgcactgtgaagagttcatccccgagtttgagaagcaatacccagaatttccctggacggacgtccaggctgagatcttccgggccttcacggagctgttccaggtggcctgtgccaagccaccacccctgggcctctgcgactacccctcatcccgggccatgtatgccgtcgacctcatgctgaagtgggacaacggcccagatggaaggcgggtgatgcagccgcagatcctggaggtgaacttcaaccccgactgtgagcgagcctgcaggtaccaccccaccttcttcaacgacgtcttcagcaccttgtttctggaccagcccggtggctgccacgttacctgccttgtctaggcactcgctgtccccaaaacctgtgcttggggcaggattccaacctcagttctctgagctgcttctgcaaaggcccccatgtccctccccacaccggccctgggcatagcctcagccccaggcctctgtcctgccgagccatcctcccggcgccacactccgggagcacagcatcctcctctcacctgtgggtcagagcaggacagtgatggtgtccccagggctgagcaccaccccacgccctgccctcacccctcaccaccatctgtgcactgatgagtctccagtttagccaagggcttcgttcctggcatggagaatttgttcctggctgctgtgtttccagggggtgctgggggaagggttccgtggagcgagacaaggtgtcctcgggagcagggttccaccgggaagcgtttgggagccctgtatcacacggggcaggcgggtttctcttccggggtctctgctcttatgcatcaggacgaccccgggacggctgtggggccccacactgcacccacagggctctatgcgacaggggcccaggaacagcctgaggccaccacccagcaagcccgccttatcacccattccagctcacccagaaccttcaccagcaaacctcctgctgaggtcctggcaggaggccaccgtcttgttaccgtttccttttcgtttgctgagggtcacagaccccaacagggaaatcagtatctgtcttcccagtggttgccctgctcgccgggcactccacggggtcccgcccttgtgtgagatgggccaggatccttcggcaaggggcgcctggggctggggctgattgtgggcggtggagcgccagacagaaaaggattccaatgagaacttcaggttaaagtcagatgccacctaccagggtctacagtcaaaatgttggctttttcttattttttaatgtatgggagaaaaatgtaaaattccagttcttttctaattgtgtttctgaaattaggagtcagctgccagcgtttttgtgtggctgcagtgtgcctgggcccagctcacgggcagtgggtggacctaactgcccaggcaggcgagagctacttccagagccttccagtgcatgggagggcagggctaggtgtagcggtgtctcctctttgaaattaagaactatctttcttgtagcaaagctgcacatgatgatgctgcctctcctctctgtgttgtctgggcccttgtttacaagcacgcgttacccttcctgaggggagccatgctctagcccctggagggcctgttgcaggggcagggcgggcccgttgcctttggcagctcctggagagctgtggacatgcagtccccctcagttcgtgctgcaataaaggccatcttctcttaaaaaaaaaaaaaaaaaaaattttgggggccggcgccaaaagttttaacccttggggggggccagtggaaggcaggcccagagaagcggggagggggggttccccaaaaaaccggggcgggttgaacccggggtgggtggttaaaaggcggctacg

SEQ ID NO: 332503 - DNA, 3744 bp, Homo sapiens
gtggcggcgctggagtcggcgcgggtgctggcgccatggaggccgagcggggtcccgagcgccggcctgcggagcgtagcagcccgggccagacgccggaggagggcgcgcaggccttggccgagttcgcggcgctgcacggcccggcgctgcgcgcttcgggggtccccgaacgttactggggccgcctcctgcacaagctggagcacgaggttttcgacgctggggaagtgtttgggatcatgcaagtggaggaggtagaagaggaggaggacgaggcagcccgggaggtgcggaagcagcagcccaacccggggaacgagctgtgctacaaggtcatcgtgaccagggagagcgggctccaggcagcccaccccaacagcatcttcctcatcgaccacgcctggacgtgccgtgtggagcacgcgcgccagcagctgcagcaggtgcccgggctgctgcaccgcatggccaacctgatgggcattgagttccacggtgagctgcccagtacagaggctgtggccctggtgctggaggagatgtggaagttcaaccagacctaccagctggcccatgggacagctgaggagaagatgccggtgtggtatatcatggacgagttcggttcgcggatccagcacgcggacgtgcccagcttcgccacggcacccttcttctacatgccgcagcaggtggcctacacgctgctgtggcccctgagggacctggacactggcgaggaggtgacccgagactttgcctacggagagacggaccccctgatccggaagtgcatgctgctgccctgggcccccaccgacatgctggacctcagctcttgcacacccgagccgcccgccgagcactaccaggccattctggaggaaaacaaggagaagctgccacttgacatcaaccccgtggtgcacccccacggccacatcttcaaggtctacacggacgtgcagcaggtggccagcagcctcacccacccgcgcttcaccctcacccagagtgaggcggacgccgacatcctcttcaacttctcacacttcaaggactacaggaaactcagccaggagaggccaggcgtgctgctgaaccagttcccctgcgagaacctgctgactgtcaaggactgcctggcctccatcgcgcgccgggcaggtggccccgagggcccaccctggctgccccgaaccttcaacctgcgcactgagctgccccagtttgtcagctacttccagcagcgggaaaggtggggcgaggacaaccactggatctgcaagccctggaacctggcgcgcagcctggacacccacgtcaccaagagcctgcacagcatcatccggcaccgagagagcacccccaaggttgtgtccaagtacatcgaaagtcccgtgttgttccttcgagaagacgtgggaaaggtcaagttcgacatccgctacatcgtgctgctgcggtcagtgaggcccctacggttgttcgtgtatgatgtgttctggctgcggttctccaaccgggcctttgcactcaacgacctggatgactacgagaagcacttcacggtcatgaactatgacccggatgtggtgctgaagcaggtgcactgtgaagagttcatccccgagtttgagaagcaatacccagaatttccctggacggacgtccaggctgagatcttccgggccttcacggagctgttccaggtggcctgtgccaagccaccacccctgggcctctgcgactacccctcatcccgggccatgtatgccgtcgacctcatgctgaagtgggacaacggcccagatggaaggcgggtgatgcagccgcagatcctggaggtgaacttcaaccccgactgtgagcgagcctgcaggtaccaccccaccttcttcaacgacgtcttcagcaccttgtttctggaccagcccggtggctgccacgttacctgccttgtctaggcactcgctgtccccaaaacctgtgcttggggcaggattccaacctcagttctctgagctgcttctgcaaaggcccccatgtccctccccacaccggccctgggcatagcctcagccccaggcctctgtcctgccgagccatcctcccggcgccacactccgggagcacagcatcctcctctcacctgtgggtcagagcaggacagtgatggtgtccccagggctgagcaccaccccacgccctgccctcacccctcaccaccatctgtgcactgatgagtctccagtttagccaagggcttcgttcctggcatggagaatttgttcctggctgctgtgtttccagggggtgctgggggaagggttccgtggagcgagacaaggtgtcctcgggagcagggttccaccgggaagcgtttgggagccctgtatcacacggggcaggcgggtttctcttccggggtctctgctcttatgcatcaggacgaccccgggacggctgtggggccccacactgcacccacagggctctatgcgacaggggcccaggaacagcctgaggccaccacccagcaagcccgccttatcacccattccagctcacccagaaccttcaccagcaaacctcctgctgaggtcctggcaggaggccaccgtcttgttaccgtttccttttcgtttgctgagggtcacagaccccaacagggaaatcagtatctgtcttcccagtggttgccctgctcgccgggcactccacggggtcccgcccttgtgtgagatgggccaggatccttcggcaaggggcgcctggggctggggctgattgtgggcggtggagcgccagacagaaaaggattccaatgagaacttcaggttaaagtcagatgccacctaccagggtctacagtcaaaatgttggctttttcttattttttaatgtatgggagaaaaatgtaaaattccagttcttttctaattgtgtttctgaaattaggagtcagctgccagcgtttttgtgtggctgcagtgtgcctgggcccagctcacgggcagtgggtggacctaactgcccaggcaggcgagagctacttccagagccttccagtgcatgggagggcagggctaggtgtagcggtgtctcctctttgaaattaagaactatctttcttgtagcaaagctgcacatgatgatgctgcctctcctctctgtgttgtctgggcccttgtttacaagcacgcgttacccttcctgaggggagccatgctctagcccctggagggcctgttgcaggggcagggcgggcccgttgcctttggcagctcctggagagctgtggacatgcagtccccctcagttcgtgctgcaataaaggccatcttctcttatttctgccctcctttctctttggaccctggagccacaggctcagcctggcctgtcgccccggctgtcactgaaaagccccggataccaagaagtcacccacaaaaagtgggagaagaaataagatggcctttatatcgcaggcctccaccccacagtctgatttccatgtgctggatctgtttccaagccggccgggagcctcggtcctcgagtggccccacagctctagtggccctggagatagcagcctccccacacttgcctccttgtcctggggtggggacggtgagaaaccctggctgctggggcgtctgcagggctcctcgggccactgctgagcaggtgcatggacaccgtcagtgggtggaagcagcgccacatggtgac

SEQ ID NO: 332504 - DNA, 2321 bp, Homo sapiens
gtggcggcgctggagtcggcgcgggtgctggcgccatggaggccgagcggggtcccgagcgccggcctgcggagcgtagcagcccgggccagacgccggaggagggcgcgcaggccttggccgagttcgcggcgctgcacggcccggcgctgcgcgcttcgggggtccccgaacgttactggggccgcctcctgcacaagctggagcacgaggttttcgacgctggggaagtgtttgggatcatgcaagtggaggaggtagaagaggaggaggacgaggcagcccgggaggtgcggaagcagcagcccaacccggggaacgagctgtgctacaaggtcatcgtgaccagggagagcgggctccaggcagcccaccccaacagcatcttcctcatcgaccacgcctggacgtgccgtgtggagcacgcgcgccagcagctgcagcaggtgcccgggctgctgcaccgcatggccaacctgatgggcattgagttccacggtgagctgcccagtacagaggctgtggccctggtgctggaggagatgtggaagttcaaccagacctaccagctggcccatgggcatgtatgccgtcgacctcatgctgaagtgggacaacggcccagatggaaggcgggtgatgcagccgcagatcctggaggtgaacttcaaccccgactgtgagcgagcctgcaggtaccaccccaccttcttcaacgacgtcttcagcaccttgtttctggaccagcccggtggctgccacgttacctgccttgtctaggcactcgctgtccccaaaacctgtgcttggggcaggattccaacctcagttctctgagctgcttctgcaaaggcccccatgtccctccccacaccggccctgggcatagcctcagccccaggcctctgtcctgccgagccatcctcccggcgccacactccgggagcacagcatcctcctctcacctgtgggtcagagcaggacagtgatggtgtccccagggctgagcaccaccccacgccctgccctcacccctcaccaccatctgtgcactgatgagtctccagtttagccaagggcttcgttcctggcatggagaatttgttcctggctgctgtgtttccagggggtgctgggggaagggttccgtggagcgagacaaggtgtcctcgggagcagggttccaccgggaagcgtttgggagccctgtatcacacggggcaggcgggtttctcttccggggtctctgctcttatgcatcaggacgaccccgggacggctgtggggccccacactgcacccacagggctctatgcgacaggggcccaggaacagcctgaggccaccacccagcaagcccgccttatcacccattccagctcacccagaaccttcaccagcaaacctcctgctgaggtcctggcaggaggccaccgtcttgttaccgtttccttttcgtttgctgagggtcacagaccccaacagggaaatcagtatctgtcttcccagtggttgccctgctcgccgggcactccacggggtcccgcccttgtgtgagatgggccaggatccttcggcaaggggcgcctggggctggggctgattgtgggcggtggagcgccagacagaaaaggattccaatgagaacttcaggttaaagtcagatgccacctaccagggtctacagtcaaaatgttggctttttcttattttttaatgtatgggagaaaaatgtaaaattccagttcttttctaattgtgtttctgaaattaggagtcagctgccagcgtttttgtgtggctgcagtgtgcctgggcccagctcacgggcagtgggtggacctaactgcccaggcaggcgagagctacttccagagccttccagtgcatgggagggcagggctaggtgtagcggtgtctcctctttgaaattaagaactatctttcttgtagcaaagctgcacatgatgatgctgcctctcctctctgtgttgtctgggcccttgtttacaagcacgcgttacccttcctgaggggagccatgctctagcccctggagggcctgttgcaggggcagggcgggcccgttgcctttggcagctcctggagagctgtggacatgcagtccccctcagttcgtgctgcaataaaggccatcttctcttaaaaaaaaaaaaaaaaaaaattttgggggccggcgccaaaagttttaacccttggggggggccagtggaaggcaggcccagagaagcggggagggggggttccccaaaaaaccggggcgggttgaacccggggtgggtggttaaaaggcggctacg

SEQ ID NO: 332505 - DNA, 2797 bp, Homo sapiens
gtggcggcgctggagtcggcgcgggtgctggcgccatggaggccgagcggggtcccgagcgccggcctgcggagcgtagcagcccgggccagacgccggaggagggcgcgcaggccttggccgagttcgcggcgctgcacggcccggcgctgcgcgcttcgggggtccccgaacgttactggggccgcctcctgcacaagctggagcacgaggttttcgacgctggggaagtgtttgggatcatgcaagtggaggaggtagaagaggaggaggacgaggcagcccgggaggtgcggaagcagcagcccaacccggggaacgagctgtgctacaaggtcatcgtgaccagggagagcgggctccaggcagcccaccccaacagcatcttcctcatcgaccacgcctggacgtgccgtgtggagcacgcgcgccagcagctgcagcaggtgcccgggctgctgcaccgcatggccaacctgatgggcattgagttccacggtgagctgcccagtacagaggctgtggccctggtgctggaggagatgtggaagttcaaccagacctaccagctggcccatgggacagctgaggagaagatgccggtgtggtatatcatggacgagttcggttcgcggatccagcacgcggacgtgcccagcttcgccacggcacccttcttctacatgccgcagcaggtggcctacacgctgctgtggcccctgagggacctggacactggcgaggaggtgacccgagactttgcctacggagagacggaccccctgatccggaagtgcatgctgctgccctgggcccccaccgacatgctggacctcagctcttgcacacccgagccgcccgccgagcactaccaggccattctggaggaaaacaaggagaagctgccacttgacatcaaccccgtggtgcacccccacggccacatcttcaaggtctacacggacgtgcagcaggtggccagcagcctcacccacccgcgcttcaccctcacccagagtgaggcggacgccgacatcctcttcaacttctcacacttcaaggactacaggaaactcagccaggagaggccaggcgtgctgctgaaccagttcccctgcgagaacctgctgactgtcaaggactgcctggcctccatcgcgcgccgggcaggtggccccgagggcccaccctggctgccccgaaccttcaacctgcgcactgagctgccccagtttgtcagctacttccagcagcgggaaaggtggggcgaggacaaccactggatctgcaagccctggaacctggcgcgcagcctggacacccacgtcaccaagagcctgcacagcatcatccggcaccgagagagcacccccaaggttgtgtccaagtacatcgaaagtcccgtgttgttccttcgagaagacgtgggaaaggtcaagttcgacatccgctacatcgtgctgctgcggtcagtgaggcccctacggttgttcgtgtatgatgtgttctggctgcggttctccaaccgggcctttgcactcaacgacctggatgactacgagaagcacttcacggtcatgaactatgacccggatgtggtgctgaagcaggtgcactgtgaagagttcatccccgagtttgagaagcaatacccagaatttccctggacggacgtccaggctgagatcttccgggccttcacggagctgttccaggtggcctgtgccaagccaccacccctgggcctctgcgactacccctcatcccgggccatgtatgccgtcgacctcatgctgaagtgggacaacggcccagatggaaggcgggtgatgcagccgcagatcctggaggtgaacttcaaccccgactgtgagcgagcctgcaggtaccaccccaccttcttcaacgacgtcttcagcaccttgtttctggaccagcccggtggctgccacgttacctgccttgtctaggcactcgctgtccccaaaacctgtgcttggggcaggattccaacctcagttctctgagctgcttctgcaaaggcccccatgtccctccccacaccggccctggggctgattgtgggcggtggagcgccagacagaaaaggattccaatgagaacttcaggttaaagtcagatgccacctaccagggtctacagtcaaaatgttggctttttcttattttttaatgtatgggagaaaaatgtaaaattccagttcttttctaattgtgtttctgaaattaggagtcagctgccagcgtttttgtgtggctgcagtgtgcctgggcccagctcacgggcagtgggtggacctaactgcccaggcaggcgagagctacttccagagccttccagtgcatgggagggcagggctaggtgtagcggtgtctcctctttgaaattaagaactatctttcttgtagcaaagctgcacatgatgatgctgcctctcctctctgtgttgtctgggcccttgtttacaagcacgcgttacccttcctgaggggagccatgctctagcccctggagggcctgttgcaggggcagggcgggcccgttgcctttggcagctcctggagagctgtggacatgcagtccccctcagttcgtgctgcaataaaggccatcttctcttaaaaaaaaaaaaaaaaaaaattttgggggccggcgccaaaagttttaacccttggggggggccagtggaaggcaggcccagagaagcggggagggggggttccccaaaaaaccggggcgggttgaacccggggtgggtggttaaaaggcggctacg

SEQ ID NO: 332506 - DNA, 2092 bp, Homo sapiens
gtggcggcgctggagtcggcgcgggtgctggcgccatggaggccgagcggggtcccgagcgccggcctgcggagcgtagcagcccgggccagacgccggaggagggcgcgcaggccttggccgagttcgcggcgctgcacggcccggcgctgcgcgcttcgggggtccccgaacgttactggggccgcctcctgcacaagctggagcacgaggttttcgacgctggggaagtgtttgggatcatgcaagtggaggaggtagaagaggaggaggacgaggcagcccgggaggtgcggaagcagcagcccaacccggggaacgagctgtgctacaaggtcatcgtgaccagggagagcgggctccaggcagcccaccccaacagcatcttcctcatcgaccacgcctggacgtgccgtgtggagcacgcgcgccagcagctgcagcaggtgcccgggctgctgcaccgcatggccaacctgatgggcattgagttccacggtgagctgcccagtacagaggctgtggccctggtgctggaggagatgtggaagttcaaccagacctaccagctggcccatgggacagctgaggagaagatgccggtgtggtatatcatggacgagttcggttcgcggatccagcacgcggacgtgcccagcttcgccacggcacccttcttctacatgccgcagcaggtggcctacacgctgctgtggcccctgagggacctggacactggcgaggaggtgacccgagactttgcctacggagagacggaccccctgatccggaagtgcatgctgctgccctgggcccccaccgacatgctggacctcagctcttgcacacccgagccgcccgccgagcactaccaggccattctggaggaaaacaaggagaagctgccacttgacatcaaccccgtggtgcacccccacggccacatcttcaaggtctacacggacgtgcagcaggtggccagcagcctcacccacccgcgcttcaccctcacccagagtgaggcggacgccgacatcctcttcaacttctcacacttcaaggactacaggaaactcagccaggagaggccaggcgtgctgctgaaccagttcccctgcgagaacctgctgactgtcaaggactgcctggcctccatcgcgcgccgggcaggtggccccgagggcccaccctggctgccccgaaccttcaacctgcgcactgagctgccccagtttgtcagctacttccagcagcgggaaaggtggggcgaggacaaccactggatctgcaagccctggaacctggcgcgcagcctggacacccacgtcaccaagagcctgcacagcatcatccggcaccgagagagcacccccaaggttgtgtccaagtacatcgaaagtcccgtgttgttccttcgagaagacgtgggaaaggtcaagttcgacatccgctacatcgtgctgctgcggtcagtgaggcccctacggttgttcgtgtatgatgtgttctggctgcggttctccaaccgggcctttgcactcaacgacctggatgactacgagaagcacttcacggtcatgaactatgacccggatgtggtgctgaagcaggtgcactgtgaagagttcatccccgagtttgagaagcaatacccagaatttccctggacggacgtccaggctgagatcttccgggccttcacggagctgttccaggtggcctgtgccaagccaccacccctgggcctctgcgactacccctcatcccgggccatgtatgccgtcgacctcatgctgaagtgggacaacggcccagatggaaggcgggtgatgcagccgcagatcctggaggtgaacttcaaccccgactgtgagcgagcctgcaggtaccaccccaccttcttcaacgacgtcttcagcaccttgtttctggaccagcccggtggctgccacgttacctgccttgtctaggcactcgctgtccccaaaacctgtgaggggcagggcgggcccgttgcctttggcagctcctggagagctgtggacatgcagtccccctcagttcgtgctgcaataaaggccatcttctctta

SEQ ID NO: 332507 - DNA, 3394 bp, Homo sapiens
aagagaagatggcctttattgcagcacgaactgagggggactgcatgtccacagctctccaggagctgccaaaggcgacgggcccgccctgcccctgcaacaggccctccaggggctagagcatggctcccctcaggaagggtaacgcgtgcttgtaaacaagggcccagacaacacagagaggagaggcagcatcatcaggtgcagctttgctacaagaaagatagttcttaatttcaaagaggagacaccgctacacctagccctgccctcccatgcactggaaggctctggaagtagctctcgcctgcctgggcagttaggtccacccactgcccgtgagctgggcccaggcacactgcagccacacaaaaacgctggcagctgactcctaatttcagaaacacaattagaaaagaactggaattttacatttttctcccatacattaaaaaataagaaaaagccaacattttgactgtagaccctggtaggtggcatctgactttaacctgaagttctcattggaatccttttctgtctggcgctccaccgcccacaatcagccccagccccaggatccttcggcaaggggcgcctggggctggggctcattggaatccttttctgtctggcgctccaccgcccacaatcagccccagccccaggcgccccttgccgaaggatcctggcccatctcacacaagggcgggaccccgtggagtgcccggcgagcagggcaaccactgggaagacagatactgatttccctgttggggtctgtgaccctcagcaaacgaaaaggaaacggtaacaagacggtggcctcctgccaggacctcagcaggaggtttgctggtgaaggttctgggtgagctggaatgggtgataaggcgggcttgctgggtggtggcctcaggctgttcctgggcccctgtcgcatagagccctgtgggtgcagtgtggggccccacagccgtcccggggtcgtcctgatgcataagagcagagaccccggaagagaaacccgcctgccccgtgtgatacagggctcccaaacgcttcccggtggaaccctgctcccgaggacaccttgtctcgctccacggaacccttcccccagcaccccctggaaacacagcagccaggaacaaattctccatgccaggaacgaagcccttggctaaactggagactcatcagtgcacagatggtggtgaggggtgagggcagggcgtggggtggtgctcagccctggggacaccatcactgtcctgctctgacccacaggtgagaggaggatgctgtgctcccggagtgtggcgccgggaggatggctcggcaggacagaggcctggggctgaggctatgcccagggccggtgtggggagggacatgggggcctttgcagaagcagctcagagaactgaggttggaatcctgccccaagcacaggttttggggacagcgagtgcctagacaaggcaggtaacgtggcagccaccgggctggtccagaaacaaggtgctgaagacgtcgttgaagaaggtggggtggtacctgcaggctcgctcacagtcggggttgaagttcacctccaggatctgcggctgcatcacccgccttccatctgggccgttgtcccacttcagcatgaggtcgacggcatacatggcccgggatgaggggtagtcgcagaggcccaggggtggtggcttggcacaggccacctggaacagctccgtgaaggcccggaagatctcagcctggacgtccgtccagggaaattctgggtattgcttctcaaactcggggatgaactcttcacagtgcacctgcttcagcaccacatccgggtcatagttcatgaccgtgaagtgcttctcgtagtcatccaggtcgttgagtgcaaaggcccggttggagaaccgcagccagaacacatcatacacgaacaaccgtaggggcctcactgaccgcagcagcacgatgtagcggatgtcgaacttgacctttcccacgtcttctcgaaggaacaacacgggactttcgatgtacttggacacaaccttgggggtgctctctcggtgccggatgatgctgtgcaggctcttggtgacgtgggtgtccaggctgcgcgccaggttccagggcttgcagatccagtggttgtcctcgccccacctttcccgctgctggaagtagctgacaaactggggcagctcagtgcgcaggttgaaggttcggggcagccagggtgggccctcggggccacctgcccggcgcgcgatggaggccaggcagtccttgacagtcagcaggttctcgcaggggaactggttcagcagcacgcctggcctctcctggctgagtttcctgtagtccttgaagtgtgagaagttgaagaggatgtcggcgtccgcctcactctgggtgagggtgaagcgcgggtgggtgaggctgctggccacctgctgcacgtccgtgtagaccttgaagatgtggccgtgggggtgcaccacggggttgatgtcaagtggcagcttctccttgttttcctccagaatggcctggtagtgctcggcgggcggctcgggtgtgcaagagctgaggtccagcatgtcggtgggggcccagggcagcagcatgcacttccggatcagggggtccgtctctccgtaggcaaagtctcgggtcacctcctcgccagtgtccaggtccctcaggggccacagcagcgtgtaggccacctgctgcggcatgtagaagaagggtgccgtggcgaagctgggcacgtccgcgtgctggatccgcgaaccgaactcgtccatgatataccacaccggcatcttctcctcagctgtcccatgggccagctggtaggtctggttgaacttccacatctcctccagcaccagggccacagcctctgtactgggcagctcaccgtggaactcaatgcccatcaggttggccatgcggtgcagcagcccgggcacctgctgcagctgctggcgcgcgtgctccacacggcacgtccaggcgtggtcgatgaggaagatgctgttggggtgggctgcctggagcccgctctccctggtcacgatgaccttgtagcacagctcgttccccgggttgggctgctgcttccgcacctcccgggctgcctcgtcctcctcctcttctacctcctccacttgcatgatcccaaacacttccccagcgtcgaaaacctcgtgctccagcttgtgcaggaggcggccccagtaacgttcggggacccccgaagcgcgcagcgccgggccgtgcagcgccgcgaactcggccaaggcctgcgcgccctcctccggcgtctggcccgggctgctacgctccgcaggccggcgctcgggac

SEQ ID NO: 332508 - DNA, 433 bp, Homo sapiens
ataaactccggaaaaccattggccgcctggcaagtcaagtgcaagaacgcggcaggtggctggagagtctgcagtgtgcctgggcccagctcacgggcagtgggtggacctaactgcccaggcaggcgagagctacttccagagccttccagtgcatgggagggcagggctaggtgtagcggtgtctcctctttgaaattaagaactatctttcttgtagcaaagctgcacatgatgatgctgcctctcctctctgtgttgtctgggcccttgtttacaagcacgcgttacccttcctgaggggagccatgctctagcccctggagggcctgttgcaggggcagggcgggcccgttgcctttggcagctcctggagagctgtggacatgcagtccccctcagttcgtgctgcaataaaggccatcttctctta

SEQ ID NO: 332509 - DNA, 591 bp, Homo sapiens
gtggcggcgctggagtcggcgcgggtgctggcgccatggaggccgagcggggtcccgagcgccggcctgcggagcgtagcagcccgggccagacgccggaggagggcgcgcaggccttggccgagttcgcggcgctgcacggcccggcgctgcgcgcttcgggggtccccgaacgttactggggccgcctcctgcacaagctggagcacgaggttttcgacgctggggaagtgtttgggatcatgcaagtggaggaggtagaagaggaggaggacgaggcagcccgggaggtgcggaagcagcagcccaacccggggaacgagctgtgctacaaggtcatcgtgaccagggagagcgggctccaggcagcccaccccaacagcatcttcctcatcgaccacgcctggacgtgccgtgtggagcacgcgcgccagcagctgcagcaggtgcccgggctgctttggcaaaccccggccaatggccccaaaaaccgtgggaattggggggccactttggaacgcttccaacggtggaagctgccagtaccagaggctgtggccctggtgctggaagcggaaacgcacttgtgcg

SEQ ID NO: 332510 - DNA, 3329 bp, Homo sapiens
acccctgctgacgggaactctggcccccaggttttcgacgctggggaagtgtttgggatcatgcaagtggaggaggtagaagaggaggaggacgaggcagcccgggaggtgcggaagcagcagcccaacccggggaacgagctgtgctacaaggtcatcgtgaccagggagagcgggctccaggcagcccaccccaacagcatcttcctcatcgaccacgcctggacgtgccgtgtggagcacgcgcgccagcagctgcagcaggtgcccgggctgctgcaccgcatggccaacctgatgggcattgagttccacggtgagctgcccagtacagaggctgtggccctggtgctggaggagatgtggaagttcaaccagacctaccagctggcccatgggacagctgaggagaagatgccggtgtggtatatcatggacgagttcggttcgcggatccagcacgcggacgtgcccagcttcgccacggcacccttcttctacatgccgcagcaggtggcctacacgctgctgtggcccctgagggacctggacactggcgaggaggtgacccgagactttgcctacggagagacggaccccctgatccggaagtgcatgctgctgccctgggcccccaccgacatgctggacctcagctcttgcacacccgagccgcccgccgagcactaccaggccattctggaggaaaacaaggagaagctgccacttgacatcaaccccgtggtgcacccccacggccacatcttcaaggtctacacggacgtgcagcaggtggccagcagcctcacccacccgcgcttcaccctcacccagagtgaggcggacgccgacatcctcttcaacttctcacacttcaaggactacaggaaactcagccaggagaggccaggcgtgctgctgaaccagttcccctgcgagaacctgctgactgtcaaggactgcctggcctccatcgcgcgccgggcaggtggccccgagggcccaccctggctgccccgaaccttcaacctgcgcactgagctgccccagtttgtcagctacttccagcagcgggaaaggtggggcgaggacaaccactggatctgcaagccctggaacctggcgcgcagcctggacacccacgtcaccaagagcctgcacagcatcatccggcaccgagagagcacccccaaggttgtgtccaagtacatcgaaagtcccgtgttgttccttcgagaagacgtgggaaaggtcaagttcgacatccgctacatcgtgctgctgcggtcagtgaggcccctacggttgttcgtgtatgatgtgttctggctgcggttctccaaccgggcctttgcactcaacgacctggatgactacgagaagcacttcacggtcatgaactatgacccggatgtggtgctgaagcaggtgcactgtgaagagttcatccccgagtttgagaagcaatacccagaatttccctggacggacgtccaggctgagatcttccgggccttcacggagctgttccaggtggcctgtgccaagccaccacccctgggcctctgcgactacccctcatcccgggccatgtatgccgtcgacctcatgctgaagtgggacaacggcccagatggaaggcgggtgatgcagccgcagatcctggaggtgaacttcaaccccgactgtgagcgagcctgcaggtaccaccccaccttcttcaacgacgtcttcagcaccttgtttctggaccagcccggtggctgccacgttacctgccttgtctaggcactcgctgtccccaaaacctgtgcttggggcaggattccaacctcagttctctgagctgcttctgcaaaggcccccatgtccctccccacaccggccctgggcatagcctcagccccaggcctctgtcctgccgagccatcctcccggcgccacactccgggagcacagcatcctcctctcacctgtgggtcagagcaggacagtgatggtgtccccagggctgagcaccaccccacgccctgccctcacccctcaccaccatctgtgcactgatgagtctccagtttagccaagggcttcgttcctggcatggagaatttgttcctggctgctgtgtttccagggggtgctgggggaagggttccgtggagcgagacaaggtgtcctcgggagcagggttccaccgggaagcgtttgggagccctgtatcacacggggcaggcgggtttctcttccggggtctctgctcttatgcatcaggacgaccccgggacggctgtggggccccacactgcacccacagggctctatgcgacaggggcccaggaacagcctgaggccaccacccagcaagcccgccttatcacccattccagctcacccagaaccttcaccagcaaacctcctgctgaggtcctggcaggaggccaccgtcttgttaccgtttccttttcgtttgctgagggtcacagaccccaacagggaaatcagtatctgtcttcccagtggttgccctgctcgccgggcactccacggggtcccgcccttgtgtgagatgggccaggatccttcggcaaggggcgcctggggctggggctgattgtgggcggtggagcgccagacagaaaaggattccaatgagaacttcaggttaaagtcagatgccacctaccagggtctacagtcaaaatgttggctttttcttattttttaatgtatgggagaaaaatgtaaaattccagttcttttctaattgtgtttctgaaattaggagtcagctgccagcgtttttgtgtggctgcagtgtgcctgggcccagctcacgggcagtgggtggacctaactgcccaggcaggcgagagctacttccagagccttccagtgcatgggagggcagggctaggtgtagcggtgtctcctctttgaaattaagaactatctttcttgtagcaaagctgcacatgatgatgctgcctctcctctctgtgttgtctgggcccttgtttacaagcacgcgttacccttcctgaggggagccatgctctagcccctggagggcctgttgcaggggcagggcgggcccgttgcctttggcagctcctggagagctgtggacatgcagtccccctcagttcgtgctgcaataaaggccatcttctcttaaaaaaaaaaaaaaaaaaaattttgggggccggcgccaaaagttttaacccttggggggggccagtggaaggcaggcccagagaagcggggagggggggttccccaaaaaaccggggcgggttgaacccggggtgggtggttaaaaggcggctacg

SEQ ID NO: 332511 - DNA, 2007 bp, Homo sapiens
gactggcacacaggccagtcccaggagccgcctcctgagttcctgctatggaaggcgattgttagcgctgccatcatgagccaggctgggttctgtgttgtctcaggtgcactgtgaagagttcatccccgagtttgagaagcaatacccagaatttccctggacggacgtccaggctgagatcttccgggccttcacggagctgttccaggtggcctgtgccaagccaccacccctgggcctctgcgactacccctcatcccgggccatgtatgccgtcgacctcatgctgaagtgggacaacggcccagatggaaggcgggtgatgcagccgcagatcctggaggtgaacttcaaccccgactgtgagcgagcctgcaggtaccaccccaccttcttcaacgacgtcttcagcaccttgtttctggaccagcccggtggctgccacgttacctgccttgtctaggcactcgctgtccccaaaacctgtgcttggggcaggattccaacctcagttctctgagctgcttctgcaaaggcccccatgtccctccccacaccggccctgggcatagcctcagccccaggcctctgtcctgccgagccatcctcccggcgccacactccgggagcacagcatcctcctctcacctgtgggtcagagcaggacagtgatggtgtccccagggctgagcaccaccccacgccctgccctcacccctcaccaccatctgtgcactgatgagtctccagtttagccaagggcttcgttcctggcatggagaatttgttcctggctgctgtgtttccagggggtgctgggggaagggttccgtggagcgagacaaggtgtcctcgggagcagggttccaccgggaagcgtttgggagccctgtatcacacggggcaggcgggtttctcttccggggtctctgctcttatgcatcaggacgaccccgggacggctgtggggccccacactgcacccacagggctctatgcgacaggggcccaggaacagcctgaggccaccacccagcaagcccgccttatcacccattccagctcacccagaaccttcaccagcaaacctcctgctgaggtcctggcaggaggccaccgtcttgttaccgtttccttttcgtttgctgagggtcacagaccccaacagggaaatcagtatctgtcttcccagtggttgccctgctcgccgggcactccacggggtcccgcccttgtgtgagatgggccaggatccttcggcaaggggcgcctggggctggggctgattgtgggcggtggagcgccagacagaaaaggattccaatgagaacttcaggttaaagtcagatgccacctaccagggtctacagtcaaaatgttggctttttcttattttttaatgtatgggagaaaaatgtaaaattccagttcttttctaattgtgtttctgaaattaggagtcagctgccagcgtttttgtgtggctgcagtgtgcctgggcccagctcacgggcagtgggtggacctaactgcccaggcaggcgagagctacttccagagccttccagtgcatgggagggcagggctaggtgtagcggtgtctcctctttgaaattaagaactatctttcttgtagcaaagctgcacatgatgatgctgcctctcctctctgtgttgtctgggcccttgtttacaagcacgcgttacccttcctgaggggagccatgctctagcccctggagggcctgttgcaggggcagggcgggcccgttgcctttggcagctcctggagagctgtggacatgcagtccccctcagttcgtgctgcaataaaggccatcttctcttaaaaaaaaaaaaaaaaaaaattttgggggccggcgccaaaagttttaacccttggggggggccagtggaaggcaggcccagagaagcggggagggggggttccccaaaaaaccggggcgggttgaacccggggtgggtggttaaaaggcggctacg

SEQ ID NO: 332512 - DNA, 751 bp, Homo sapiens
aaaacgttgcataatttttttcctctttaaagtgtatcttatggatgaaggagtggtgaagtcagatgtacataaagtactgtacatgagttacttccgattcccttgtccttctgtgtgtttactgtggagttctcctcaggacagatgactggcagactccacgctgtgatattaatgaaaccagtggtggaagatgcatatgccacatcttgtccctgcttcttccttagttatttggtcccctcctcctcccagcaggattagggtaggaactgagtggaagggcaggagactgaatttaagaggcaatctaaagttagtgttgattctggagatggaacagagttgcagtagactgaggttggcagccttctgtatacctgctgccattttaattccagcatttggaatagggccttcagattccaaaagctaaaatgttagcaacagtcgcttttgtggaattctttccccctcacctcccctcccttctcctcccctgtcctctcctcttttccttcctttcgacagagtcttgctctgtcaacaggctggagttcagtggtgcgatcttggctcactgcaacctccgcctcctgggttcaagcgattcccctgcctcagcttcccgagtagctgggactacaggcgcatgccaccatgcctggctaatttttttttttttttttgtattttagtagagacgggttttcaccatattggccaggatggtcttaatctctcgacc

SEQ ID NO: 332513 - DNA, 303 bp, Homo sapiens
tctataacagtttttatagattttggagtgtcctgaaaaatttccttgtattgctggatccagtaaagttgtctaggaacaatatttcacaaaaaaattataattgaatggtgacattacttacaaaatgattttggtcagtttatgtgtctctgagtttgaaaaattttgtgacagaatgtcttgtagagttactgctaataaaagaatgaaatagatttgttcctttttccccccttgtcttcaaaagttaagagacctaaatcaaatgtcaatataaaataactcctagggctaagaaaa

SEQ ID NO: 332514 - DNA, 2582 bp, Homo sapiens
  misc_feature (613)..(613): n is a, c, g, or t
  misc_feature (2290)..(2290): n is a, c, g, or t
atttacagatagattagataatctatctagagatagatagggagagatatctatcaatacatatctctatctagatatagatagatggttttctatatagacctatctatctatatatgtatacatctatatatgtctacacatatctctatacacatatatatatttatatctacatctatatttctacatgtatataggtatgtatatatctacatgtatatatgtatatagatagatatatacataggtatctgtatatatgcatatacatgcctatctatctttatctacatgtattacatagatagggtaattactgataaatcctttggccttctttgtaaatctctgggctaaagacccctccagtattatacatgttctggtctagattgctcactcaccagttctcctcactatctagagaagatccacttagcaggcctccccttaaagaagggcaccttaactggactcactcctcccatagtagactgcacagtacacaagcagaagaggagagctcaataataaagtcaccataaaggataatttttaaatgaataaagaaatcagaaaatccagtattggctagcacatatggctatcngcaagctcaccctacaaaaaaatagtgagaaaacagttcgaatattggccgtttggggcacatattctacaaaaaggaaaagttttgaaatgtatatatatttaatttaactctaaaatatttgtaaggcaagcccagtggctcacacctataatttcagaactttgggaggccagggcaggaggatcgcttgaggccaggagaccagcctgggcaacatggcaagaccccatatctacagatggttttaaaaaattagccaggtataacacgatgaaaccccgtctctactaaaaatataaaaattagccgggcatggtggtgggcgcctgtagtcccagctactcgggaggctgaggcaggagaatggcatgaacccgggaggcagagcttgcagtgagccaagatcatgccactgcactccagcctgggcaacagagcggagactccatctcaaaaaaaaaaaaaagaaaattagccaggtatggtggcacacacttgtggtcccgtctatttaggaggttggggcaggagaattgcttgagcccaggagtttgaggctgcagtgagctatgatcatgccactgcactctagcctgggtgatagaacaagaccctgtctcttaaaaaaaaaaaaaaattgtattatgcaccaggtacaatgtgctaggtactggggagagatcttaaaaaaatgtattatacaccaggtacaatgtgctaggtgctggggagagatcaggggataaagcagaccaaaatttctgtcctcatggagcttgtggtctaaaggaggaaaaaaggcaataaacaaattaaaaaagaggaatacaaagtatgtgggtagggatgagtacaacagaggaaaatcaagcaggaaagatagaactctggaaagaagtagggccagtgtcaaacaggatggccagggaaggccacagtgagaaggtgacaccaaagcaaagacctacaggaggtgaagtggtgagccattcaggtcactaaaggaggcatgttcccaggagaggggacgacaatgcaaaggcaagaaggagcaccagcgtgtgtgttgagaaaagcatggggacccaagcagctaaagtggaacacatgtaagaagaataaccgtaatgaggtctgagagacaactgggtgggaagtgtcttaatctgtttgtgttactataaaggaatatctgagtctgggtaatttataaagaaaaggaggtttgtttaggtcacaattctataggctgtacaaaaatcagcaccagtatctacatcaggtaaaggctggaggttgcttccactcatggcaaaaggggaaggggagccagtgtgtgcagagatcacagggtgagagaggaagcaagagagagagggaagcaccgggctcttttaaaaaaccagctcttgggaaaactaatagagaactcactcactactctcaccatggcagggcattaatctatttatgagggatccatccttatgatccaaacacctcccactaaacccgacttccaacactggggatcagatttcaacatgagatttgaagcggacaaatatctaaactacagcaaagagtacagatcgggaggcatggcaagctctgctggtcactccaatggagtcaacatttcaagaatgttacaagcagctgggttggtggctnatgcctataatcccagcactttaaaaggctgaagtagaaggatcacttgaggccaggaattcaagaccagcctgggcaacataaagagaccctgtctctaccaacaatttaaaaaaaaaaaaaaaaaaaaaaaaagccaggcatggcagcgagcacctgttgtcctaggttctcaggagcctgaggcaggaagattacttgagcccagggggttgaggctgcagtgggccacaactgccccactgcactacagcctgaacaacaaagtgagatcctgtctcttaaaaaaatt

SEQ ID NO: 332515 - DNA, 1468 bp, Homo sapiens
  misc_feature (613)..(613): n is a, c, g, or t
atttacagatagattagataatctatctagagatagatagggagagatatctatcaatacatatctctatctagatatagatagatggttttctatatagacctatctatctatatatgtatacatctatatatgtctacacatatctctatacacatatatatatttatatctacatctatatttctacatgtatataggtatgtatatatctacatgtatatatgtatatagatagatatatacataggtatctgtatatatgcatatacatgcctatctatctttatctacatgtattacatagatagggtaattactgataaatcctttggccttctttgtaaatctctgggctaaagacccctccagtattatacatgttctggtctagattgctcactcaccagttctcctcactatctagagaagatccacttagcaggcctccccttaaagaagggcaccttaactggactcactcctcccatagtagactgcacagtacacaagcagaagaggagagctcaataataaagtcaccataaaggataatttttaaatgaataaagaaatcagaaaatccagtattggctagcacatatggctatcngcaagctcaccctacaaaaaaatagtgagaaaacagttcgaatattggccgtttggggcacatattctacaaaaaggaaaagttttgaaatgtatatatatttaatttaactctaaaatatttgtaaggcaagcccagtggctcacacctataatttcagaactttgggaggccagggcaggaggatcgcttgaggccaggagaccagcctgggcaacatggcaagaccccatatctacagatggttttaaaaaattagccaggtataacacgatgaaaccccgtctctactaaaaatataaaaattagccgggcatggtggtgggcgcctgtagtcccagctactcgggaggctgaggcaggagaatggcatgaacccgggaggcagagcttgcagtgagccaagatcatgccactgcactccagcctgggcaacagagcggagactccatctcaaaaaaaaaaaaaagaaaattagccaggtatggtggcacacacttgtggtcccgtctatttaggaggttggggcaggagaattgcttgagcccaggagtttgaggctgcagtgagctatgatcatgccactgcactctagcctgggtgatagaacaagaccctgtctcttaaaaaaaaaaaaaaattgtattatgcaccaggtacaatgtgctaggtactggggagagatcttaaaaaaatgtattatacaccaggtacaatgtgcttcaacgctttatacttctcaacgctttatacttcctcaacgctttatacgctcaacgctttatacttcctcctcaacgctttatacttctcaacgctttatacttctcaacgctttatacttcattatcctaa

SEQ ID NO: 332516 - DNA, 126 bp, Homo sapiens
cagaaagacaaatgtcacagcttacctaacatcatctaccagacaaattgtttatatttaacggaatcaggcagcttccactgagggcttttgtgttccatcttttttgtcattgtattttaaact

SEQ ID NO: 332517 - DNA, 474 bp, Homo sapiens
atttacttaagaaaatacttacatattgtttttgaaaaatatgtcatgagctagaaggagaaagttaatgatataaagtgtattaaaagattgccttcatgcagaagattggtgaatgttaatttgcataagtcaatatggcatccgtgaaaatatgatgctcacatctgcttcaagaaaatctgctgagggggcatacttgactggtggcctccagctgctgtcccgcagacctaacatggcatttgctccaaggccatgcttccttggggctgctcccagccagggactgagcacaaggtggttgctagagcagatgcattcctgcttgattgtgattgctttcatgggcaattttggctcagggacttttcatcagcctggttgaatctttcttagaactgctccgtggtctgaagctctttctacctaatccttcctctctcatcccctttcagagatgtcaaatctgca

SEQ ID NO: 332518 - DNA, 172 bp, Homo sapiens
ttgtggggacaaaacggtaaaatgctgctgaaaagtttagaccagtgacggctccaatcagcttccaggaaatggcagtaaatggtggaacacgtaagaggtctggtggcaagcggacaagagatgagtccgtcaacccccacagagagagcgtaccccacagagagagcgt

SEQ ID NO: 332519 - DNA, 357 bp, Homo sapiens
cttgtgatctgcctgcctcagcctcccaaagtgctgggattacaggcgtgagccaccgcgcccggccctgtctcctgagttctaacctcaaatgtccaactactttctctacaattccatgtgggtgactaatacatatctcaaactcatctcaaagcaaacttctcccctgccctccaaacatgttccctcctgtggtcttctccatctcagttaatggcagctcttattactctagttgattaggtcaaaacccacagagccatccccttcacatcacttccttcacacccgtacctgtcagcaaattccgtctgcacaaccatatcctctcaccttggcccagtcaccatcgcc

SEQ ID NO: 332520 - DNA, 1727 bp, Homo sapiens
ctgggagcggaggcaggcgggcagcggcgggggaggcagctgggagcggcgccaccccggccccaacccgctcgacccgcaggaccccagccccgacgcctactgcaacctggtcatcctggctgtagccaacagggacgctgcagaggagtcctgcgcactcatctgtcaggtcttccagatcatctacggggaccagagtattgagtgtgtggaccgggctggctaccactacacatccacacctgaacggccatggctctgcagccgcataatggctcccaggacacctttgaagcatgttacagcggcacgtccacaccttctttccatggctcccactgcagcggcagcgaccacagcagtctgggcttggagcagttacaggattacatggtcacgttgcggagtaagctggggcccctcgagatccagcagtttgcgatgctgctgcgggagtaccggctggggctgcccatccaggactattgcacaggcctgctgaagctctacggagaccggcgcaagttcctcctccttgggatgcggcccttcatcccggaccaggacatcggctacttcgagggcttcctggagggcgtgggcatccgcgagggcggatcctcactgacagcttcggccgcatcaagcgcagcatgagctccacgtcggcctccgcagtgcgcagctacgatggcgcggcgcagcggcccgaggcacaggccttccaccggctgctggctgacatcacgcacgacatcgaggcgctggcccccgatgacgacgacgacgacgaggatgagccccggggctccaggggcgggagcgacgccgcagaagacaactacctgtagccaccgcccctgcggacggcgtggctcagcagcccacctctgagtctcagctttgcttcggggaccctatccccagggcccccccatcacacctggcggggccggggggtcttcactccagggtctcgctccctgcccttggggcccggggccatgcagtacctggagtgtcctgcagggggaaagcgaagccgggccctgaagtccggggcagtcacccggggctcctgggccgctctgccgggctggggctgagcagcgatcctgctttgtcccagaagtccagagggatcagccccagaacacaccctcctccccgggacgccgcagctttctggaggctgaggaaggcatgaagagtgggctccacctgctggccgactgagaaaagaatttccagaactcggtcctattttacagattgagaaactatggttcaagaagagaggacggggcttgagggaatctcctgattctccttatatgacctcaaactgaccatactaaacagtgtagaaggtctttttaaggctctaaatgtcagggtctcccatcccctgatgcctgacttgtacagtcagtgtggagtagacggtttcctccacccagggttgactcagggggatgatctgggtcccattctggtcttaagaccccaaacaagggttttttcagctccaggatctggagcctctatctggttagtgtcgtaacctctgtgtgcctcccgttaccccatctgtccagtgagctcagcccccatccacctaacagggtggccacagggattactgagggttaagaccttagaactgggtctagcacccgataagagctcaataaatgttgttcctttccacatcaaaaaaaaaa

SEQ ID NO: 332521 - DNA, 480 bp, Homo sapiens
ttagagttgtcactgaattctataaaggggttctaagatccagagagtagccatcgaattttgatggaaaaattcttgaaagccaatttaaagggctctataggtgtgtatctttgtgcgcatcttcacacactgttttaggaagcagggtaacatcttggtcattggtgaggacctgagctctctctcctcctccctgggccaggacgctgcagaggagtcctgcgcactcatctgtcaggtcttccagatcatctacggggaccagagtattgagtgtgtggaccgggctggctaccactacacatccacacctgaacggccatggctctgcagccgcagtgagtaccagaactcctggcctcccctcctgtgaaacatcccaaaaaggccaggggagggaagatgtcccaggacttgggctgatgaaggtatttagggctcctgatctctgccataattacagtgtaccccacaatt

SEQ ID NO: 332522 - DNA, 1791 bp, Homo sapiens
ctgggagcggaggcaggcgggcagcggcgggggaggcagctgggagcggcgccaccccggccccaacccgctcgacccgcaggaccccagccccgacgcctactgcaacctggtcatcctggctgtagccaacagggacgctgcagaggagtcctgcgcactcatctgtcaggtcttccagatcatctacggggaccagagtattgagtgtgtggaccgggctggctaccactacacatccacacctgaacggccatggctctgcagccgcagtgagagctgccacacagatgggacgtatgcctatgatgccgacttcagctgctgcagctcctttaatggctcccaggacacctttgaagcatgttacagcggcacgtccacaccttctttccatggctcccactgcagcggcagcgaccacagcagtctgggcttggagcagttacaggattacatggtcacgttgcggagtaagctggggcccctcgagatccagcagtttgcgatgctgctgcgggagtaccggctggggctgcccatccaggactattgcacaggcctgctgaagctctacggagaccggcgcaagttcctcctccttgggatgcggcccttcatcccggaccaggacatcggctacttcgagggcttcctggagggcgtgggcatccgcgagggcggatcctcactgacagcttcggccgcatcaagcgcagcatgagctccacgtcggcctccgcagtgcgcagctacgatggcgcggcgcagcggcccgaggcacaggccttccaccggctgctggctgacatcacgcacgacatcgaggcgctggcccccgatgacgacgacgacgacgaggatgagccccggggctccaggggcgggagcgacgccgcagaagacaactacctgtagccaccgcccctgcggacggcgtggctcagcagcccacctctgagtctcagctttgcttcggggaccctatccccagggcccccccatcacacctggcggggccggggggtcttcactccagggtctcgctccctgcccttggggcccggggccatgcagtacctggagtgtcctgcagggggaaagcgaagccgggccctgaagtccggggcagtcacccggggctcctgggccgctctgccgggctggggctgagcagcgatcctgctttgtcccagaagtccagagggatcagccccagaacacaccctcctccccgggacgccgcagctttctggaggctgaggaaggcatgaagagtgggctccacctgctggccgactgagaaaagaatttccagaactcggtcctattttacagattgagaaactatggttcaagaagagaggacggggcttgagggaatctcctgattctccttatatgacctcaaactgaccatactaaacagtgtagaaggtctttttaaggctctaaatgtcagggtctcccatcccctgatgcctgacttgtacagtcagtgtggagtagacggtttcctccacccagggttgactcagggggatgatctgggtcccattctggtcttaagaccccaaacaagggttttttcagctccaggatctggagcctctatctggttagtgtcgtaacctctgtgtgcctcccgttaccccatctgtccagtgagctcagcccccatccacctaacagggtggccacagggattactgagggttaagaccttagaactgggtctagcacccgataagagctcaataaatgttgttcctttccacatcaaaaaaaaaa

SEQ ID NO: 332523 - DNA, 405 bp, Homo sapiens
acaacaccaattttacacaatctcctccaaaaaatagaagcagaggaaacacttctcaattcatttcatgaggccaatattatgagacgaaataaaaagaaagaaaattacagaccagtatctcttattaattctgatgcaaaaatccttgacaaaatataagcaagccaaatccaacaatgcataaaaataattattcaccattatcaagttagatttattacagctatggtagttcaacattcaaaaatcaatcaatccaccatatcaacaagccaaggaaagaaaagcatataatcatatgaattgatgcaaaaagaaagcatttgacaaaatccaaaactcattaagtctcccagcaagtcataaatagtgcaaaattatttcaacttgataaagaacatg

SEQ ID NO: 332524 - DNA, 527 bp, Homo sapiens
tggggtaagggtgattaggttttaatgagatggtaaggggtgcacgatcggtcgccaaggagggagtagaggtatcttatacttgtgggctaaggtggggggatacaagaggaggacgcaaaggaggctttggattgggaagaagggcggcaatgagatatagatgtagtccaggaatagtcagggaagcagataatttagttaaagtgtctcagcctaataagggaactgggcaggtggggataactaaaaaggagtgcttaaaagagtattgtctaagttggcaccagagttggggagttttaagaggtttagaagcctggccgtcaatacccacaacagttatggaggcaagggaaacaggcccttgaaaagaaggtaatgtggagtgggtagcctccgtattgattaagaaggggacggacttaccctccaccgtgagagttacctaaagctcggcatccgtgatggtctacggggcttctgaggcgatcaggcagcatcagtcttcagccggtaagtcaaga

SEQ ID NO: 332525 - DNA, 245 bp, Homo sapiens
cccaggagttcaagaccagcttaggcaacatggtgagactctctacaaaaaattaaaaaaaaaaaaaaattagccagccgtggtggaatacgcctgttgtctcagcttctcagaaggctgaggtggcgaatacgcctgttgtcccagcttctcagaaggctgaggtggcaggattgcttgagcgtgggaggtcaaggctgcagagggccatgatcatgccactgcgctccaacctgggtgacaga

SEQ ID NO: 332526 - DNA, 788 bp, Homo sapiens
ggcattctatacatcctcaggttgcaaagtggctgcaggacttatattccatttcaatggaagttagatactaaaagggagaaataaaagaacaaaacctgtaatttacatatccaagctatgcaagagaccaagattattaaagcagggcgcacaatgctcctcagcccctggatttaaagtgggggtgaaaagcatttatagataagaatttgaaattcaaatgaaggaacaagtagtctgtctaaaatgctggcctccgcagatactgaccttccgtacaaaaggtagcggatttttattttcaggcactaaagaaaagagaatgaattgtgtgtcgtgcactcagattagtgataacgataaaacgtagcaaaccttttgatgcttggtgcctaattgaaggaaatagaggagagtggtaaagtaaggagtgaacatagccaggagaataattaacagcttcatcaggcaaaacttaccattcgtatgtgtatctaacacacgctaatgtcagttggattgagacttgatgtggagcaaatttctttaaaagataatgaattgccgctcttcgaggaacaatttgaaatgcgtcaatgtcacccttatttataacaccactagggaatggcaggaaagttgagatctaaacattttatttctctaaacaggagtcatgatgacgtggacctcattagagttatcactccacctgtggaaactaaaacagataagattgatataagcacctagggatttatagacgtaatacctattatcactaa

SEQ ID NO: 332527 - DNA, 176 bp, Homo sapiens
acaacttgagtaatgggaggggtagtggagaggaagaggggctgaacagacgtcagcagggtgcaaggggaggatgggttgcctaggaaaccaaacagtaaagaatgagcggaaaaatcattagctgaaaaacctctgaaatgcttttacaagagctcaatccttcatcccaaaag

SEQ ID NO: 332528 - DNA, 1028 bp, Homo sapiens
gttgttagatgtaataaaaatgtgggaagggcatgctggctgatcgaatcagtatctgaagagaacttgagtggatagaatgctggaattactgaaataaaatgtactaggtttgcaaaaccaatagcatgcacatgtgttgggctgaggttcatgtgtcagagactcagttgtagaaggaactttgaatctggcaggcacttaactgtggctgctcagaactaatgtatctggggctgcttgagcaggggctgaggtcagaggcagggagtgagctctccatcatccttgactcagacccagctccgcaggagctccatggtcatccctggagctcatgtggagtgcaaggtccgggagtgggggcgctgacagaaacaaatctggggggatcagccaggtcagcaggggacagagatcatgtcttttagaagaatgtgggcttcctgacctatagaagggcagctgttcaccccctgcagatgatagcagggatgatctggggcctcaggagcgcctttctgttgttggcccaataattcaaagacaggaactgggcagtgcccttaatatctgcgaagacttccacattcagtgtctcttacaaggagtgagttccaggatacagggggtatctaaggccaggtatggtggcgtgcattggtagtctcaactacttaggaggctgagcccaggagttccaggctgcagtgagctgtgattgcccctaagaaagccactgcactccagccagggcagcatagtaagaacctatctctaaaaaaaaaaaaaaagaaaagaaaagaaaagaaagaaaaagaggtatctaaggagtctgtcacaaaatcctccttattttcagtcttagaatttgcaaggagggttacatctgtgctatgtaagtccccttcaatgtaagcatgttcatttcccaaaagggccttactcatttagaaaactttaaagtaaacaagggaggaagctagtgcttcattaatcagtataaagtaatgttgcttcattgagca

SEQ ID NO: 332529 - DNA, 589 bp, Homo sapiens
aggttgttttctgtcagtaactcgggagtgctgtggcctttctgttgagcatgctctgtagtccacacgtttccacatagtggtgttttctttgcacagttttgtaggaagactttatgagtgctgtaactctactcccctttttgctctcataagaagcattataaaatgttaacttatgttattcacagggcatgtaaggagatgggaaggaatagaggtatcagtacatatgtccatgctcctccatagattttcttctggttggtagaaatgttgagcttttcattcctaaacattgaacattgaatgtgcaaggtgaattcctagaaacttgaatgcagtcttaaaagccaaatgataacattggtttttccaaaaatgttacacatttagaaaagagtcccccttcccctcttctctttgcccacattcctaagacaagtaaggccaggaaaaaggattgatcctggtgtcataaaatatgagtgaaaatttcaaagtcctttgttagcttaatcttttcagttttgtagagtttgaatagaccaactgatacttaaataactcagtattagaaatgacaggt

SEQ ID NO: 332530 - DNA, 453 bp, Homo sapiens
gccctccctgtcactctcccaccacagcatcccaatttctccaactcttcactgcaagcctggaagccaggcactctccaaaggtcacaataaagattggcaatcaaatgtccacagaggataagcaggcaacataagtgactgggacaagtcacccgaaacacacagcactctccatctaccaaacgttttccagaacacagccacatgaaatcttttccttttcttcactctgccacaaggcaagcaagaggacaaatggcaactaacatatcctgggaactggagaaaattcccagctgtataagtagggcagccactcatcaagcaaacggctgctctgcagaacaactctgtgtcccagggtgccagctccttccatttccccagaaaaagaaatcttaatctttatgttaaatctccctcacaagcattggcaactaatttaacagc

SEQ ID NO: 332531 - DNA, 423 bp, Homo sapiens
aaataaatgctagctaccatttggtgacatggatcctgactagggccaagtgctattccagggccttcccagcactaacccacacaccctccacaaggacttcatgaagtcctcactcttttttttattttcattttttttttttgagatggagtcttgctctgtcatccagcctggagtgcaatagtgccatcttggctcactgcaacctccgcctcccgggttcaagtgattgttttgcctcagcctcctgagtagctgggattacaggcgcgcaccaccacgcccagctaatttttgtatttttagtagagacggggtttcaccatgttggtcaagctggtctcgaacttctgacctcgtgatctgcctgcctcggcctcccaaagtgttgggattacaggcttgagtcacggcgcccag

SEQ ID NO: 332532 - DNA, 535 bp, Homo sapiens
tgctcacttcccgagagcactctgtatgcccactgcagtgtttgaagccgcacacatgtgttctctggaacatcgcaccactccagcaaggtggctgtgggtatgtccattgtacagatgagaaaactttgagtcgtgccaggtgaaatgacttgttccttgtcaaagctagagagtggcagagtgggcatgtgacctcaggtctctttggcttccaagatcaccactgggttccaccactagagtctcgtgttgcacccagctttggaaagggaattctaaaagccaagataccctggaatcagactggagcagataaacctcatggcttttgggggggacttggagctttctcttgtcaggattcagagttgggtcactgctttgagcacgtgttgcgtatttgtatctgcatgtttaggtatttgcacgtgtacgtacaagttaaagaagggatttggatactggagggtctgtatcactggcaagtgattccagggaggccttgtgggcaggtgtaaagagtcatcccagg

SEQ ID NO: 332533 - DNA, 137 bp, Homo sapiens
gtgcatagcgtcacatcatgtagttccaaccttacagatatcaatcctactttatctgagggatagggggctgtggtggctatgaaaatgcaccacccaatttcctgttgcagagagtctcattgcacccagatcct

SEQ ID NO: 332534 - DNA, 504 bp, Homo sapiens
tttctattggtctatcttccattccagagattctttatatagccatgtgaatgtgtgtttgttttttatttggtttttgtttttatctttacatttaagtttaggaagtttctatttgtctatattccatcccaaagattctcttccaggtttgtaaatgtcagcagtgactctgaagtcacctgtctctcaggatttcagaatgactatttacctgtgttctcagtttctaaagggtacagataaatgagttttgtattattccattcttgcattgctataaaaagaaaacctgagactgggtaatttataaataaaaggtttaattggttcacagtttggcaggctataccagaagcatagcagcttttggggaggcctcgggaaacttagaatcatgatggaaggcaaagcagctggtgtcttcatgtggccaaagcaggaagacgagaaagaggaaggaggtgctacccacttttaaacaaccaggactcgtgagaactc

SEQ ID NO: 332535 - DNA, 447 bp, Homo sapiens
attaagatctgaagctgggaaacttccttccagaccttggctcttcttgaaggcttctgttttccatgtggctcttaggaaggcccagagaatgcttgcttagcaacctgccgcaaccccagaagatctgagtttagaaggggagcggaatccatccacagtggagctgatttgcatgacagggcttgtcattgctgaggacctggggagtcaccactcccgaccctgcaaggtccttgctgtgtgactttgcgcagctgactggagcttcacaatttcctaggatatggggcctatgtttattctccctgacttccagccagtcacaacatgttgtttaccccttgtggagtttgacgttgtattgttttttctttttcttttttttttttttaattttagtttaagttctgggatacatgtgcagaacgtgcaggtttgttacat

SEQ ID NO: 332536 - DNA, 567 bp, Homo sapiens
ggggtctgcagctggcccgtggacatgcgatggcacttacattcttctggtttgcttgaggccacatatagaaaagtatctataaagccctcatgttaatgtctcacatgtagagccaggtggccttttgagcttaggtagctttgtgcctatttatcgtctgggctttcaaaaagagtttgtggaataggtatatatgagaggtacatgtatttcctggatggacagaagccgtgactccctgtttagtatggagccaggcaagtctggcactcagtattcagtttagcacttcctgcacacaggcaggctcatctagtctccagcccagccctacaagcccctcacatgcccagaatgccagtgggaaactaacactctgggaattgcctataagcctgtagactccatagcctcctgccacagctgagtgtgagtgtggacctcagcagctgaggaactctgctccaaggctttgcttggtggagttcagcagcaaaaccctatgtgacagcctgtcctgtcaaaaacttgctcctgctcccacacaagctgccttttttttct

SEQ ID NO: 332537 - DNA, 199 bp, Homo sapiens
ccatgtttactaagaggcagatgccattttatgccaatgccaggacccgagagaaatcatacttgaataagacgccttcccctctccttttctccttccccagtcgcttctccagatattgcacccgctcctaattcgcgccctttgtgttactgtactatatttgacactttacttgatagttccttagtggcaaaaa

SEQ ID NO: 332538 - DNA, 231 bp, Homo sapiens
attgactagggagtcctttccctattgcttcttttgtcaactctgtcagaggttagatggttgtaggtgtgcggccttatttctgggctctctattctgttccattggtctgtgtatctgtttttgtccagtaccatgctgttttggttactgtagccctgtaagtatagtttaaagtcggtagtgtgatgcctctggttttgttttttgttgttgttttgttgttgttgt

SEQ ID NO: 332539 - DNA, 464 bp, Homo sapiens
aaggcagccaatagagatgagttaaactaagcaggaaagaaaatggtcaaagatggatctggaggaataggtagctacgagcacatgtaagtcctcatagattatattaaggatttgaactatctcctaagagagtttaaatttggattttcatttttaaaagggcattctcagtacctattgagtataatgttcactatttaggtaatggatatccaaatagaagcccaatccccagcagtacataatatgcccatatagcaacatgcacatgtactccctgaatctaaaatgaaacaagatttaagaagtaaagaataaataaataaaaagggcatcctggctgccaagtgaacaaagagcctgaagtgatgctacaagagtaagcatgaggttaaagggtcctgatgcctggctaagataaggatcatgctaggagctatgaagagtgatggagtgagtac

SEQ ID NO: 332540 - DNA, 374 bp, Homo sapiens
acgctgctaaggggattctaggctgtgtcgtagcaattccctgctcttaacagtgtggaggatttctaaggcgctacagtgctaaactagattttcgtatcctaatttatatgaagggaccataaagcattagttgaaataaataggtttttcattaagcaaataactgatagtaatatacgagattttcagaatgatatctgatgtgaattagccacataaaatttttggtggcttggccttggaagtcagatttttttttctctaatatggaaaaagaacattcatgggaattaaaaggtcactgtagttgaattctcagttgtatagattgtcccacttgttaaccactcagcagacattagctgagtgct

SEQ ID NO: 332541 - DNA, 168 bp, Homo sapiens
tgtttggcagtgagacaacaccatctctgtgctgatccagctggccctcaactgatatgccattccatggggcaaaacagccagaggagtcagcactttctccttaacctcttgcatataccaacacagaaagtgattaaaggcttgactgttactttcattttggct

SEQ ID NO: 332542 - DNA, 866 bp, Homo sapiens
tatctcctattgtggtagcatagggactctctggaatacccttatctcttctagagatttgtattgaatgtcaccaaaagtacttttctacgtagtatttcattatgagatcagttggtcctcaggtattgttgctattcccgttttacacgaaaggaatctaatgtttaacagtcatcttaaatgacttgctcccagtcacacagctcattagcggcagagctgggataagcagccaggtctcacaaagtcctaacccagtgttctactacacaacactctctcaaaattattgggaattattttaggctcatccaaaatgaccagaatggaatgagttatttctgtcccttcttaactccaccacattatcttgggctactttataaactgtgccttaaatgaaaaatactactctttcccgcaggataaccagcagctgtctgccagcacaaagatacttcttccaagaatctttgggagctggcgagatgtatacatggtcaaaccaggatttctagttgataatagtatgaccataatccagacaatagactacaatccaagtcttcccagcaacgtctttcctatttaacctgttttggtttttttgagatggggtcttgctctgttgcccaggctggagagcagtggtacgatcttggctcactgcagcctcgacctcctggtctcaagcaatcctcccacctcagcttcccgagtagctgggactatgagcgtgcgccaccacacctggctaacttttgtagagacagggtctcgcaatgttgcccagactggtcttgaactcttggctttaagtgatactcccactttggcctccaaaagtgctgggattacaagca

SEQ ID NO: 332543 - DNA, 128 bp, Homo sapiens
acaagagctgaggacatattctagcccccaagaagtgctggagtattcccactcctcagcaatttttacttttgtctacccagtattggtaaaaagtacctgtggtgtcaaaactcttgagatacaaa

SEQ ID NO: 332544 - DNA, 299 bp, Homo sapiens
gcggccgcctactactactactactactaattcgcggccgcgtcgaccagggtttcaccgtgttggctaggatggtgtctatctcttgaccttgtgatccacccgcctcagcctcccagagtgctgggattacaggtgcgagccactgcgcctggctggttttcatgaatcttgatagacatctataacgttattattttcagtggtgtgcagcatttttgcttcatgagtatgacctaggtatagagatctgataacttgaattcagaatattaagaaaatgaagtaactgattttct

SEQ ID NO: 332545 - DNA, 6867 bp, Homo sapiens
tgccggtggcctctgtggccgtccaggctagcggcggcccgcaggcggcggggagaaagactctctcacctggtcttgcggctgtggccaccgccggccaggggtgtggagggcgtgctgccggagacgtccgccgggctctgcagttccgccgggggtcgggcagctatggagccgcggcccacggcgccctcctccggcgccccgggactggccggggtcggggagacgccgtcagccgctgcgctggccgcagccagggtggaactgcccggcacggctgtgccctcggtgccggaggatgctgcgcccgcgagccgggacggcggcggggtccgcgatgagggccccgcggcggccggggacgggctgggcagacccttggggcccaccccgagccagagccgtttccaggtggacctggtttccgagaacgccgggcgggccgctgctgcggcggcggcggcggcggcggcagcggcggcggctggtgctggggcgggggccaagcagacccccgcggacggggaagccagcggcgagagcgagccagctaaaggcagcgaggaagccaagggccgcttccgcgtgaacttcgtggacccagctgcctcctcgtcggctgaagacagcctgtcagatgctgccggggtcggagtcgacgggcccaacgtgagcttccagaacggcggggacacggtgctgagcgagggcagcagcctgcactccggcggcggcggcggcagtgggcaccaccagcactactattatgatacccacaccaacacctactacctgcgcaccttcggccacaacaccatggacgctgtgcccaggatcgatcactaccggcacacagccgcgcagctgggcgagaagctgctccggcctagcctggcggagctccacgacgagctggaaaaggaaccttttgaggatggctttgcaaatggggaagaaagtactccaaccagagatgctgtggtcacgtatactgcagaaagtaaaggagtcgtgaagtttggctggatcaagggtgtattagtacgttgtatgttaaacatttggggtgtgatgcttttcattagattgtcatggattgtgggtcaagctggaataggtctatcagtccttgtaataatgatggccactgttgtgacaactatcacaggattgtctacttcagcaatagcaactaatggatttgtaagaggaggaggagcatattatttaatatctagaagtctagggccagaatttggtggtgcaattggtctaatcttcgcctttgccaacgctgttgcagttgctatgtatgtggttggatttgcagaaaccgtggtggagttgcttaaggaacattccatacttatgatagatgaaatcaatgatatccgaattattggagccattacagtcgtgattcttttaggtatctcagtagctggaatggagtgggaagcaaaagctcagattgttcttttggtgatcctacttcttgctattggtgatttcgtcataggaacatttatcccactggagagcaagaagccaaaagggttttttggttataaatctgaaatatttaatgagaactttgggcccgattttcgagaggaagagactttcttttctgtatttgccatcttttttcctgctgcaactggtattctggctggagcaaatatctcaggtgatcttgcagatcctcagtcagccatacccaaaggaacactcctagccattttaattactacattggtttacgtaggaattgcagtatctgtaggttcttgtgttgttcgagatgccactggaaacgttaatgacactatcgtaacagagctaacaaactgtacttctgcagcctgcaaattaaactttgatttttcatcttgtgaaagcagtccttgttcctatggcctaatgaacaacttccaggtaatgagtatggtgtcaggatttacaccactaatttctgcaggtatattttcagccactctttcttcagcattagcatccctagtgagtgctcccaaaatatttcaggctctatgtaaggacaacatctacccagctttccagatgtttgctaaaggttatgggaaaaataatgaacctcttcgtggctacatcttaacattcttaattgcacttggattcatcttaattgctgaactgaatgttattgcaccaattatctcaaacttcttccttgcatcatatgcattgatcaatttttcagtattccatgcatcacttgcaaaatctccaggatggcgtcctgcattcaaatactacaacatgtggatatcacttcttggagcaattctttgttgcatagtaatgttcgtcattaactggtgggctgcattgctaacatatgtgatagtccttgggctgtatatttatgttacctacaaaaaaccagatgtgaattggggatcctctacacaagccctgacttacctgaatgcactgcagcattcaattcgtctttctggagtggaagaccacgtgaaaaactttaggccacagtgtcttgttatgacaggtgctccaaactcacgtccagctttacttcatcttgttcatgatttcacaaaaaatgttggtttgatgatctgtggccatgtacatatgggtcctcgaagacaagccatgaaagagatgtccatcgatcaagccaaatatcagcgatggcttattaagaacaaaatgaaggcattttatgctccagtacatgcagatgacttgagagaaggtgcacagtatttgatgcaggctgctggtcttggtcgtatgaagccaaacacacttgtccttggatttaagaaagattggttgcaagcagatatgagggatgtggatatgtatataaacttatttcatgatgcttttgacatacaatatggagtagtggttattcgcctaaaagaaggtctggatatatctcatcttcaaggacaagaagaattattgtcatcacaagagaaatctcctggcaccaaggatgtggtagtaagtgtggaatatagtaaaaagtccgatttagatacttccaaaccactcagtgaaaaaccaattacacacaaagttgaggaagaggatggcaagactgcaactcaaccactgttgaaaaaagaatccaaaggccctattgtgcctttaaatgtagctgaccaaaagcttcttgaagctagtacacagtttcagaaaaaacaaggaaagaatactattgatgtctggtggctttttgatgatggaggtttgaccttattgataccttaccttctgacgaccaagaaaaaatggaaagactgtaagatcagagtattcattggtggaaagataaacagaatagaccatgaccggagagcgatggctactttgcttagcaagttccggatagacttttctgatatcatggttctaggagatatcaataccaaaccaaagaaagaaaatattatagcttttgaggaaatcattgagccatacagacttcatgaagatgataaagagcaagatattgcagataaaatgaaagaagatgaaccatggcgaataacagataatgagcttgaactttataagaccaagacataccggcagatcaggttaaatgagttattaaaggaacattcaagcacagctaatattattgtcatgagtctcccagttgcacgaaaaggtgctgtgtctagtgctctctacatggcatggttagaagctctatctaaggacctaccaccaatcctcctagttcgtgggaatcatcagagtgtccttaccttctattcataaatgttctatacagtggacagccctccagaatggtacttcagtgcctagtgtagtaactgaaatcttcaatgacacattaacatcacaatggcgaatggtgacttttctttcacgatttcattaatttgaaagcacacaggaaagttgctccattgataacgtgtatggagacttcggttttagtcaattccatatctcaatcttaatggtgattcttctctgttgaactgaagtttgtgagagtagttttcctttgctacttgaatagcaataaaagcgtgttaactttttgattgatgaaagaagtacaaaaagcctttagccttgaggtgccttctgaaattaaccaaatttcatccatatatcctcttttataaacttatagaatgtcaaactttgccttcaactgtttttatttctagtctcttccactttaaaacaaaatgaacactgcttgtcttcttccattgaccatttagtgttgagtactgtatgtgttttgttaattctataaaggtatctgttagatattaaaggtgagaattagggcaggttaatcaaaaatggggaaggggaaatggtaaccaaaaagtaaccccatggtaaggtttatatgagtatatgtgaatatagagctaggaaaaaaagcccccccaaatacctttttaacccctctgattggctattattactatatttattattatttattgaaaccttagggaagattgaagattcatcccatacttctatataccatgcttaaaaatcacgtcattctttaaacaaaaatactcaagatcatttatatttatttggagagaaaactgtcctaatttagaatttccctcaaatctgagggacttttaagaaatgctaacagatttttctggaggaaatttagacaaaacaatgtcatttagtagaatatttcagtatttaagtggaatttcagtatactgtactatcctttataagtcattaaaataatgtttcatcaaatggttaaatggaccactggtttcttagagaaatgtttttaggcttaattcattcaattgtcaagtacacttagtcttaatacactcaggtttgaacagattattctgaatattaaaatttaatccattcttaatattttaaaacttttgttaagaaaaactgccagtttgtgcttttgaaatgtctgttttgacatcatagtctagtaaaattttgacagtgcatatgtactgttactaaaagctttatatgaaattattaatgtgaagtttttcatttataattcaaggaaggatttcctgaaaacatttcaagggatttatgtctacatatttgtgtgtgtgtgtgtatatatatgtaatatgcatacacagatgcatatgtgtatatataatgaaatttatgttgctggtattttgcattttaaagtgatcaagattcattaggcaaactttggtttaagtaaacatatgttcaaatcagattaacagatacaggtttcatagagaacaaaggtgatcatttgaagggcatgctgtaatttcacacaattttccagttcaaaaatggagaatacttcgcctaaaatactgttaagtgggttaattgatacaagtttctgtggtggaaaatttatgcaggttttcacgaatccttttttttttttttttttttttgagacggagtctcgctctgttgccacgctggaatgcagtaacgtgatcttggctcactgcgacctccacctccccagttcaagcgattctcctgcctcagcctccctagtagctgggactacgggtgcacgccaccatgcccagctaatttttgtattttgagtagagacagggtttcaccgtgttggctaggatggtgtctatctcttgaccttgtgatccacccgcctcagcctcccagagtgctgggattacaggtgcgagccactgcgcctggctggttttcatgaatcttgatagacatctataacgttattattttcagtggtgtgcagcatttttgcttcatgagtatgacctaggtatagagatctgataacttgaattcagaatattaagaaaatgaagtaactgattttctaaaaaaaaaaaaaaaaaaaaatttctacattataactcacagcattgttccattgcaggttttgcaatgtttgggggtaaagacagtagaaatattattcagtaaacaataatgtgtgaacttttaagatggataatagggcatggactgagtgctgctatcttgaaatgtgcacaggtacacttaccttttttttttttttttttaagtttttcccattcaggaaaacaacattgtgatctgtactacaggaaccaaatgtcatgcgtcatacatgtgggtataaagtacataaaatatatctaactattcataatgtggggtgggtaatactgtctgtgaaataatgtaagaagcttttcacttaaaaaaaatgcattactttcacttaacactagacaccaggtcgaaaattttcaaggttatagtacttatttcaacaattcttagagatgctagctagtgttgaagctaaaaatagctttatttatgctgaattgtgatttttttatgccaaaatttttttagttctaatcattgatgatagcttggaaataaataattatgccatggcatttgacagttcattattcctataagaattaaattgagtttagagagaatggtggtgttgagctgattattaacagttactgaaatcaaatatttatttgttacattattccatttgtattttaggtttccttttacattctttttatatgcattctgacattacatattttttaagactatggaaataatttaaagatttaagctctggtggatgattatctgctaagtaagtctgaaaatgtaatattttgataatactgtaatatacctgtcacacaaatgcttttctaatgttttaaccttgagtattgcagttgctgctttgtacagaggttactgcaataaaggaagtggattcattaaacctatttaatgtccattctt

SEQ ID NO: 332546 - DNA, 6813 bp, Homo sapiens
tgccggtggcctctgtggccgtccaggctagcggcggcccgcaggcggcggggagaaagactctctcacctggtcttgcggctgtggccaccgccggccaggggtgtggagggcgtgctgccggagacgtccgccgggctctgcagttccgccgggggtcgggcagctatggagccgcggcccacggcgccctcctccggcgccccgggactggccggggtcggggagacgccgtcagccgctgcgctggccgcagccagggtggaactgcccggcacggctgtgccctcggtgccggaggatgctgcgcccgcgagccgggacggcggcggggtccgcgatgagggccccgcggcggccggggacgggctgggcagacccttggggcccaccccgagccagagccgtttccaggtggacctggtttccgagaacgccgggcgggccgctgctgcggcggcggcggcggcggcggcagcggcggcggctggtgctggggcgggggccaagcagacccccgcggacggggaagccagcggcgagagcgagccagctaaaggcagcgaggaagccaagggccgcttccgcgtgaacttcgtggacccagctgcctcctcgtcggctgaagacagcctgtcagatgctgccggggtcggagtcgacgggcccaacgtgagcttccagaacggcggggacacggtgctgagcgagggcagcagcctgcactccggcggcggcggcggcagtgggcaccaccagcactactattatgatacccacaccaacacctactacctgcgcaccttcggccacaacaccatggacgctgtgcccaggatcgatcactaccggcacacagccgcgcagctgggcgagaagctgctccggcctagcctggcggagctccacgacgagctggaaaaggaaccttttgaggatggctttgcaaatggggaagaaagtactccaaccagagatgctgtggtcacgtatactgcagaaagtaaaggagtcgtgaagtttggctggatcaagggtgtattagtacgttgtatgttaaacatttggggtgtgatgcttttcattagattgtcatggattgtgggtcaagctggaataggtctatcagtccttgtaataatgatggccactgttgtgacaactatcacaggattgtctacttcagcaatagcaactaatggatttgtaagaggaggaggagcatattatttaatatctagaagtctagggccagaatttggtggtgcaattggtctaatcttcgcctttgccaacgctgttgcagttgctatgtatgtggttggatttgcagaaaccgtggtggagttgcttaaggaacattccatacttatgatagatgaaatcaatgatatccgaattattggagccattacagtcgtgattcttttaggtatctcagtagctggaatggagtgggaagcaaaagctcagattgttcttttggtgatcctacttcttgctattggtgatttcgtcataggaacatttatcccactggagagcaagaagccaaaagggttttttggttataaatctgaaatatttaatgagaactttgggcccgattttcgagaggaagagactttcttttctgtatttgccatcttttttcctgctgcaactggtattctggctggagcaaatatctcaggtgatcttgcagatcctcagtcagccatacccaaaggaacactcctagccattttaattactacattggtttacgtaggaattgcagtatctgtaggttcttgtgttgttcgagatgccactggaaacgttaatgacactatcgtaacagagctaacaaactgtacttctgcagcctgcaaattaaactttgatttttcatcttgtgaaagcagtccttgttcctatggcctaatgaacaacttccaggtaatgagtatggtgtcaggatttacaccactaatttctgcaggtatattttcagccactctttcttcagcattagcatccctagtgagtgctcccaaaatatttcaggctctatgtaaggacaacatctacccagctttccagatgtttgctaaaggttatgggaaaaataatgaacctcttcgtggctacatcttaacattcttaattgcacttggattcatcttaattgctgaactgaatgttattgcaccaattatctcaaacttcttccttgcatcatatgcattgatcaatttttcagtattccatgcatcacttgcaaaatctccaggatggcgtcctgcattcaaatactacaacatgtggatatcacttcttggagcaattctttgttgcatagtaatgttcgtcattaactggtgggctgcattgctaacatatgtgatagtccttgggctgtatatttatgttacctacaaaaaaccagatgtgaattggggatcctctacacaagccctgacttacctgaatgcactgcagcattcaattcgtctttctggagtggaagaccacgtgaaaaactttaggccacagtgtcttgttatgacaggtgctccaaactcacgtccagctttacttcatcttgttcatgatttcacaaaaaatgttggtttgatgatctgtggccatgtacatatgggtcctcgaagacaagccatgaaagagatgtccatcgatcaagccaaatatcagcgatggcttattaagaacaaaatgaaggcattttatgctccagtacatgcagatgacttgagagaaggtgcacagtatttgatgcaggctgctggtcttggtcgtatgaagccaaacacacttgtccttggatttaagaaagattggttgcaagcagatatgagggatgtggatatgtatataaacttatttcatgatgcttttgacatacaatatggagtagtggttattcgcctaaaagaaggtctggatatatctcatcttcaaggacaagaagaattattgtcatcacaagagaaatctcctggcaccaaggatgtggtagtaagtgtggaatatagtaaaaagtccgatttagatacttccaaaccactcagtgaaaaaccaattacacacaaagttgaggaagaggatggcaagactgcaactcaaccactgttgaaaaaagaatccaaaggccctattgtgcctttaaatgtagctgaccaaaagcttcttgaagctagtacacagtttcagaaaaaacaaggaaagaatactattgatgtctggtggctttttgatgatggaggtttgaccttattgataccttaccttctgacgaccaagaaaaaatggaaagactgtaagatcagagtattcattggtggaaagataaacagaatagaccatgaccggagagcgatggctactttgcttagcaagttccggatagacttttctgatatcatggttctaggagatatcaataccaaaccaaagaaagaaaatattatagcttttgaggaaatcattgagccatacagacttcatgaagatgataaagagcaagatattgcagataaaatgaaagaagatgaaccatggcgaataacagataatgagcttgaactttataagaccaagacataccggcagatcaggttaaatgagttattaaaggaacattcaagcacagctaatattattgtcatgagtctcccagttgcacgaaaaggtgctgtgtctagtgctctctacatggcatggttagaagctctatctaaggacctaccaccaatcctcctagttcgtgggaatcatcagagtgtccttaccttctattcataaatgttctatacagtggacagccctccagaatggtacttcagtgcctagtgtagtaactgaaatcttcaatgacacattaacatcacaatggcgaatggtgacttttctttcacgatttcattaatttgaaagcacacaggaaagttgctccattgataacgtgtatggagacttcggttttagtcaattccatatctcaatcttaatggtgattcttctctgttgaactgaagtttgtgagagtagttttcctttgctacttgaatagcaataaaagcgtgttaactttttgattgatgaaagaagtacaaaaagcctttagccttgaggtgccttctgaaattaaccaaatttcatccatatatcctcttttataaacttatagaatgtcaaactttgccttcaactgtttttatttctagtctcttccactttaaaacaaaatgaacactgcttgtcttcttccattgaccatttagtgttgagtactgtatgtgttttgttaattctataaaggtatctgttagatattaaaggtgagaattagggcaggttaatcaaaaatggggaaggggaaatggtaaccaaaaagtaaccccatggtaaggtttatatgagtatatgtgaatatagagctaggaaaaaaagcccccccaaatacctttttaacccctctgattggctattattactatatttattattatttattgaaaccttagggaagattgaagattcatcccatacttctatataccatgcttaaaaatcacgtcattctttaaacaaaaatactcaagatcatttatatttatttggagagaaaactgtcctaatttagaatttccctcaaatctgagggacttttaagaaatgctaacagatttttctggaggaaatttagacaaaacaatgtcatttagtagaatatttcagtatttaagtggaatttcagtatactgtactatcctttataagtcattaaaataatgtttcatcaaatggttaaatggaccactggtttcttagagaaatgtttttaggcttaattcattcaattgtcaagtacacttagtcttaatacactcaggtttgaacagattattctgaatattaaaatttaatccattcttaatattttaaaacttttgttaagaaaaactgccagtttgtgcttttgaaatgtctgttttgacatcatagtctagtaaaattttgacagtgcatatgtactgttactaaaagctttatatgaaattattaatgtgaagtttttcatttataattcaaggaaggatttcctgaaaacatttcaagggatttatgtctacatatttgtgtgtgtgtgtgtatatatatgtaatatgcatacacagatgcatatgtgtatatataatgaaatttatgttgctggtattttgcattttaaagtgatcaagattcattaggcaaactttggtttaagtaaacatatgttcaaatcagattaacagatacaggtttcatagagaacaaaggtgatcatttgaagggcatgctgtaatttcacacaattttccagttcaaaaatggagaatacttcgcctaaaatactgttaagtgggttaattgatacaagtttctgtggtggaaaatttatgcaggttttcacgaatccttttttttttttttttttttttgagacggagtctcgctctgttgccacgctggaatgcagtaacgtgatcttggctcactgcgacctccacctccccagttcaagcgattctcctgcctcagcctccctagtagctgggactacgggtgcacgccaccatgcccagctaatttttgtattttgagtagagacagggtttcaccgtgttggctaggatggtgtctatctcttgaccttgtgatccacccgcctcagcctcccagagtgctgggattacaggtgcgagccactgcgcctggctggttttcatgaatcttgatagacatctataacgttattattttcagtggtgtgcagcatttttgcttcatgagtatgacctaggtatagagatctgataacttgaattcagaatattaagaaaatgaagtaactgattttctaaaaaaaaaaaaaaaaaaaaatttctacattataactcacagcattgttccattgcaggttttgcaatgtttgggggtaaagacagtagaaatattattcagtaaacaataatgtgtgaacttttaagatggataatagggcatggactgagtgctgctatcttgaaatgtgcacaggtacacttaccttttttttttttttttttaagtttttcccattcaggaaaacaacattgtgatctgtactacaggaaccaaatgtcatgcgtcatacatgtgggtataaagtacataaaatatatctaactattcataatgtggggtgggtaatactgtctgtgaaataatgtaagaagcttttcacttaaaaaaaatgcattactttcacttaacactagacaccaggtcgaaaattttcaaggttatagtacttatttcaacaattcttagagatgctagctagtgttgaagctattctaatcattgatgatagcttggaaataaataattatgccatggcatttgacagttcattattcctataagaattaaattgagtttagagagaatggtggtgttgagctgattattaacagttactgaaatcaaatatttatttgttacattattccatttgtattttaggtttccttttacattctttttatatgcattctgacattacatattttttaagactatggaaataatttaaagatttaagctctggtggatgattatctgctaagtaagtctgaaaatgtaatattttgataatactgtaatatacctgtcacacaaatgcttttctaatgttttaaccttgagtattgcagttgctgctttgtacagaggttactgcaataaaggaagtggattcattaaacctatttaatgtccattctt

SEQ ID NO: 332547 - DNA, 6372 bp, Homo sapiens
  misc_feature (6371)..(6371): n is a, c, g, or t
tgccggtggcctctgtggccgtccaggctagcggcggcccgcaggcggcggggagaaagactctctcacctggtcttgcggctgtggccaccgccggccaggggtgtggagggcgtgctgccggagacgtccgccgggctctgcagttccgccgggggtcgggcagctatggagccgcggcccacggcgccctcctccggcgccccgggactggccggggtcggggagacgccgtcagccgctgcgctggccgcagccagggtggaactgcccggcacggctgtgccctcggtgccggaggatgctgcgcccgcgagccgggacggcggcggggtccgcgatgagggccccgcggcggccggggacgggctgggcagacccttggggcccaccccgagccagagccgtttccaggtggacctggtttccgagaacgccgggcgggccgctgctgcggcggcggcggcggcggcggcagcggcggcggctggtgctggggcgggggccaagcagacccccgcggacggggaagccagcggcgagagcgagccagctaaaggcagcgaggaagccaagggccgcttccgcgtgaacttcgtggacccagctgcctcctcgtcggctgaagacagcctgtcagatgctgccggggtcggagtcgacgggcccaacgtgagcttccagaacggcggggacacggtgctgagcgagggcagcagcctgcactccggcggcggcggcggcagtgggcaccaccagcactactattatgatacccacaccaacacctactacctgcgcaccttcggccacaacaccatggacgctgtgcccaggatcgatcactaccggcacacagccgcgcagctgggcgagaagctgctccggcctagcctggcggagctccacgacgagctggaaaaggaaccttttgaggatggctttgcaaatggggaagaaagtactccaaccagagatgctgtggtcacgtatactgcagaaagtaaaggagtcgtgaagtttggctggatcaagggtgtattagtacgttgtatgttaaacatttggggtgtgatgcttttcattagattgtcatggattgtgggtcaagctggaataggtctatcagtccttgtaataatgatggccactgttgtgacaactatcacaggattgtctacttcagcaatagcaactaatggatttgtaagaggaggaggagcatattatttaatatctagaagtctagggccagaatttggtggtgcaattggtctaatcttcgcctttgccaacgctgttgcagttgctatgtatgtggttggatttgcagaaaccgtggtggagttgcttaaggaacattccatacttatgatagatgaaatcaatgatatccgaattattggagccattacagtcgtgattcttttaggtatctcagtagctggaatggagtgggaagcaaaagctcagattgttcttttggtgatcctacttcttgctattggtgatttcgtcataggaacatttatcccactggagagcaagaagccaaaagggttttttggttataaatctgaaatatttaatgagaactttgggcccgattttcgagaggaagagactttcttttctgtatttgccatcttttttcctgctgcaactggtattctggctggagcaaatatctcaggtgatcttgcagatcctcagtcagccatacccaaaggaacactcctagccattttaattactacattggtttacgtaggaattgcagtatctgtaggttcttgtgttgttcgagatgccactggaaacgttaatgacactatcgtaacagagctaacaaactgtacttctgcagcctgcaaattaaactttgatttttcatcttgtgaaagcagtccttgttcctatggcctaatgaacaacttccaggtaatgagtatggtgtcaggatttacaccactaatttctgcaggtatattttcagccactctttcttcagcattagcatccctagtgagtgctcccaaaatatttcaggctctatgtaaggacaacatctacccagctttccagatgtttgctaaaggttatgggaaaaataatgaacctcttcgtggctacatcttaacattcttaattgcacttggattcatcttaattgctgaactgaatgttattgcaccaattatctcaaacttcttccttgcatcatatgcattgatcaatttttcagtattccatgcatcacttgcaaaatctccaggatggcgtcctgcattcaaatactacaacatgtggatatcacttcttggagcaattctttgttgcatagtaatgttcgtcattaactggtgggctgcattgctaacatatgtgatagtccttgggctgtatatttatgttacctacaaaaaaccagatgtgaattggggatcctctacacaagccctgacttacctgaatgcactgcagcattcaattcgtctttctggagtggaagaccacgtgaaaaactttaggccacagtgtcttgttatgacaggtgctccaaactcacgtccagctttacttcatcttgttcatgatttcacaaaaaatgttggtttgatgatctgtggccatgtacatatgggtcctcgaagacaagccatgaaagagatgtccatcgatcaagccaaatatcagcgatggcttattaagaacaaaatgaaggcattttatgctccagtacatgcagatgacttgagagaaggtgcacagtatttgatgcaggctgctggtcttggtcgtatgaagccaaacacacttgtccttggatttaagaaagattggttgcaagcagatatgagggatgtggatatgtatataaacttatttcatgatgcttttgacatacaatatggagtagtggttattcgcctaaaagaaggtctggatatatctcatcttcaaggacaagaagaattattgtcatcacaagagaaatctcctggcaccaaggatgtggtagtaagtgtggaatatagtaaaaagtccgatttagatacttccaaaccactcagtgaaaaaccaattacacacaaagttgaggaagaggatggcaagactgcaactcaaccactgttgaaaaaagaatccaaaggccctattgtgcctttaaatgtagctgaccaaaagcttcttgaagctagtacacagtttcagaaaaaacaaggaaagaatactattgatgtctggtggctttttgatgatggaggtttgaccttattgataccttaccttctgacgaccaagaaaaaatggaaagactgtaagatcagagtattcattggtggaaagataaacagaatagaccatgaccggagagcgatggctactttgcttagcaagttccggatagacttttctgatatcatggttctaggagatatcaataccaaaccaaagaaagaaaatattatagcttttgaggaaatcattgagccatacagacttcatgaagatgataaagagcaagatattgcagataaaatgaaagaagatgaaccatggcgaataacagataatgagcttgaactttataagaccaagacataccggcagatcaggttaaatgagttattaaaggaacattcaagcacagctaatattattgtcatgagtctcccagttgcacgaaaaggtgctgtgtctagtgctctctacatggcatggttagaagctctatctaaggacctaccaccaatcctcctagttcgtgggaatcatcagagtgtccttaccttctattcataaatgttctatacagtggacagccctccagaatggtacttcagtgcctagtgtagtaactgaaatcttcaatgacacattaacatcacaatggcgaatggtgacttttctttcacgatttcattaatttgaaagcacacaggaaagttgctccattgataacgtgtatggagacttcggttttagtcaattccatatctcaatcttaatggtgattcttctctgttgaactgaagtttgtgagagtagttttcctttgctacttgaatagcaataaaagcgtgttaactttttgattgatgaaagaagtacaaaaagcctttagccttgaggtgccttctgaaattaaccaaatttcatccatatatcctcttttataaacttatagaatgtcaaactttgccttcaactgtttttatttctagtctcttccactttaaaacaaaatgaacactgcttgtcttcttccattgaccatttagtgttgagtactgtatgtgttttgttaattctataaaggtatctgttagatattaaaggtgagaattagggcaggttaatcaaaaatggggaaggggaaatggtaaccaaaaagtaaccccatggtaaggtttatatgagtatatgtgaatatagagctaggaaaaaaagcccccccaaatacctttttaacccctctgattggctattattactatatttattattatttattgaaaccttagggaagattgaagattcatcccatacttctatataccatgcttaaaaatcacgtcattctttaaacaaaaatactcaagatcatttatatttatttggagagaaaactgtcctaatttagaatttccctcaaatctgagggacttttaagaaatgctaacagatttttctggaggaaatttagacaaaacaatgtcatttagtagaatatttcagtatttaagtggaatttcagtatactgtactatcctttataagtcattaaaataatgtttcatcaaatggttaaatggaccactggtttcttagagaaatgtttttaggcttaattcattcaattgtcaagtacacttagtcttaatacactcaggtttgaacagattattctgaatattaaaatttaatccattcttaatattttaaaacttttgttaagaaaaactgccagtttgtgcttttgaaatgtctgttttgacatcatagtctagtaaaattttgacagtgcatatgtactgttactaaaagctttatatgaaattattaatgtgaagtttttcatttataattcaaggaaggatttcctgaaaacatttcaagggatttatgtctacatatttgtgtgtgtgtgtgtatatatatgtaatatgcatacacagatgcatatgtgtatatataatgaaatttatgttgctggtattttgcattttaaagtgatcaagattcattaggcaaactttggtttaagtaaacatatgttcaaatcagattaacagatacaggtttcatagagaacaaaggtgatcatttgaagggcatgctgtaatttcacacaattttccagttcaaaaatggagaatacttcgcctaaaatactgttaagtgggttaattgatacaagtttctgtggtggaaaatttatgcaggttttcacgaatccttttttttttttttttttttttgagacggagtctcgctctgttgccacgctggaatgcagtaacgtgatcttggctcactgcgacctccacctccccagttcaagcgattctcctgcctcagcctccctagtagctgggactacgggtgcacgccaccatgcccagctaatttttgtattttgagtagagacagggtttcaccgtgttggctaggatggtgtctatctcttgaccttgtgatccacccgcctcagcctcccagagtgctgggattacaggtgcgagccactgcgcctggctggttttcatgaatcttgatagacatctataacgttattattttcagtggtgtgcagcatttttgcttcatgagtatgacctaggtatagagatctgataacttgaattcagaatattaagaaaatgaagtaactgattttctaaaaaaaaaaaaaaaaaaaaatttctacattataactcacagcattgttccattgcaggttttgcaatgtttgggggtaaagacagtagaaatattattcagtaaacaataatgtgtgaacttttaagatggataatagggcatggactgagtgctgctatcttgaaatgtgcacaggtacacttaccttttttttttttttttttaagtttttcccattcaggaaaacaacattgtgatctgtactacaggaaccaaatgtcatgcgtcatacatgtgggtataaagtacataaaatatatctaactattcataatgtggggtggggatacaggggtttccatattcagatcagcagcagtagcagagggagagtgacagactcagagctctggggacaccatgcccttgcagctggaggggaactggctctgggccatctctcggcacatgcatgcacccang

SEQ ID NO: 332548 - DNA, 5214 bp, Homo sapiens
tccagattatgcacctactgttccgacccacctatctaaggtgatcttgcagatcctcagtcagccatacccaaaggaacactcctagccattttaattactacattggtttacgtaggaattgcagtatctgtaggttcttgtgttgttcgagatgccactggaaacgttaatgacactatcgtaacagagctaacaaactgtacttctgcagcctgcaaattaaactttgatttttcatcttgtgaaagcagtccttgttcctatggcctaatgaacaacttccaggtaatgagtatggtgtcaggatttacaccactaatttctgcaggtatattttcagccactctttcttcagcattagcatccctagtgagtgctcccaaaatatttcaggctctatgtaaggacaacatctacccagctttccagatgtttgctaaaggttatgggaaaaataatgaacctcttcgtggctacatcttaacattcttaattgcacttggattcatcttaattgctgaactgaatgttattgcaccaattatctcaaacttcttccttgcatcatatgcattgatcaatttttcagtattccatgcatcacttgcaaaatctccaggatggcgtcctgcattcaaatactacaacatgtggatatcacttcttggagcaattctttgttgcatagtaatgttcgtcattaactggtgggctgcattgctaacatatgtgatagtccttgggctgtatatttatgttacctacaaaaaaccagatgtgaattggggatcctctacacaagccctgacttacctgaatgcactgcagcattcaattcgtctttctggagtggaagaccacgtgaaaaactttaggccacagtgtcttgttatgacaggtgctccaaactcacgtccagctttacttcatcttgttcatgatttcacaaaaaatgttggtttgatgatctgtggccatgtacatatgggtcctcgaagacaagccatgaaagagatgtccatcgatcaagccaaatatcagcgatggcttattaagaacaaaatgaaggcattttatgctccagtacatgcagatgacttgagagaaggtgcacagtatttgatgcaggctgctggtcttggtcgtatgaagccaaacacacttgtccttggatttaagaaagattggttgcaagcagatatgagggatgtggatatgtatataaacttatttcatgatgcttttgacatacaatatggagtagtggttattcgcctaaaagaaggtctggatatatctcatcttcaaggacaagaagaattattgtcatcacaagagaaatctcctggcaccaaggatgtggtagtaagtgtggaatatagtaaaaagtccgatttagatacttccaaaccactcagtgaaaaaccaattacacacaaagttgaggaagaggatggcaagactgcaactcaaccactgttgaaaaaagaatccaaaggccctattgtgcctttaaatgtagctgaccaaaagcttcttgaagctagtacacagtttcagaaaaaacaaggaaagaatactattgatgtctggtggctttttgatgatggaggtttgaccttattgataccttaccttctgacgaccaagaaaaaatggaaagactgtaagatcagagtattcattggtggaaagataaacagaatagaccatgaccggagagcgatggctactttgcttagcaagttccggatagacttttctgatatcatggttctaggagatatcaataccaaaccaaagaaagaaaatattatagcttttgaggaaatcattgagccatacagacttcatgaagatgataaagagcaagatattgcagataaaatgaaagaagatgaaccatggcgaataacagataatgagcttgaactttataagaccaagacataccggcagatcaggttaaatgagttattaaaggaacattcaagcacagctaatattattgtcatgagtctcccagttgcacgaaaaggtgctgtgtctagtgctctctacatggcatggttagaagctctatctaaggacctaccaccaatcctcctagttcgtgggaatcatcagagtgtccttaccttctattcataaatgttctatacagtggacagccctccagaatggtacttcagtgcctagtgtagtaactgaaatcttcaatgacacattaacatcacaatggcgaatggtgacttttctttcacgatttcattaatttgaaagcacacaggaaagttgctccattgataacgtgtatggagacttcggttttagtcaattccatatctcaatcttaatggtgattcttctctgttgaactgaagtttgtgagagtagttttcctttgctacttgaatagcaataaaagcgtgttaactttttgattgatgaaagaagtacaaaaagcctttagccttgaggtgccttctgaaattaaccaaatttcatccatatatcctcttttataaacttatagaatgtcaaactttgccttcaactgtttttatttctagtctcttccactttaaaacaaaatgaacactgcttgtcttcttccattgaccatttagtgttgagtactgtatgtgttttgttaattctataaaggtatctgttagatattaaaggtgagaattagggcaggttaatcaaaaatggggaaggggaaatggtaaccaaaaagtaaccccatggtaaggtttatatgagtatatgtgaatatagagctaggaaaaaaagcccccccaaatacctttttaacccctctgattggctattattactatatttattattatttattgaaaccttagggaagattgaagattcatcccatacttctatataccatgcttaaaaatcacgtcattctttaaacaaaaatactcaagatcatttatatttatttggagagaaaactgtcctaatttagaatttccctcaaatctgagggacttttaagaaatgctaacagatttttctggaggaaatttagacaaaacaatgtcatttagtagaatatttcagtatttaagtggaatttcagtatactgtactatcctttataagtcattaaaataatgtttcatcaaatggttaaatggaccactggtttcttagagaaatgtttttaggcttaattcattcaattgtcaagtacacttagtcttaatacactcaggtttgaacagattattctgaatattaaaatttaatccattcttaatattttaaaacttttgttaagaaaaactgccagtttgtgcttttgaaatgtctgttttgacatcatagtctagtaaaattttgacagtgcatatgtactgttactaaaagctttatatgaaattattaatgtgaagtttttcatttataattcaaggaaggatttcctgaaaacatttcaagggatttatgtctacatatttgtgtgtgtgtgtgtatatatatgtaatatgcatacacagatgcatatgtgtatatataatgaaatttatgttgctggtattttgcattttaaagtgatcaagattcattaggcaaactttggtttaagtaaacatatgttcaaatcagattaacagatacaggtttcatagagaacaaaggtgatcatttgaagggcatgctgtaatttcacacaattttccagttcaaaaatggagaatacttcgcctaaaatactgttaagtgggttaattgatacaagtttctgtggtggaaaatttatgcaggttttcacgaatccttttttttttttttttttttttgagacggagtctcgctctgttgccacgctggaatgcagtaacgtgatcttggctcactgcgacctccacctccccagttcaagcgattctcctgcctcagcctccctagtagctgggactacgggtgcacgccaccatgcccagctaatttttgtattttgagtagagacagggtttcaccgtgttggctaggatggtgtctatctcttgaccttgtgatccacccgcctcagcctcccagagtgctgggattacaggtgcgagccactgcgcctggctggttttcatgaatcttgatagacatctataacgttattattttcagtggtgtgcagcatttttgcttcatgagtatgacctaggtatagagatctgataacttgaattcagaatattaagaaaatgaagtaactgattttctaaaaaaaaaaaaaaaaaaaaatttctacattataactcacagcattgttccattgcaggttttgcaatgtttgggggtaaagacagtagaaatattattcagtaaacaataatgtgtgaacttttaagatggataatagggcatggactgagtgctgctatcttgaaatgtgcacaggtacacttaccttttttttttttttttttaagtttttcccattcaggaaaacaacattgtgatctgtactacaggaaccaaatgtcatgcgtcatacatgtgggtataaagtacataaaatatatctaactattcataatgtggggtgggtaatactgtctgtgaaataatgtaagaagcttttcacttaaaaaaaatgcattactttcacttaacactagacaccaggtcgaaaattttcaaggttatagtacttatttcaacaattcttagagatgctagctagtgttgaagctaaaaatagctttatttatgctgaattgtgatttttttatgccaaaatttttttagttctaatcattgatgatagcttggaaataaataattatgccatggcatttgacagttcattattcctataagaattaaattgagtttagagagaatggtggtgttgagctgattattaacagttactgaaatcaaatatttatttgttacattattccatttgtattttaggtttccttttacattctttttatatgcattctgacattacatattttttaagactatggaaataatttaaagatttaagctctggtggatgattatctgctaagtaagtctgaaaatgtaatattttgataatactgtaatatacctgtcacacaaatgcttttctaatgttttaaccttgagtattgcagttgctgctttgtacagaggttactgcaataaaggaagtggattcattaaacctatttaatgtccattctt

SEQ ID NO: 332549 - DNA, 4006 bp, Homo sapiens
aagcagtggtatcaacgcagagtgcccattacggccggggcctggcggccgttgaaaaatggcgactgtggcagagttgaaggctgttttaaaggacaccttggaaaaaaagggggtattagggcatttaaaagcaaggatccgagctgaagttttcaatgccctagatgatgaccgtgaaccccgaccatcattgtctcatgaaaaccttctaattaatgaattaattcgagagtatttagaattcaacaaatataagtatacagcatctgtcctcatagcagaatccaaaggccctattgtgcctttaaatgtagctgaccaaaagcttcttgaagctagtacacagtttcagaaaaaacaaggaaagaatactattgatgtctggtggctttttgatgatggaggtttgaccttattgataccttaccttctgacgaccaagaaaaaatggaaagactgtaagatcagagtattcattggtggaaagataaacagaatagaccatgaccggagagcgatggctactttgcttagcaagttccggatagacttttctgatatcatggttctaggagatatcaataccaaaccaaagaaagaaaatattatagcttttgaggaaatcattgagccatacagacttcatgaagatgataaagagcaagatattgcagataaaatgaaagaagatgaaccatggcgaataacagataatgagcttgaactttataagaccaagacataccggcagatcaggttaaatgagttattaaaggaacattcaagcacagctaatattattgtcatgagtctcccagttgcacgaaaaggtgctgtgtctagtgctctctacatggcatggttagaagctctatctaaggacctaccaccaatcctcctagttcgtgggaatcatcagagtgtccttaccttctattcataaatgttctatacagtggacagccctccagaatggtacttcagtgcctagtgtagtaactgaaatcttcaatgacacattaacatcacaatggcgaatggtgacttttctttcacgatttcattaatttgaaagcacacaggaaagttgctccattgataacgtgtatggagacttcggttttagtcaattccatatctcaatcttaatggtgattcttctctgttgaactgaagtttgtgagagtagttttcctttgctacttgaatagcaataaaagcgtgttaactttttgattgatgaaagaagtacaaaaagcctttagccttgaggtgccttctgaaattaaccaaatttcatccatatatcctcttttataaacttatagaatgtcaaactttgccttcaactgtttttatttctagtctcttccactttaaaacaaaatgaacactgcttgtcttcttccattgaccatttagtgttgagtactgtatgtgttttgttaattctataaaggtatctgttagatattaaaggtgagaattagggcaggttaatcaaaaatggggaaggggaaatggtaaccaaaaagtaaccccatggtaaggtttatatgagtatatgtgaatatagagctaggaaaaaaagcccccccaaatacctttttaacccctctgattggctattattactatatttattattatttattgaaaccttagggaagattgaagattcatcccatacttctatataccatgcttaaaaatcacgtcattctttaaacaaaaatactcaagatcatttatatttatttggagagaaaactgtcctaatttagaatttccctcaaatctgagggacttttaagaaatgctaacagatttttctggaggaaatttagacaaaacaatgtcatttagtagaatatttcagtatttaagtggaatttcagtatactgtactatcctttataagtcattaaaataatgtttcatcaaatggttaaatggaccactggtttcttagagaaatgtttttaggcttaattcattcaattgtcaagtacacttagtcttaatacactcaggtttgaacagattattctgaatattaaaatttaatccattcttaatattttaaaacttttgttaagaaaaactgccagtttgtgcttttgaaatgtctgttttgacatcatagtctagtaaaattttgacagtgcatatgtactgttactaaaagctttatatgaaattattaatgtgaagtttttcatttataattcaaggaaggatttcctgaaaacatttcaagggatttatgtctacatatttgtgtgtgtgtgtgtatatatatgtaatatgcatacacagatgcatatgtgtatatataatgaaatttatgttgctggtattttgcattttaaagtgatcaagattcattaggcaaactttggtttaagtaaacatatgttcaaatcagattaacagatacaggtttcatagagaacaaaggtgatcatttgaagggcatgctgtaatttcacacaattttccagttcaaaaatggagaatacttcgcctaaaatactgttaagtgggttaattgatacaagtttctgtggtggaaaatttatgcaggttttcacgaatccttttttttttttttttttttttgagacggagtctcgctctgttgccacgctggaatgcagtaacgtgatcttggctcactgcgacctccacctccccagttcaagcgattctcctgcctcagcctccctagtagctgggactacgggtgcacgccaccatgcccagctaatttttgtattttgagtagagacagggtttcaccgtgttggctaggatggtgtctatctcttgaccttgtgatccacccgcctcagcctcccagagtgctgggattacaggtgcgagccactgcgcctggctggttttcatgaatcttgatagacatctataacgttattattttcagtggtgtgcagcatttttgcttcatgagtatgacctaggtatagagatctgataacttgaattcagaatattaagaaaatgaagtaactgattttctaaaaaaaaaaaaaaaaaaaaatttctacattataactcacagcattgttccattgcaggttttgcaatgtttgggggtaaagacagtagaaatattattcagtaaacaataatgtgtgaacttttaagatggataatagggcatggactgagtgctgctatcttgaaatgtgcacaggtacacttaccttttttttttttttttttaagtttttcccattcaggaaaacaacattgtgatctgtactacaggaaccaaatgtcatgcgtcatacatgtgggtataaagtacataaaatatatctaactattcataatgtggggtgggtaatactgtctgtgaaataatgtaagaagcttttcacttaaaaaaaatgcattactttcacttaacactagacaccaggtcgaaaattttcaaggttatagtacttatttcaacaattcttagagatgctagctagtgttgaagctaaaaatagctttatttatgctgaattgtgatttttttatgccaaaatttttttagttctaatcattgatgatagcttggaaataaataattatgccatggcatttgacagttcattattcctataagaattaaattgagtttagagagaatggtggtgttgagctgattattaacagttactgaaatcaaatatttatttgttacattattccatttgtattttaggtttccttttacattctttttatatgcattctgacattacatattttttaagactatggaaataatttaaagatttaagctctggtggatgattatctgctaagtaagtctgaaaatgtaatattttgataatactgtaatatacctgtcacacaaatgcttttctaatgttttaaccttgagtattgcagttgctgctttgtacagaggttactgcaataaaggaagtggattcattaaacctatttaatgtccattctt

SEQ ID NO: 332550 - DNA, 2771 bp, Homo sapiens
gaatatactaactagagatctgtctgaagccgtgtgcagcgtgccttctgaaattaaccaaatttcatccatatatcctcttttataaacttatagaatgtcaaactttgccttcaactgtttttatttctagtctcttccactttaaaacaaaatgaacactgcttgtcttcttccattgaccatttagtgttgagtactgtatgtgttttgttaattctataaaggtatctgttagatattaaaggtgagaattagggcaggttaatcaaaaatggggaaggggaaatggtaaccaaaaagtaaccccatggtaaggtttatatgagtatatgtgaatatagagctaggaaaaaaagcccccccaaatacctttttaacccctctgattggctattattactatatttattattatttattgaaaccttagggaagattgaagattcatcccatacttctatataccatgcttaaaaatcacgtcattctttaaacaaaaatactcaagatcatttatatttatttggagagaaaactgtcctaatttagaatttccctcaaatctgagggacttttaagaaatgctaacagatttttctggaggaaatttagacaaaacaatgtcatttagtagaatatttcagtatttaagtggaatttcagtatactgtactatcctttataagtcattaaaataatgtttcatcaaatggttaaatggaccactggtttcttagagaaatgtttttaggcttaattcattcaattgtcaagtacacttagtcttaatacactcaggtttgaacagattattctgaatattaaaatttaatccattcttaatattttaaaacttttgttaagaaaaactgccagtttgtgcttttgaaatgtctgttttgacatcatagtctagtaaaattttgacagtgcatatgtactgttactaaaagctttatatgaaattattaatgtgaagtttttcatttataattcaaggaaggatttcctgaaaacatttcaagggatttatgtctacatatttgtgtgtgtgtgtgtatatatatgtaatatgcatacacagatgcatatgtgtatatataatgaaatttatgttgctggtattttgcattttaaagtgatcaagattcattaggcaaactttggtttaagtaaacatatgttcaaatcagattaacagatacaggtttcatagagaacaaaggtgatcatttgaagggcatgctgtaatttcacacaattttccagttcaaaaatggagaatacttcgcctaaaatactgttaagtgggttaattgatacaagtttctgtggtggaaaatttatgcaggttttcacgaatccttttttttttttttttttttttgagacggagtctcgctctgttgccacgctggaatgcagtaacgtgatcttggctcactgcgacctccacctccccagttcaagcgattctcctgcctcagcctccctagtagctgggactacgggtgcacgccaccatgcccagctaatttttgtattttgagtagagacagggtttcaccgtgttggctaggatggtgtctatctcttgaccttgtgatccacccgcctcagcctcccagagtgctgggattacaggtgcgagccactgcgcctggctggttttcatgaatcttgatagacatctataacgttattattttcagtggtgtgcagcatttttgcttcatgagtatgacctaggtatagagatctgataacttgaattcagaatattaagaaaatgaagtaactgattttctaaaaaaaaaaaaaaaaaaaaatttctacattataactcacagcattgttccattgcaggttttgcaatgtttgggggtaaagacagtagaaatattattcagtaaacaataatgtgtgaacttttaagatggataatagggcatggactgagtgctgctatcttgaaatgtgcacaggtacacttaccttttttttttttttttttaagtttttcccattcaggaaaacaacattgtgatctgtactacaggaaccaaatgtcatgcgtcatacatgtgggtataaagtacataaaatatatctaactattcataatgtggggtgggtaatactgtctgtgaaataatgtaagaagcttttcacttaaaaaaaatgcattactttcacttaacactagacaccaggtcgaaaattttcaaggttatagtacttatttcaacaattcttagagatgctagctagtgttgaagctaaaaatagctttatttatgctgaattgtgatttttttatgccaaaatttttttagttctaatcattgatgatagcttggaaataaataattatgccatggcatttgacagttcattattcctataagaattaaattgagtttagagagaatggtggtgttgagctgattattaacagttactgaaatcaaatatttatttgttacattattccatttgtattttaggtttccttttacattctttttatatgcattctgacattacatattttttaagactatggaaataatttaaagatttaagctctggtggatgattatctgctaagtaagtctgaaaatgtaatattttgataatactgtaatatacctgtcacacaaatgcttttctaatgttttaaccttgagtattgcagttgctgctttgtacagaggttactgcaataaaggaagtggattcattaaacctatttaatgtccattctt

SEQ ID NO: 332551 - DNA, 2061 bp, Homo sapiens
tctagaggagtccccatacatgctcgaaagagaaatgtttttaggcttaattcattcaattgtcaagtacacttagtcttaatacactcaggtttgaacagattattctgaatattaaaatttaatccattcttaatattttaaaacttttgttaagaaaaactgccagtttgtgcttttgaaatgtctgttttgacatcatagtctagtaaaattttgacagtgcatatgtactgttactaaaagctttatatgaaattattaatgtgaagtttttcatttataattcaaggaaggatttcctgaaaacatttcaagggatttatgtctacatatttgtgtgtgtgtgtgtatatatatgtaatatgcatacacagatgcatatgtgtatatataatgaaatttatgttgctggtattttgcattttaaagtgatcaagattcattaggcaaactttggtttaagtaaacatatgttcaaatcagattaacagatacaggtttcatagagaacaaaggtgatcatttgaagggcatgctgtaatttcacacaattttccagttcaaaaatggagaatacttcgcctaaaatactgttaagtgggttaattgatacaagtttctgtggtggaaaatttatgcaggttttcacgaatccttttttttttttttttttttttgagacggagtctcgctctgttgccacgctggaatgcagtaacgtgatcttggctcactgcgacctccacctccccagttcaagcgattctcctgcctcagcctccctagtagctgggactacgggtgcacgccaccatgcccagctaatttttgtattttgagtagagacagggtttcaccgtgttggctaggatggtgtctatctcttgaccttgtgatccacccgcctcagcctcccagagtgctgggattacaggtgcgagccactgcgcctggctggttttcatgaatcttgatagacatctataacgttattattttcagtggtgtgcagcatttttgcttcatgagtatgacctaggtatagagatctgataacttgaattcagaatattaagaaaatgaagtaactgattttctaaaaaaaaaaaaaaaaaaaaatttctacattataactcacagcattgttccattgcaggttttgcaatgtttgggggtaaagacagtagaaatattattcagtaaacaataatgtgtgaacttttaagatggataatagggcatggactgagtgctgctatcttgaaatgtgcacaggtacacttaccttttttttttttttttttaagtttttcccattcaggaaaacaacattgtgatctgtactacaggaaccaaatgtcatgcgtcatacatgtgggtataaagtacataaaatatatctaactattcataatgtggggtgggtaatactgtctgtgaaataatgtaagaagcttttcacttaaaaaaaatgcattactttcacttaacactagacaccaggtcgaaaattttcaaggttatagtacttatttcaacaattcttagagatgctagctagtgttgaagctaaaaatagctttatttatgctgaattgtgatttttttatgccaaaatttttttagttctaatcattgatgatagcttggaaataaataattatgccatggcatttgacagttcattattcctataagaattaaattgagtttagagagaatggtggtgttgagctgattattaacagttactgaaatcaaatatttatttgttacattattccatttgtattttaggtttccttttacattctttttatatgcattctgacattacatattttttaagactatggaaataatttaaagatttaagctctggtggatgattatctgctaagtaagtctgaaaatgtaatattttgataatactgtaatatacctgtcacacaaatgcttttctaatgttttaaccttgagtattgcagttgctgctttgtacagaggttactgcaataaaggaagtggattcattaaacctatttaatgtccattctt

SEQ ID NO: 332552 - DNA, 1343 bp, Homo sapiens
tgattgattgagacagagtctcacttggtcgcccaggctggagtgcagtggtacaatctcagcctccctagtagctgggactacgggtgcacgccaccatgcccagctaatttttgtattttgagtagagacagggtttcaccgtgttggctaggatggtgtctatctcttgaccttgtgatccacccgcctcagcctcccagagtgctgggattacaggtgcgagccactgcgcctggctggttttcatgaatcttgatagacatctataacgttattattttcagtggtgtgcagcatttttgcttcatgagtatgacctaggtatagagatctgataacttgaattcagaatattaagaaaatgaagtaactgattttctaaaaaaaaaaaaaaaaaaaaatttctacattataactcacagcattgttccattgcaggttttgcaatgtttgggggtaaagacagtagaaatattattcagtaaacaataatgtgtgaacttttaagatggataatagggcatggactgagtgctgctatcttgaaatgtgcacaggtacacttaccttttttttttttttttttaagtttttcccattcaggaaaacaacattgtgatctgtactacaggaaccaaatgtcatgcgtcatacatgtgggtataaagtacataaaatatatctaactattcataatgtggggtgggtaatactgtctgtgaaataatgtaagaagcttttcacttaaaaaaaatgcattactttcacttaacactagacaccaggtcgaaaattttcaaggttatagtacttatttcaacaattcttagagatgctagctagtgttgaagctaaaaatagctttatttatgctgaattgtgatttttttatgccaaaatttttttagttctaatcattgatgatagcttggaaataaataattatgccatggcatttgacagttcattattcctataagaattaaattgagtttagagagaatggtggtgttgagctgattattaacagttactgaaatcaaatatttatttgttacattattccatttgtattttaggtttccttttacattctttttatatgcattctgacattacatattttttaagactatggaaataatttaaagatttaagctctggtggatgattatctgctaagtaagtctgaaaatgtaatattttgataatactgtaatatacctgtcacacaaatgcttttctaatgttttaaccttgagtattgcagttgctgctttgtacagaggttactgcaataaaggaagtggattcattaaacctatttaatgtccattctt

SEQ ID NO: 332553 - DNA, 362 bp, Homo sapiens
ctcagaggatcccacaaccatagaatggtggtgttgagctgattattaacagttactgaaatcaaatatttatttgttacattattccatttgtattttaggtttccttttacattctttttatatgcattctgacattacatattttttaagactatggaaataatttaaagatttaagctctggtggatgattatctgctaagtaagtctgaaaatgtaatattttgataatactgtaatatacctgtcacacaaatgcttttctaatgttttaaccttgagtattgcagttgctgctttgtacagaggttactgcaataaaggaagtggattcattaaacctatttaatgtccattctt

SEQ ID NO: 332554 - DNA, 176 bp, Homo sapiens
agataatgagcttgaactttataagaccaaggtattctcttctgcttccttttcattaatcttttatataataaaagacatgaaaaccaagaactttaatttgatataggagggtcagttgtataaatgaactctactttaaaatagatttatttgaggttagtggaaagcatttt

SEQ ID NO: 332555 - DNA, 431 bp, Homo sapiens
ttaatataaaggcaattaacatatttttgtgttttttaaacataatctagttgaggaagaggatggcaagactgcaactcaaccactgttgaaaaaaggcaggcatttttcatcattttattttaaaccctttttcatactgtaaactctttaactccaaccttattcccttttttttaaccttggttttatttccatggtgaggtaatgttacagttctataatgcagattagaaaaattattattagtctaactaaaaagttaaatattctcaggaaatggagttatatcacaaattcttttctattatcacagcatttctgaaatattagacccagacagccggtattaattttttttaatttaaactgcatggtttagatgataagtagggacactgaaataggttttatttgcagtgtcacttgca

SEQ ID NO: 332556 - DNA, 5907 bp, Homo sapiens
tgccggtggcctctgtggccgtccaggctagcggcggcccgcaggcggcggggagaaagactctctcacctggtcttgcggctgtggccaccgccggccaggggtgtggagggcgtgctgccggagacgtccgccgggctctgcagttccgccgggggtcgggcagctatggagccgcggcccacggcgccctcctccggcgccccgggactggccggggtcggggagacgccgtcagccgctgcgctggccgcagccagggtggaactgcccggcacggctgtgccctcggtgccggaggatgctgcgcccgcgagccgggacggcggcggggtccgcgatgagggccccgcggcggccggggacgggctgggcagacccttggggcccaccccgagccagagccgtttccaggtggacctggtttccgagaacgccgggcgggccgctgctgcggcggcggcggcggcggcggcagcggcggcggctggtgctggggcgggggccaagcagacccccgcggacggggaagccagcggcgagagcgagccagctaaaggcagcgaggaagccaagggccgcttccgcgtgaacttcgtggacccagctgcctcctcgtcggctgaagacagcctgtcagatgctgccggggtcggagtcgacgggcccaacgtgagcttccagaacggcggggacacggtgctgagcgagggcagcagcctgcactccggcggcggcggcggcagtgggcaccaccagcactactattatgatacccacaccaacacctactacctgcgcaccttcggccacaacaccatggacgctgtgcccaggatcgatcactaccggcacacagccgcgcagctgggcgagaagctgctccggcctagcctggcggagctccacgacgagctggaaaaggaaccttttgaggatggctttgcaaatggggaagaaagtactccaaccagagatgctgtggtcacgtatactgcagaaagtaaaggagtcgtgaagtttggctggatcaagggtgtattagtacgttgtatgttaaacatttggggtgtgatgcttttcattagattgtcatggattgtgggtcaagctggaataggtctatcagtccttgtaataatgatggccactgttgtgacaactatcacaggattgtctacttcagcaatagcaactaatggatttgtaagaggaggaggagcatattatttaatatctagaagtctagggccagaatttggtggtgcaattggtctaatcttcgcctttgccaacgctgttgcagttgctatgtatgtggttggatttgcagaaaccgtggtggagttgcttaaggaacattccatacttatgatagatgaaatcaatgatatccgaattattggagccattacagtcgtgattcttttaggtatctcagtagctggaatggagtgggaagcaaaagctcagattgttcttttggtgatcctacttcttgctattggtgatttcgtcataggaacatttatcccactggagagcaagaagccaaaagggttttttggttataaatctgaaatatttaatgagaactttgggcccgattttcgagaggaagagactttcttttctgtatttgccatcttttttcctgctgcaactggtattctggctggagcaaatatctcaggtgatcttgcagatcctcagtcagccatacccaaaggaacactcctagccattttaattactacattggtttacgtaggaattgcagtatctgtaggttcttgtgttgttcgagatgccactggaaacgttaatgacactatcgtaacagagctaacaaactgtacttctgcagcctgcaaattaaactttgatttttcatcttgtgaaagcagtccttgttcctatggcctaatgaacaacttccaggtaatgagtatggtgtcaggatttacaccactaatttctgcaggtatattttcagccactctttcttcagcattagcatccctagtgagtgctcccaaaatatttcaggctctatgtaaggacaacatctacccagctttccagatgtttgctaaaggttatgggaaaaataatgaacctcttcgtggctacatcttaacattcttaattgcacttggattcatcttaattgctgaactgaatgttattgcaccaattatctcaaacttcttccttgcatcatatgcattgatcaatttttcagtattccatgcatcacttgcaaaatctccaggatggcgtcctgcattcaaatactacaacatgtggatatcacttcttggagcaattctttgttgcatagtaatgttcgtcattaactggtgggctgcattgctaacatatgtgatagtccttgggctgtatatttatgttacctacaaaaaaccagatgtgaattggggatcctctacacaagccctgacttacctgaatgcactgcagcattcaattcgtctttctggagtggaagaccacgtgaaaaactttaggccacagtgtcttgttatgacaggtgctccaaactcacgtccagctttacttcatcttgttcatgatttcacaaaaaatgttggtttgatgatctgtggccatgtacatatgggtcctcgaagacaagccatgaaagagatgtccatcgatcaagccaaatatcagcgatggcttattaagaacaaaatgaaggcattttatgctccagtacatgcagatgacttgagagaaggtgcacagtatttgatgcaggctgctggtcttggtcgtatgaagccaaacacacttgtccttggatttaagaaagattggttgcaagcagatatgagggatgtggatatgtatataaacttatttcatgatgcttttgacatacaatatggagtagtggttattcgcctaaaagaaggtctggatatatctcatcttcaaggacaagaagaattattgtcatcacaagagaaatctcctggcaccaaggatgtggtagtaagtgtggaatatagtaaaaagtccgatttagatacttccaaaccactcagtgaaaaaccaattacacacaaagttgaggaagaggatggcaagactgcaactcaaccactgttgaaaaaagaatccaaaggccctattgtgcctttaaatgtagctgaccaaaagcttcttgaagctagtacacagtttcagaaaaaacaaggaaagaatactattgatgtctggtggctttttgatgatggaggtttgaccttattgataccttaccttctgacgaccaagaaaaaatggaaagactgtaagatcagagtattcattggtggaaagataaacagaatagaccatgaccggagagcgatggctactttgcttagcaagttccggatagacttttctgatatcatggttctaggagatatcaataccaaaccaaagaaagaaaatattatagcttttgaggaaatcattgagccatacagacttcatgaagatgataaagagcaagatattgcagataaaatgaaagaagatgaaccatggcgaataacagataatgagcttgaactttataagaccaagacataccggcagatcaggttaaatgagttattaaaggaacattcaagcacagctaatattattgtcatgagtctcccagttgcacgaaaaggtgctgtgtctagtgctctctacatggcatggttagaagctctatctaaggacctaccaccaatcctcctagttcgtgggaatcatcagagtgtccttaccttctattcataaatgttctatacagtggacagccctccagaatggtacttcagtgcctagtgtagtaactgaaatcttcaatgacacattaacatcacaatggcgaatggtgacttttctttcacgatttcattaatttgaaagcacacaggaaagttgctccattgataacgtgtatggagacttcggttttagtcaattccatatctcaatcttaatggtgattcttctctgttgaactgaagtttgtgagagtagttttcctttgctacttgaatagcaataaaagcgtgttaactttttgattgatgaaagaagtacaaaaagcctttagccttgaggtgccttctgaaattaaccaaatttcatccatatatcctcttttataaacttatagaatgtcaaactttgccttcaactgtttttatttctagtctcttccactttaaaacaaaatgaacactgcttgtcttcttccattgaccatttagtgttgagtactgtatgtgttttgttaattctataaaggtatctgttagatattaaaggtgagaattagggcaggttaatcaaaaatggggaaggggaaatggtaaccaaaaagtaaccccatggtaaggtttatatgagtatatgtgaatatagagctaggaaaaaaagcccccccaaatacctttttaacccctctgattggctattattactatatttattattatttattgaaaccttagggaagattgaagattcatcccatacttctatataccatgcttaaaaatcacgtcattctttaaacaaaaatactcaagatcatttatatttatttggagagaaaactgtcctaatttagaatttccctcaaatctgagggacttttaagaaatgctaacagatttttctggaggaaatttagacaaaacaatgtcatttagtagaatatttcagtatttaagtggaatttcagtatactgtactatcctttataagtcattaaaataatgtttcatcaaatggttaaatggaccactggtttcttagagaaatgtttttaggcttaattcattcaattgtcaagtacacttagtcttaatacactcaggtttgaacagattattctgaatattaaaatttaatccattcttaatattttaaaacttttgttaagaaaaactgccagtttgtgcttttgaaatgtctgttttgacatcatagtctagtaaaattttgacagtgcatatgtactgttactaaaagctttatatgaaattattaatgtgaagtttttcatttataattcaaggaaggatttcctgaaaacatttcaagggatttatgtctacatatttgtgtgtgtgtgtgtatatatatgtaatatgcatacacagatgcatatgtgtatatataatgaaatttatgttgctggtattttgcattttaaagtgatcaagattcattaggcaaactttggtttaagtaaacatatgttcaaatcagattaacagatacaggtttcatagagaacaaaggtgatcatttgaagggcatgctgtaatttcacacaattttccagttcaaaaatggagaatacttcgcctaaaatactgttaagtgggttaattgatacaagtttctgtggtggaaaatttatgcaggttttcacgaatccttttttttttttttttttttttgagacggagtctcgctctgttgccacgctggaatgcagtaacgtgatcttggctcactgcgacctccacctccccagttcaagcgattctcctgcctcagcctccctagtagctgggactacgggtgcacgccaccatgcccagctaatttttgtattttgagtagagacagggtttcaccgtgttggctaggatggtgtctatctcttgaccttgtgatccacccgcctcagcctcccagagtgctgggattacaggtgcgagccactgcgcctggctggttttcatgaatcttgatagacatctataacgttattattttcagtggtgtgcagcatttttgcttcatgagtatgacctaggtatagagatctgataacttgaattcagaatattaagaaaatgaagtaactgattttct

SEQ ID NO: 332557 - DNA, 4199 bp, Homo sapiens
tgccggtggcctctgtggccgtccaggctagcggcggcccgcaggcggcggggagaaagactctctcacctggtcttgcggctgtggccaccgccggccaggggtgtggagggcgtgctgccggagacgtccgccgggctctgcagttccgccgggggtcgggcagctatggagccgcggcccacggcgccctcctccggcgccccgggactggccggggtcggggagacgccgtcagccgctgcgctggccgcagccagggtggaactgcccggcacggctgtgccctcggtgccggaggatgctgcgcccgcgagccgggacggcggcggggtccgcgatgagggccccgcggcggccggggacgggctgggcagacccttggggcccaccccgagccagagccgtttccaggtggacctggtttccgagaacgccgggcgggccgctgctgcggcggcggcggcggcggcggcagcggcggcggctggtgctggggcgggggccaagcagacccccgcggacggggaagccagcggcgagagcgagccagctaaaggcagcgaggaagccaagggccgcttccgcgtgaacttcgtggacccagctgcctcctcgtcggctgaagacagcctgtcagatgctgccggggtcggagtcgacgggcccaacgtgagcttccagaacggcggggacacggtgctgagcgagggcagcagcctgcactccggcggcggcggcggcagtgggcaccaccagcactactattatgatacccacaccaacacctactacctgcgcaccttcggccacaacaccatggacgctgtgcccaggatcgatcactaccggcacacagccgcgcagctgggcgagaagctgctccggcctagcctggcggagctccacgacgagctggaaaaggaaccttttgaggatggctttgcaaatggggaagaaagtactccaaccagagatgctgtggtcacgtatactgcagaaagtaaaggagtcgtgaagtttggctggatcaagggtgtattagtacgttgtatgttaaacatttggggtgtgatgcttttcattagattgtcatggattgtgggtcaagctggaataggtctatcagtccttgtaataatgatggccactgttgtgacaactatcacaggattgtctacttcagcaatagcaactaatggatttgtaagaggaggaggagcatattatttaatatctagaagtctagggccagaatttggtggtgcaattggtctaatcttcgcctttgccaacgctgttgcagttgctatgtatgtggttggatttgcagaaaccgtggtggagttgcttaaggaacattccatacttatgatagatgaaatcaatgatatccgaattattggagccattacagtcgtgattcttttaggtatctcagtagctggaatggagtgggaagcaaaagctcagattgttcttttggtgatcctacttcttgctattggtgatttcgtcataggaacatttatcccactggagagcaagaagccaaaagggttttttggttataaatctgaaatatttaatgagaactttgggcccgattttcgagaggaagagactttcttttctgtatttgccatcttttttcctgctgcaactggtattctggctggagcaaatatctcaggtgatcttgcagatcctcagtcagccatacccaaaggaacactcctagccattttaattactacattggtttacgtaggaattgcagtatctgtaggttcttgtgttgttcgagatgccactggaaacgttaatgacactatcgtaacagagctaacaaactgtacttctgcagcctgcaaattaaactttgatttttcatcttgtgaaagcagtccttgttcctatggcctaatgaacaacttccaggtaatgagtatggtgtcaggatttacaccactaatttctgcaggtatattttcagccactctttcttcagcattagcatccctagtgagtgctcccaaaatatttcaggctctatgtaaggacaacatctacccagctttccagatgtttgctaaaggttatgggaaaaataatgaacctcttcgtggctacatcttaacattcttaattgcacttggattcatcttaattgctgaactgaatgttattgcaccaattatctcaaacttcttccttgcatcatatgcattgatcaatttttcagtattccatgcatcacttgcaaaatctccaggatggcgtcctgcattcaaatactacaacatgtggatatcacttcttggagcaattctttgttgcatagtaatgttcgtcattaactggtgggctgcattgctaacatatgtgatagtccttgggctgtatatttatgttacctacaaaaaaccagatgtgaattggggatcctctacacaagccctgacttacctgaatgcactgcagcattcaattcgtctttctggagtggaagaccacgtgaaaaactttaggccacagtgtcttgttatgacaggtgctccaaactcacgtccagctttacttcatcttgttcatgatttcacaaaaaatgttggtttgatgatctgtggccatgtacatatgggtcctcgaagacaagccatgaaagagatgtccatcgatcaagccaaatatcagcgatggcttattaagaacaaaatgaaggcattttatgctccagtacatgcagatgacttgagagaaggtgcacagtatttgatgcaggctgctggtcttggtcgtatgaagccaaacacacttgtccttggatttaagaaagattggttgcaagcagatatgagggatgtggatatgtatataaacttatttcatgatgcttttgacatacaatatggagtagtggttattcgcctaaaagaaggtctggatatatctcatcttcaaggacaagaagaattattgtcatcacaagagaaatctcctggcaccaaggatgtggtagtaagtgtggaatatagtaaaaagtccgatttagatacttccaaaccactcagtgaaaaaccaattacacacaaagttgaggaagaggatggcaagactgcaactcaaccactgttgaaaaaagaatccaaaggccctattgtgcctttaaatgtagctgaccaaaagcttcttgaagctagtacacagtttcagaaaaaacaaggaaagaatactattgatgtctggtggctttttgatgatggaggtttgaccttattgataccttaccttctgacgaccaagaaaaaatggaaagactgtaagatcagagtattcattggtggaaagataaacagaatagaccatgaccggagagcgatggctactttgcttagcaagttccggatagacttttctgatatcatggttctaggagatatcaataccaaaccaaagaaagaaaatattatagcttttgaggaaatcattgagccatacagacttcatgaagatgataaagagcaagatattgcagataaaatgaaagaagatgaaccatggcgaataacagataatgagcttgaactttataagaccaagacataccggcagatcaggttaaatgagttattaaaggaacattcaagcacagctaatattattgtcatgagtctcccagttgcacgaaaaggtgctgtgtctagtgctctctacatggcatggttagaagctctatctaaggacctaccaccaatcctcctagttcgtgggaatcatcagagtgtccttaccttctattcataaatgttctatacagtggacagccctccagaatggtacttcagtgcctagtgtagtaactgaaatcttcaatgacacattaacatcacaatggcgaatggtgacttttctttcacgatttcattaatttgaaagcacacaggaaagttgctccattgataacgtgtatggagacttcggttttagtcaattccatatctcaatcttaatggtgattcttctctgttgaactgaagtttgtgagagtagttttcctttgctacttgaatagcaataaaagcgtgttaactttttgattgatgaaagaagtacaaaaagcctttagccttgaggtgccttctgaaattaaccaaatttcatccatatatcctcttttataaacttatagaatgtca

SEQ ID NO: 332558 - DNA, 3948 bp, Homo sapiens
tagcttatctatattctcaaacaccaaaaggaaaagttgaatcttgctctctttggtatactaatgtagtggtatgctaagctggctcataccaacttagaaaagctgattgtaaaattttcattttgacagctggttattaaatgcagccattattaaaaatcaaatacacacaaagttgaggaagaggatggcaagactgcaactcaaccactgttgaaaaaagaatccaaaggccctattgtgcctttaaatgtagctgaccaaaagcttcttgaagctagtacacagtttcagaaaaaacaaggaaagaatactattgatgtctggtggctttttgatgatggaggtttgaccttattgataccttaccttctgacgaccaagaaaaaatggaaagactgtaagatcagagtattcattggtggaaagataaacagaatagaccatgaccggagagcgatggctactttgcttagcaagttccggatagacttttctgatatcatggttctaggagatatcaataccaaaccaaagaaagaaaatattatagcttttgaggaaatcattgagccatacagacttcatgaagatgataaagagcaagatattgcagataaaatgaaagaagatgaaccatggcgaataacagataatgagcttgaactttataagaccaagacataccggcagatcaggttaaatgagttattaaaggaacattcaagcacagctaatattattgtcatgagtctcccagttgcacgaaaaggtgctgtgtctagtgctctctacatggcatggttagaagctctatctaaggacctaccaccaatcctcctagttcgtgggaatcatcagagtgtccttaccttctattcataaatgttctatacagtggacagccctccagaatggtacttcagtgcctagtgtagtaactgaaatcttcaatgacacattaacatcacaatggcgaatggtgacttttctttcacgatttcattaatttgaaagcacacaggaaagttgctccattgataacgtgtatggagacttcggttttagtcaattccatatctcaatcttaatggtgattcttctctgttgaactgaagtttgtgagagtagttttcctttgctacttgaatagcaataaaagcgtgttaactttttgattgatgaaagaagtacaaaaagcctttagccttgaggtgccttctgaaattaaccaaatttcatccatatatcctcttttataaacttatagaatgtcaaactttgccttcaactgtttttatttctagtctcttccactttaaaacaaaatgaacactgcttgtcttcttccattgaccatttagtgttgagtactgtatgtgttttgttaattctataaaggtatctgttagatattaaaggtgagaattagggcaggttaatcaaaaatggggaaggggaaatggtaaccaaaaagtaaccccatggtaaggtttatatgagtatatgtgaatatagagctaggaaaaaaagcccccccaaatacctttttaacccctctgattggctattattactatatttattattatttattgaaaccttagggaagattgaagattcatcccatacttctatataccatgcttaaaaatcacgtcattctttaaacaaaaatactcaagatcatttatatttatttggagagaaaactgtcctaatttagaatttccctcaaatctgagggacttttaagaaatgctaacagatttttctggaggaaatttagacaaaacaatgtcatttagtagaatatttcagtatttaagtggaatttcagtatactgtactatcctttataagtcattaaaataatgtttcatcaaatggttaaatggaccactggtttcttagagaaatgtttttaggcttaattcattcaattgtcaagtacacttagtcttaatacactcaggtttgaacagattattctgaatattaaaatttaatccattcttaatattttaaaacttttgttaagaaaaactgccagtttgtgcttttgaaatgtctgttttgacatcatagtctagtaaaattttgacagtgcatatgtactgttactaaaagctttatatgaaattattaatgtgaagtttttcatttataattcaaggaaggatttcctgaaaacatttcaagggatttatgtctacatatttgtgtgtgtgtgtgtatatatatgtaatatgcatacacagatgcatatgtgtatatataatgaaatttatgttgctggtattttgcattttaaagtgatcaagattcattaggcaaactttggtttaagtaaacatatgttcaaatcagattaacagatacaggtttcatagagaacaaaggtgatcatttgaagggcatgctgtaatttcacacaattttccagttcaaaaatggagaatacttcgcctaaaatactgttaagtgggttaattgatacaagtttctgtggtggaaaatttatgcaggttttcacgaatccttttttttttttttttttttttgagacggagtctcgctctgttgccacgctggaatgcagtaacgtgatcttggctcactgcgacctccacctccccagttcaagcgattctcctgcctcagcctccctagtagctgggactacgggtgcacgccaccatgcccagctaatttttgtattttgagtagagacagggtttcaccgtgttggctaggatggtgtctatctcttgaccttgtgatccacccgcctcagcctcccagagtgctgggattacaggtgcgagccactgcgcctggctggttttcatgaatcttgatagacatctataacgttattattttcagtggtgtgcagcatttttgcttcatgagtatgacctaggtatagagatctgataacttgaattcagaatattaagaaaatgaagtaactgattttctaaaaaaaaaaaaaaaaaaaaatttctacattataactcacagcattgttccattgcaggttttgcaatgtttgggggtaaagacagtagaaatattattcagtaaacaataatgtgtgaacttttaagatggataatagggcatggactgagtgctgctatcttgaaatgtgcacaggtacacttaccttttttttttttttttttaagtttttcccattcaggaaaacaacattgtgatctgtactacaggaaccaaatgtcatgcgtcatacatgtgggtataaagtacataaaatatatctaactattcataatgtggggtgggtaatactgtctgtgaaataatgtaagaagcttttcacttaaaaaaaatgcattactttcacttaacactagacaccaggtcgaaaattttcaaggttatagtacttatttcaacaattcttagagatgctagctagtgttgaagctaaaaatagctttatttatgctgaattgtgatttttttatgccaaaatttttttagttctaatcattgatgatagcttggaaataaataattatgccatggcatttgacagttcattattcctataagaattaaattgagtttagagagaatggtggtgttgagctgattattaacagttactgaaatcaaatatttatttgttacattattccatttgtattttaggtttccttttacattctttttatatgcattctgacattacatattttttaagactatggaaataatttaaagatttaagctctggtggatgattatctgctaagtaagtctgaaaatgtaatattttgataatactgtaatatacctgtcacacaaatgcttttctaatgttttaaccttgagtattgcagttgctgctttgtacagaggttactgcaataaaggaagtggattcattaaacctatttaatgtccattctt

SEQ ID NO: 332559 - DNA, 2550 bp, Homo sapiens
tcctcgttaatttccaccaggaggaggcgcgcagcccagctcccctagtctctcttcttaaatccccctacctacggctgccgaggttggccgcgcgtcgggagtctccccgacagtcctggccctcccccgccccccgggttggtttttcccagctgcggaggttgggaggttgggccaggggctggggtgcgaagagagtcggcgcccgcaacgcggagccgggaagtcgtcgctactctggtggaactcagagttggttctggaggcggcggacgcggaggtccctcagaggatccagcgaggggcgccaacaagaggcgaagaggtggcaccagggcggcggcaggaagaggagcgggagcaggagcgcggagcggagcgtcccgacccgccgtgcgtactttctggagggaaggggcgggggaatcggcccctgagggaagcgcccggtggcgagggggttagccaagttccggctgcggcgccactccctcggttccacgagaggaaagttttttttttccagacgcttccgccggctcgcgccctccgggcccagcctcccgagccttcggagcgggcgccgtcccagcccagctccggggaaacgcgagccgcgatgcctggggggtgctcccggggccccgccgccggggacgggcgtctgcggctggcgcgactagcgctggtactcctgggctgggtctcctcgtcttctcccacctcctcggcatcctccttctcctcctcggcgccgttcctggcttccgccgtgtccgcccagcccccgctgccggaccagtgccccgcgctgtgcgagtgctccgaggcagcgcgcacagtcaagtgcgttaaccgcaatctgaccgaggtgcccacggacctgcccgcctacgtgcgcaacctcttccttaccggcaaccagctggccgtgctccctgccggcgccttcgcccgccggccgccgctggcggagctggccgcgctcaacctcagcggcagccgcctggacgaggtgcgcgcgggcgccttcgagcatctgcccagcctgcgccagctcgacctcagccacaacccactggccgacctcagtcccttcgctttctcgggcagcaatgccagcgtctcggcccccagtccccttgtggaactgatcctgaaccacatcgtgccccctgaagatgagcggcagaaccggagcttcgagggcatggtggtggcggccctgctggcgggccgtgcactgcaggggctccgccgcttggagctggccagcaaccacttcctttacctgccgcgggatgtgctggcccaactgcccagcctcaggcacctggacttaagtaataattcgctggtgagcctgacctacgtgtccttccgcaacctgacacatctagaaagcctccacctggaggacaatgccctcaaggtccttcacaatggcaccctggctgagttgcaaggtctaccccacattagggttttcctggacaacaatccctgggtctgcgactgccacatggcagacatggtgacctggctcaaggaaacagaggtagtgcagggcaaagaccggctcacctgtgcatatccggaaaaaatgaggaatcgggtcctcttggaactcaacagtgctgacctggactgtgacccgattcttcccccatccctgcaaacctcttatgtcttcctgggtattgttttagccctgataggcgctattttcctcctggttttgtatttgaaccgcaaggggataaaaaagtggatgcataacatcagagatgcctgcagggatcacatggaagggtatcattacagatatgaaatcaatgcggaccccagattaacaaacctcagttctaactcggatgtctgagaaatattagaggacagaccaaggacaactctgcatgagatgtagacttaagctttatccctactaggcttgctccactttcatcctccactatagatacaacggactttgactaaaagcagtgaaggggatttgcttccttgttatgtaaagtttctcggtgtgttctgttaatgtaagacgatgaacagttgtgtatagtgttttaccctcttctttttcttggaactcctcaacacgtatggagggatttttcaggtttcagcatgaacatgggcttcttgctgtctgtctctctctcagtacagttcaaggtgtagcaagtgtacccacacagatagcattcaacaaaagctgcctcaactttttcgagaaaaatactttattcataaatatcagttttattctcatgtacctaagttgtggagaaaataattgcatcctataaactgcctgcagacgttagcaggctcttcaaaataactccatggtgcacaggagcacctgcatccaagagcatgcttacattttactgttctgcatattacaaaaaataacttgcaacttcataacttctttgacaaagtaaattacttttttgattgcagtttatatgaaaatgtactgatttttttttaataaactgcatcgagatccaaccgact

SEQ ID NO: 332560 - DNA, 3078 bp, Homo sapiens
tcctcgttaatttccaccaggaggaggcgcgcagcccagctcccctagtctctcttcttaaatccccctacctacggctgccgaggttggccgcgcgtcgggagtctccccgacagtcctggccctcccccgccccccgggttggtttttcccagctgcggaggttgggaggttgggccaggggctggggtgcgaagagagtcggcgcccgcaacgcggagccgggaagtcgtcgctactctggtggaactcagagttggttctggaggcggcggacgcggaggtccctcagaggatccagcgaggggcgccaacaagaggcgaagaggtggcaccagggcggcggcaggaagaggagcgggagcaggagcgcggagcggagcgtcccgacccgccgtgcgtactttctggagggaaggggcgggggaatcggcccctgagggaagcgcccggtggcgagggggttagccaagttccggctgcggcgccactccctcggttccacgagaggaaagttttttttttccagacgcttccgccggctcgcgccctccgggcccagcctcccgagccttcggagcgggcgccgtcccagcccagctccggggaaacgcgagccgcgatgcctggggggtgctcccggggccccgccgccggggacgggcgtctgcggctggcgcgactagcgctggtactcctgggctgggtctcctcgtcttctcccacctcctcggcatcctccttctcctcctcggcgccgttcctggcttccgccgtgtccgcccagcccccgctgccggaccagtgccccgcgctgtgcgagtgctccgaggcagcgcgcacagtcaagtgcgttaaccgcaatctgaccgaggtgcccacggacctgcccgcctacgtgcgcaacctcttccttaccggcaaccagctggccgtgctccctgccggcgccttcgcccgccggccgccgctggcggagctggccgcgctcaacctcagcggcagccgcctggacgaggtgcgcgcgggcgccttcgagcatctgcccagcctgcgccagctcgacctcagccacaacccactggccgacctcagtcccttcgctttctcgggcagcaatgccagcgtctcggcccccagtccccttgtggaactgatcctgaaccacatcgtgccccctgaagatgagcggcagaaccggagcttcgagggcatggtggtggcggccctgctggcgggccgtgcactgcaggggctccgccgcttggagctggccagcaaccacttcctttacctgccgcgggatgtgctggcccaactgcccagcctcaggcacctggacttaagtaataattcgctggtgagcctgacctacgtgtccttccgcaacctgacacatctagaaagcctccacctggaggacaatgccctcaaggtccttcacaatggcaccctggctgagttgcaaggtctaccccacattagggttttcctggacaacaatccctgggtctgcgactgccacatggcagacatggtgacctggctcaaggaaacagaggtagtgcagggcaaagaccggctcacctgtgcatatccggaaaaaatgaggaatcgggtcctcttggaactcaacagtgctgacctggactgtgacccgattcttcccccatccctgcaaacctcttatgtcttcctgggtattgttttagccctgataggcgctattttcctcctggttttgtatttgaaccgcaaggggataaaaaagtggatgcataacatcagagatgcctgcagggatcacatggaagggtatcattacagatatgaaatcaatgcggaccccagattaacaaacctcagttctaactcggatgtctgagaaatattagaggacagaccaaggacaactctgcatgagatgtagacttaagctttatccctactaggcttgctccactttcatcctccactatagatacaacggactttgactaaaagcagtgaaggggatttgcttccttgttatgtaaagtttctcggtgtgttctgttaatgtaagacgatgaacagttgtgtatagtgttttaccctcttctttttcttggaactcctcaacacgtatggagggatttttcaggtttcagcatgaacatgggcttcttgctgtctgtctctctctcagtacagttcaaggtgtagcaagtgtacccacacagatagcattcaacaaaagctgcctcaactttttcgagaaaaatactttattcataaatatcagttttattctcatgtacctaagttgtggagaaaataattgcatcctataaactgcctgcagacgttagcaggctcttcaaaataactccatggtgcacaggagcacctgcatccaagagcatgcttacattttactgttctgcatattacaaaaaataacttgcaacttcataacttctttgacaaagtaaattacttttttgattgcagtttatatgaaaatgtactgatttttttttaataaactgcatcgagatccaaccgactgaattgttaaaaaaaaaaaaaataaagattcttaaaagaattacagtgtgtgcaagtttgctttgaaaaaaggatgaagggcaggagtattcaatggtcttggttccgatgataattattacttaacatagctgagaatcaaactgtagcaatgtctaatataaatagacttgggagatcgtttcgaaatggtggatccttttagtatttaaatggagagtttgagtattcatgtgactgtatggtcccaaagttaatgctatttatgaaacagttttgtaagaacataatgaagttggtaaaagctaagcgttctgcacaataaacagttcccagtttggggctttttcaaggctaatgaagttattgttggtctagaaaaatagtatttacttaataaaactctgtttgaaattgttctgtggatttttagagcagaatttgaaacaaatgtaatgcaaataaatataaagataaagtgtcttaaagacaatattctgaaataaaagatataaaatataatttaaa

SEQ ID NO: 332561 - DNA, 803 bp, Homo sapiens
gacgagtctcctcgggaaaggcggagggcgggaggccggtcgggtttatttagtgtgggccagggaagaaggaagactttgcggtctgggtgtcggatgcgcgtccccctccggagtaaaagtgaccggaggggttggggaggcgaggccggggcgggcttttggaaggaggtctctgggacagactggagacgactagactcgaaaaggccggtttttgcactccggaagccgcggcagccaccgctgttcacgcctctctcctgcttgtcccaggtccctcagaggatccagcgaggggcgccaacaagaggcgaagaggtggcaccagggcggcggcaggaagaggagcgggagcaggagcgcggagcggagcgtcccgacccgccgtgcgtactttctggagggaaggggcgggggaatcggcccctgagggaagcgcccggtggcgagggggttagccaagttccggctgcggcgccactccctcggttccacgagaggaaagttttttttttccagacgcttccgccggctcgcgccctccgggcccagcctcccgagccttcggagcgggcgccgtcccagcccagctccggggaaacgcgagccgcgatgcctggggggtgctcccggggccccgccgccggggacgggcgtctgcggctggcgcgactagcgctggtactcctgggctgggtctcctcgtcttctcccacctcctcggcatcctccttctcctcctcggcgccgttcctggcttccgccgtgtccgcccagcccccgctgccggaccagtgccc

SEQ ID NO: 332562 - DNA, 2339 bp, Homo sapiens
cttccgccgaggcggtgcaggaaggaacgggagagggagaagtttggtagggaaggaattggggattaagcggtccctcagaggatccagcgaggggcgccaacaagaggcgaagaggtggcaccagggcggcggcaggaagaggagcgggagcaggagcgcggagcggagcgtcccgacccgccgtgcgtactttctggagggaaggggcgggggaatcggcccctgagggaagcgcccggtggcgagggggttagccaagttccggctgcggcgccactccctcggttccacgagaggaaagttttttttttccagacgcttccgccggctcgcgccctccgggcccagcctcccgagccttcggagcgggcgccgtcccagcccagctccggggaaacgcgagccgcgatgcctggggggtgctcccggggccccgccgccggggacgggcgtctgcggctggcgcgactagcgctggtactcctgggctgggtctcctcgtcttctcccacctcctcggcatcctccttctcctcctcggcgccgttcctggcttccgccgtgtccgcccagcccccgctgccggaccagtgccccgcgctgtgcgagtgctccgaggcagcgcgcacagtcaagtgcgttaaccgcaatctgaccgaggtgcccacggacctgcccgcctacgtgcgcaacctcttccttaccggcaaccagctggccgtgctccctgccggcgccttcgcccgccggccgccgctggcggagctggccgcgctcaacctcagcggcagccgcctggacgaggtgcgcgcgggcgccttcgagcatctgcccagcctgcgccagctcgacctcagccacaacccactggccgacctcagtcccttcgctttctcgggcagcaatgccagcgtctcggcccccagtccccttgtggaactgatcctgaaccacatcgtgccccctgaagatgagcggcagaaccggagcttcgagggcatggtggtggcggccctgctggcgggccgtgcactgcaggggctccgccgcttggagctggccagcaaccacttcctttacctgccgcgggatgtgctggcccaactgcccagcctcaggcacctggacttaagtaataattcgctggtgagcctgacctacgtgtccttccgcaacctgacacatctagaaagcctccacctggaggacaatgccctcaaggtccttcacaatggcaccctggctgagttgcaaggtctaccccacattagggttttcctggacaacaatccctgggtctgcgactgccacatggcagacatggtgacctggctcaaggaaacagaggtagtgcagggcaaagaccggctcacctgtgcatatccggaaaaaatgaggaatcgggtcctcttggaactcaacagtgctgacctggactgtgacccgattcttcccccatccctgcaaacctcttatgtcttcctgggtattgttttagccctgataggcgctattttcctcctggttttgtatttgaaccgcaaggggataaaaaagtggatgcataacatcagagatgcctgcagggatcacatggaagggtatcattacagatatgaaatcaatgcggaccccagattaacaaacctcagttctaactcggatgtctgagaaatattagaggacagaccaaggacaactctgcatgagatgtagacttaagctttatccctactaggcttgctccactttcatcctccactatagatacaacggactttgactaaaagcagtgaaggggatttgcttccttgttatgtaaagtttctcggtgtgttctgttaatgtaagacgatgaacagttgtgtatagtgttttaccctcttctttttcttggaactcctcaacacgtatggagggatttttcaggtttcagcatgaacatgggcttcttgctgtctgtctctctctcagtacagttcaaggtgtagcaagtgtacccacacagatagcattcaacaaaagctgcctcaactttttcgagaaaaatactttattcataaatatcagttttattctcatgtacctaagttgtggagaaaataattgcatcctataaactgcctgcagacgttagcaggctcttcaaaataactccatggtgcacaggagcacctgcatccaagagcatgcttacattttactgttctgcatattacaaaaaataacttgcaacttcataacttctttgacaaagtaaattacttttttgattgcagtttatatgaaaatgtactgatttttttttaataaactgcatcgagatccaaccgact

SEQ ID NO: 332563 - DNA, 2216 bp, Homo sapiens
tcctcgttaatttccaccaggaggaggcgcgcagcccagctcccctagtctctcttcttaaatccccctacctacggctgccgaggttggccgcgcgtcgggagtctccccgacagtcctggccctcccccgccccccgggttggtttttcccagctgcggaggttgggaggttgggccaggggctggggtgcgaagagagtcggcgcccgcaacgcggagccgggaagtcgtcgctactctggtggaactcagagttggttctggaggcggcggacgcggaggtccctcagaggatccagcgaggggcgccaacaagaggcgaagaggtggcaccagggcggcggcaggaagaggagcgggagcaggagcgcggagcggagcgtcccgacccgccgtgcgtactttctggagggaaggggcgggggaatcggcccctgagggaagcgcccggtggcgagggggttagccaagttccggctgcggcgccactccctcggttccacgagaggaaagttttttttttccagacgcttccgccggctcgcgccctccgggcccagcctcccgagccttcggagcgggcgccgtcccagcccagctccggggaaacgcgagccgcgatgcctggggggtgctcccggggccccgccgccggggacgggcgtctgcggctggcgcgactagcgctggtactcctgggctgggtctcctcgtcttctcccacctcctcggcatcctccttctcctcctcggcgccgttcctggcttccgccgtgtccgcccagcccccgctgccggaccagtgccccgcgctgtgcgagtgctccgaggcagcgcgcacagtcaagtgcgttaaccgcaatctgaccgaggtgcccacggacctgcccgcctacgtgcgcaacctcttccttaccggcaaccaggcttggagctggccagcaaccacttcctttacctgccgcgggatgtgctggcccaactgcccagcctcaggcacctggacttaagtaataattcgctggtgagcctgacctacgtgtccttccgcaacctgacacatctagaaagcctccacctggaggacaatgccctcaaggtccttcacaatggcaccctggctgagttgcaaggtctaccccacattagggttttcctggacaacaatccctgggtctgcgactgccacatggcagacatggtgacctggctcaaggaaacagaggtagtgcagggcaaagaccggctcacctgtgcatatccggaaaaaatgaggaatcgggtcctcttggaactcaacagtgctgacctggactgtgacccgattcttcccccatccctgcaaacctcttatgtcttcctgggtattgttttagccctgataggcgctattttcctcctggttttgtatttgaaccgcaaggggataaaaaagtggatgcataacatcagagatgcctgcagggatcacatggaagggtatcattacagatatgaaatcaatgcggaccccagattaacaaacctcagttctaactcggatgtctgagaaatattagaggacagaccaaggacaactctgcatgagatgtagacttaagctttatccctactaggcttgctccactttcatcctccactatagatacaacggactttgactaaaagcagtgaaggggatttgcttccttgttatgtaaagtttctcggtgtgttctgttaatgtaagacgatgaacagttgtgtatagtgttttaccctcttctttttcttggaactcctcaacacgtatggagggatttttcaggtttcagcatgaacatgggcttcttgctgtctgtctctctctcagtacagttcaaggtgtagcaagtgtacccacacagatagcattcaacaaaagctgcctcaactttttcgagaaaaatactttattcataaatatcagttttattctcatgtacctaagttgtggagaaaataattgcatcctataaactgcctgcagacgttagcaggctcttcaaaataactccatggtgcacaggagcacctgcatccaagagcatgcttacattttactgttctgcatattacaaaaaataacttgcaacttcataacttctttgacaaagtaaattacttttttgattgcagtttatatgaaaatgtactgatttttttttaataaactgcatcgagatccaaccgact

SEQ ID NO: 332564 - DNA, 635 bp, Homo sapiens
ctctgggtcttgtactcagctcatctgaccctaaagcctgctcctgtgctgttgtcacttctgccttttccttcctcaggttaaaagcccagttttggctggaaaattccactaccttatctactctggggccaggtaacctgttaggtcttacaaaattgaattgaaaagtgaagtcatgggaaacctcttagaaaaatgactgctgttcctggaacaatccccaactggccctttctgcctcctccataaggcgaggtcagactcctcgtgagaaaaactatggtttgggtgtcaggcaaccccaatgcaataggatctgggggatcaaccccaattcaataggctccccaaatagtgcccccactttgtctcatggcctgaaatgccttagataatcaagaagtcttttaaaacagtcatttctcactgtgtttcaaaaaaacttctctgggagactctatcagatgcagcccactgggaagacaatagattaggtatctgaggaaccagaagcaccatcagacaggcaaataggctagctgagataagggcactcttggactactattgcttttgactgccaatgttcccaagtcccaggcttgctggtagtcagccaataagtcattgtg

SEQ ID NO: 332565 - DNA, 748 bp, Homo sapiens
tttgttaactgtatttatggtgtgcaatccactcaaactctagcatgaagcccaaaagataaatttatcaaaactatatcaacctgttaatagataatataaaaatatgtaaattgatacaactaaaagacaaaatgttggagggtggagttaaattatagaattcttttgtgggttttcatataaattgtctcagttcttcagttaaaagccatagagtagctgaatggataaataaatgagacctacctatgtgctcccttcaagaaactcacttcacctgcaaagacacatatagacaaagtggagaagggctggaaaaagatattccatgcaactagaaaacaagagcaagagtagctgtactcgtagcagataagataaactacaaagactgtaaaaactggcagtaaaggagggtcactatatgattaaggggtcaattcaaccagaggatataacaattataaatatctatgcactcaacactgcagctccatataaagccaacattactagatgtaaagggagagagagactgcaatacagtaatagtagggggctttaacatcccactctcagtaatagacagatcatccagacagaaaatcaacaaagaaacagcataaactgcacactagatacaataggtctaactgacatttcacccagctgctgcagaatacacattcttttcatcaacacatggaagatttttaagaatagaccatatcttaggcacaaacaa

SEQ ID NO: 332566 - DNA, 451 bp, Homo sapiens
tcggctctacctgtctctcggctctacctgtctctcggctctacctgtctattgacacagtatgaaaattatagccacaaccattagttaagaaataaaatgcatccgaagtggaaaaaagtagaactatctctattcacagatgacatgaaactcataaagagaaaaataccaagaaactcataaagctagtagagctaacattcagtaaacttgcacagtacatgatcaatgtacaaaaatcagatgtttctatatactagtaatgtacaatctgaaaaggatctaaataaagcaatgaagccatactaccactagaagggggaaaaaaggtgaattctctaaccttgatgtaggaaagggtttgctaactacaactcaaaattgggaagactgaaagattgatcgatttgactacataatttttttttaatttctgtatggccaaaaa

SEQ ID NO: 332567 - DNA, 1986 bp, Homo sapiens
tactgactttcagcaccaacttgtggtcccaggtaagtttccacgctggtactttagccctgggctcgaacctgcggacacgctgtggctgcaactccccgcccgccagacctcagtacgcagcgcggctggtgagaaacataatgcactctgacttccacgcgtggaatggggagatggactgcacggcgggcggacctgctcgggctgatggacggcaggtggactgatgtgcgcagggactggcggcagcgcggtcagagccagtcagccaaagccaggccagcacaatagactgtcccggttcccgccaggaggcggccgagcaccaactgtacggtactgcgcctgcgccgcgaccgccaacgcgcccagtctacgcttgcgcggcgcaacagggccgactgcagctggaagatggcggcgtccgtggtctgtcgggccgctaccgccggggcacaagtgctattgcgcgcccgccgctcgccggccctgctgcggacgccagccttgcggagtacggcaaccttcgctcaggcgctccagttcgtgccggagacgcaggttagcctgctggacaacggcctgcgtgtggcctccgagcagtcctctcagcccacttgcacggtgggagtgtggattgatgttggcagccgttttgagactgagaagaataatggggcaggctactttttggagcatctggctttcaagggaacaaagaatcggcctggcagtgccctggagaaggaggtggagagcatgggggcccatcttaatgcctacagcacccgggagcacacagcttactacatcaaggcgctgtccaaggatctgccgaaagctgtggagctcctgggtgacattgtgcagaactgtagtctggaagactcacagattgagaaggaacgtgatgtgatcctgcgggagatgcaggagaatgatgcatctatgcgagatgtggtctttaactacctgcatgccacagcattccagggcacacctctagcccaggctgtggaggggcccagtgagaatgtcaggaagctgtctcgtgcagacttgaccgagtacctcagcacacattacaaggcccctcgaatggtgctggcagcagctggaggagtggagcaccagcaactgttagacctcgcccagaagcacctcggtggcatcccatggacatatgcagaggacgctgtgcccactcttactccatgccgcttcactggcagtgagatccgccaccgtgatgatgctctaccttttgcccacgtggccattgcagtagagggtcctggctgggccagcccggacaatgtggccttgcaagtggccaatgccatcatcggccactatgactgcacttatggtggtggcgtgcacctgtccagcccactggcttcaggtgctgtggccaacaagctatgccagagtttccagaccttcagcatctgctatgcagagacgggcttgctgggtgcacactttgtctgtgaccgaatgaaaatcgatgacatgatgttcgtcctgcaagggcagtggatgcgcctgtgtaccagtgccacggagagtgaggtggcccggggcaaaaacatcctcagaaatgccctggtatctcatctagatggcactactcctgtgtgtgaggacatcggacgcagcctcctgacctatggccgccgcatccccctggctgaatgggaaagccggattgcggaggtggatgccagtgtggtacgtgagatctgctccaagtacatctatgaccagtgcccagcagtggctggatatggccccattgagcagctcccagactacaaccggatccgtagcggcatgttctggctgcgcttctaggcgggaagcctatgtaagcaagagggcagggccggggtttgtggtcccccccccaccacaaacacagcacttcggctcctctaacctgtgccacaggtgaccaccaataaaatcctctgctgagaa

SEQ ID NO: 332568 - DNA, 747 bp, Homo sapiens
  misc_feature (590)..(590): n is a, c, g, or t
cagtacggatgtgcccacggtggccgtgtgtacatctcaacgaggagggaacgcgctgtgttgatgtggacgagtgcgcgccacctgctgagccctgtgggaagggacatcgctgcgtgaactctcccggcagtttccgctgcgaatgcaagacgggttactattttgacggcatcagcaggacgtgtgtcgatgtcaacgagtgccagcgctaccctgggcgcctgtgtgaccacaagtgcgggccagtacggatgagcatgggggcccatcttaatgcctacagcacccgggagcacacagcttactacatcaaggcgctgtccaaggatctgccgaaagctgtggagctcctgggtgacattgtgcagaactgtagtctggaagactcacagattgagaaggaacgtgatgtgatcctgcgggagatgcaggagaatgatgcatctatgcgagatgtggtctttaactacctgcatgccacagcattccagggcacacctctagcccaggctgtggaggggcccagtgagaatgtcaggaagctgtctcgtgcagacttgaccgagtacctcagcacacatccgtanggcccgcgggccagtacggatgtggcgcctcaacgccaccaccaccctaggcctccagactgtgcctcccaatgctgtcccttgcccttgccacaccctgagcattaacataagagcctggggcctcataaccggcaacactggtggctgggatgcg

SEQ ID NO: 332569 - DNA, 1610 bp, Homo sapiens
aacgttaaggctaggtcgaggctgggtgttgcagctggaagatggcggcgtccgtggtctgtcgggccgctaccgccggggcacaagtgctattgcgcgcccgccgctcgccggccctgctgcggacgccagccttgcggagtacggcaaccttcgctcaggcgctccagttcgtgccggagacgcaggttagcctgctggacaacggcctgcgtgtggcctccgagcagtcctctcagcccacttgcacggtgggagtgtggattgatgttggcagccgttttgagactgagaagaataatggggcaggctactttttggagcatctggctttcaagggaacaaagaatcggcctggcagtgccctggagaaggaggtggagagcatgggggcccatcttaatgcctacagcacccgggagcacacagcttactacatcaaggcgctgtccaaggatctgccgaaagctgtggagctcctgggtgacattgtgcagaactgtagtctggaagactcacagattgagaaggaacgtgatgtgatcctgcgggagatgcaggagaatgatgcatctatgcgagatgtggtctttaactacctgcatgccacagcattccagggcacacctctagcccaggctgtggaggggcccagtgagaatgtcaggaagctgtctcgtgcagacttgaccgagtacctcagcacacattacaaggcccctcgaatggtgctggcagcagctggaggagtggagcaccagcaactgttagacctcgcccagaagcacctcggtggcatcccatggacatatgcagaggacgctgtgcccactcttactccatgccgcttcactggcagtgagatccgccaccgtgatgatgctctaccttttgcccacgtggccattgcagtagagggtcctggctgggccagcccggacaatgtggccttgcaagtggccaatgccatcatcggccactatgactgcacttatggtggtggcgtgcacctgtccagcccactggcttcaggtgctgtggccaacaagctatgccagagtttccagaccttcagcatctgctatgcagagacgggcttgctgggtgcacactttgtctgtgaccgaatgaaaatcgatgacatgatgttcgtcctgcaagggcagtggatgcgcctgtgtaccagtgccacggagagtgaggtggcccggggcaaaaacatcctcagaaatgccctggtatctcatctagatggcactactcctgtgtgtgaggacatcggacgcagcctcctgacctatggccgccgcatccccctggctgaatgggaaagccggattgcggaggtggatgccagtgtggtacgtgagatctgctccaagtacatctatgaccagtgcccagcagtggctggatatggccccattgagcagctcccagactacaaccggatccgtagcggcatgttctggctgcgcttctaggcgggaagcctatgtaagcaagagggcagggccggggtttgtggtcccccccccaccacaaacacagcacttcggctcctctaacctgtgccacaggtgaccaccaataaaatcctctgctgagaa

SEQ ID NO: 332570 - DNA, 2429 bp, Homo sapiens
tactgactttcagcaccaacttgtggtcccaggtaagtttccacgctggtactttagccctgggctcgaacctgcggacacgctgtggctgcaactccccgcccgccagacctcagtacgcagcgcggctggtgagaaacataatgcactctgacttccacgcgtggaatggggagatggactgcacggcgggcggacctgctcgggctgatggacggcaggtggactgatgtgcgcagggactggcggcagcgcggtcagagccagtcagccaaagccaggccagcacaatagactgtcccggttcccgccaggaggcggccgagcaccaactgtacggtactgcgcctgcgccgcgaccgccaacgcgcccagtctacgcttgcgcggcgcaacagggccgactgcagctggaagatggcggcgtccgtggtctgtcgggccgctaccgccggggcacaagtgctattgcgcgcccgccgctcgccggccctgctgcggacgccagccttgcggagtacggcaaccttcgctcaggcgctccagttcgtgccggagacgcaggttagcctgctggacaacggcctgcgtgtggcctccgagcagtcctctcagcccacttgcacggtgggagtgtggattgatgttggcagccgttttgagactgagaagaataatggggcaggctactttttggagcatctggctttcaagggaacaaagaatcggcctggcagtgccctggagaaggaggtggagagcatgggggcccatcttaatgcctacagcacccgggagcacacagcttactacatcaaggcgctgtccaaggatctgccgaaagctgtggagctcctgggtgacattgtgcagaactgtagtctggaagactcacagattgagaaggaacgtgatgtgatcctgcgggagatgcaggagaatgatgcatctatgcgagatgtggtctttaactacctgcatgccacagcattccagggcacacctctagcccaggctgtggaggggcccagtgagaatgtcaggaagctgtctcgtgcagacttgaccgagtacctcagcacacattacaaggcccctcgaatggtgctggcagcagctggaggagtggagcaccagcaactgttagacctcgcccagaagcacctcggtggcatcccatggacatatgcagaggacgctgtgcccactcttactccatgccgcttcactggcagtgagatccgccaccgtgatgatgctctaccttttgcccacgtggccattgcagtagagggtcctggctgggccagcccggacaatgtggccttgcaagtggccaatgccatcatcggccactatgactgcacttatggtggtggcgtgcacctgtccagcccactggcttcaggtgctgtggccaacaagctatgccagagtttccagaccttcagcatctgctatgcagagacgggcttgctgggtgcacactttgtctgtgaccgaatgaaaatcgatgacatgatgttcgtcctgcaagggcagtggatgcgcctgtgtaccagtgccacggagagtgaggtggcccggggcaaaaacatcctcagaaatgccctggtatctcatctagatggcactactcctgtgtgtgaggacatcggacgcagcctcctgacctatggccgccgcatccccctggctgaatgggaaagccggattgcggaggtggatgccagtgtggtacgtgagatctgctccaagtacatctatgaccagtgcccagcagtggctggatatggtaagtggcctagggggtctgctctttgtttatttcctcaggccgttctcttggcctccccttccacctctgctcccgcactgctgctcagcttacagagcagccagttaaggccccaagcagctctccccagtcccctggctgccagggagttcttgctcagaaaacctgtcccagcagttccttgactgcctgccaaggtgccttcatcaataccctgcacccgtcaggtaacgggcacctccatgtggggtggggcttcaagggccagaacatgaagggacaggctcagcacccctgggggaatgttctctcctctctttccactcaaagcctgtcttgtgctgctctgggcagcatctccgagctgggtgcggcacagggccaggtgtccctgtgcaggccaggtaccccaccctgacgctccaccctatccccacagggccccattgagcagctcccagactacaaccggatccgtagcggcatgttctggctgcgcttctaggcgggaagcctatgtaagcaagagggcagggccggggtttgtggtcccccccccaccacaaacacagcacttcggctcctctaacctgtgccacaggtgaccaccaataaaatcctctgctgagaa

SEQ ID NO: 332571 - DNA, 2729 bp, Homo sapiens
tactgactttcagcaccaacttgtggtcccaggtaagtttccacgctggtactttagccctgggctcgaacctgcggacacgctgtggctgcaactccccgcccgccagacctcagtacgcagcgcggctggtgagaaacataatgcactctgacttccacgcgtggaatggggagatggactgcacggcgggcggacctgctcgggctgatggacggcaggtggactgatgtgcgcagggactggcggcagcgcggtcagagccagtcagccaaagccaggccagcacaatagactgtcccggttcccgccaggaggcggccgagcaccaactgtacggtactgcgcctgcgccgcgaccgccaacgcgcccagtctacgcttgcgcggcgcaacagggccgactgcagctggaagatggcggcgtccgtggtctgtcgggccgctaccgccggggcacaagtgctattgcgcgcccgccgctcgccggccctgctgcggacgccagccttgcggagtacggcaaccttcgctcaggcgctccagttcgtgccggagacgcaggttagcctgctggacaacggcctgcgtgtggcctccgagcagtcctctcagcccacttgcacggtgggagtgtggattgatgttggcagccgttttgagactgagaagaataatggggcaggctactttttggagcatctggctttcaagggaacaaagaatcggcctggcagtgccctggagaaggaggtggagagcatgggggcccatcttaatgcctacagcacccgggagcacacagcttactacatcaaggcgctgtccaaggatctgccgaaagctgtggagctcctgggtgacattgtgcagaactgtagtctggaagactcacagattgagaaggaacgtgatgtgatcctgcgggagatgcaggagaatgatgcatctatgcgagatgtggtctttaactacctgcatgccacagcattccagggcacacctctagcccaggctgtggaggggcccagtgagaatgtcaggaagctgtctcgtgcagacttgaccgagtacctcagcacacattacaaggcccctcgaatggtgctggcagcagctggaggagtggagcaccagcaactgttagacctcgcccagaagcacctcggtggcatcccatggacatatgcagaggacgctgtgcccactcttactccatgccgcttcactggcagtgagatccgccaccgtgatgatgctctaccttttgcccacgtggccattgcagtagagggtcctggctgggccagcccggacaatgtggccttgcaagtggccaatgccatcatcggccactatgactgcacttatggtggtggcgtgcacctgtccagcccactggcttcaggtgctgtggccaacaagctatgccagagtttccagaccttcagcatctgctatgcagagacgggcttgctgggtgcacactttgtctgtgaccgaatgaaaatcgatgacatgatgttcgtcctgcaagggcagtggatgcgcctgtgtaccagtgccacggagagtgaggtggcccggggcaaaaacatcctcagaaatgccctggtatctcatctagatggcactactcctgtgtgtgaggacatcggacgcagcctcctgacctatggccgccgcatccccctggctgaatgggaaagccggattgcggtaacatggacccctgggagaggttctggagtcttggcctggcagacacctgggaggtgtagggttggggcctggcatagcgcagcctgctcctataggcatccctggtgtcctaggcagctgtcacctgcaggggtagcataggaggtctatagcagggatcccttctgcctttcctcttttgggctggggacagctgcatgctgcctgtgggagatctctgctagttggatgatgctgactggctgaggtggtggccaggtgcccgttagccagtatgccctctgcctcaccctgcaggaggtggatgccagtgtggtacgtgagatctgctccaagtacatctatgaccagtgcccagcagtggctggatatggtaagtggcctagggggtctgctctttgtttatttcctcaggccgttctcttggcctccccttccacctctgctcccgcactgctgctcagcttacagagcagccagttaaggccccaagcagctctccccagtcccctggctgccagggagttcttgctcagaaaacctgtcccagcagttccttgactgcctgccaaggtgccttcatcaataccctgcacccgtcaggtaacgggcacctccatgtggggtggggcttcaagggccagaacatgaagggacaggctcagcacccctgggggaatgttctctcctctctttccactcaaagcctgtcttgtgctgctctgggcagcatctccgagctgggtgcggcacagggccaggtgtccctgtgcaggccaggtaccccaccctgacgctccaccctatccccacagggccccattgagcagctcccagactacaaccggatccgtagcggcatgttctggctgcgcttctaggcgggaagcctatgtaagcaagagggcagggccggggtttgtggtcccccccccaccacaaacacagcacttcggctcctctaacctgtgccacaggtgaccaccaataaaatcctctgctgagaa

SEQ ID NO: 332572 - DNA, 1766 bp, Homo sapiens
tactgactttcagcaccaacttgtggtcccaggtaagtttccacgctggtactttagccctgggctcgaacctgcggacacgctgtggctgcaactccccgcccgccagacctcagtacgcagcgcggctggtgagaaacataatgcactctgacttccacgcgtggaatggggagatggactgcacggcgggcggacctgctcgggctgatggacggcaggtggactgatgtgcgcagggactggcggcagcgcggtcagagccagtcagccaaagccaggccagcacaatagactgtcccggttcccgccaggaggcggccgagcaccaactgtacggtactgcgcctgcgccgcgaccgccaacgcgcccagtctacgcttgcgcggcgcaacagggccgactgcagctggaagatggcggcgtccgtggtctgtcgggccgctaccgccggggcacaagtgctattgcgcgcccgccgctcgccggccctgctgcggacgccagccttgcggagtacggcaaccttcgctcaggcgctccagttcgtgccggagacgcaggttagcctgctggacaacggcctgcgtgtggcctccgagcagtcctctcagcccacttgcacggtgggagtgtggattgatgttggcagccgttttgagactgagaagaataatggggcaggctactttttggagcatctggctttcaagggaacaaagaatcggcctggcagtgccctggagaaggaggtggagagcatgggggcccatcttaatgcctacagcacccgggagcacacagcttactacatcaaggcgctgtccaaggatctgccgaaagctgtggagctcctgggtgacattgtgcagaactgtagtctggaagactcacagattgagaaggaacgtgatgtgatcctgcgggagatgcaggagaatgatgcatctatgcgagatgtggtctttaactacctgcatgccacagcattccagggcacacctctagcccaggctgtggaggggcccagtgagaatgtcaggaagctgtctcgtgcagacttgaccgagtacctcagcacacattacaaggcccctcgaatggtgctggcagcagctggaggagtggagcaccagcaactgttagacctcgcccagaagcacctcggtggcatcccatggacatatgcagaggacgctgtgcccactcttactccatgccgcttcactggcagtgagatccgccaccgtgatgatgctctaccttttgcccacgtggccattgcagtagagggtcctggctgggccagcccggacaatgtggccttgcaagtggccaatgccatcatcggccactatgactgcacttatggtggtggcgtgcacctgtccagcccactggcttcaggtgctgtggccaacaagctatgccagagtttccagaccttcagcatctgctatgcagagacgggcttgctgggtgcacactttgtctgtgaccgaatgaaaatcgatgacatgatgttcgtcctgcaagggcagtggatgcgcctgtgtaccagtgccacggagagtgaggtggcccggggcaaaaacatcctcagaaatgccctggtatctcatctagatggcactactcctgtgtgtgaggacatcggacgcagcctcctgacctatggccgccgcatccccccaccacaaacacagcacttcggctcctctaacctgtgccacaggtgaccaccaataaaatcctctgctgagaa

SEQ ID NO: 332573 - DNA, 1616 bp, Homo sapiens
tactgactttcagcaccaacttgtggtcccaggtaagtttccacgctggtactttagccctgggctcgaacctgcggacacgctgtggctgcaactccccgcccgccagacctcagtacgcagcgcggctggtgagaaacataatgcactctgacttccacgcgtggaatggggagatggactgcacggcgggcggacctgctcgggctgatggacggcaggtggactgatgtgcgcagggactggcggcagcgcggtcagagccagtcagccaaagccaggccagcacaatagactgtcccggttcccgccaggaggcggccgagcaccaactgtacggtactgcgcctgcgccgcgaccgccaacgcgcccagtctacgcttgcgcggcgcaacagggccgactgcagctggaagatggcggcgtccgtggtctgtcgggccgctaccgccggggcacaagtgctattgcgcgcccgccgctcgccggccctgctgcggacgccagccttgcggagtacggcaaccttcgctcaggcgctccagttcgtgccggagacgcaggttagcctgctggacaacggcctgcgtgtggcctccgagcagtcctctcagcccacttgcacggtgggagtgtggattgatgttggcagccgttttgagactgagaagaataatggggcaggctactttttggagcatctggctttcaagggaacaaagaatcggcctggcagtgccctggagaaggaggtggagagcatgggggcccatcttaatgcctacagcacccgggagcacacagcttactacatcaaggcgctgtccaaggatctgccgaaagctgtggagctcctgggtgacattgtgcagaactgtagtctggaagactcacagattgagaaggaacgtgatgtgatcctgcgggagatgcaggagaatgatgcatctatgcgagatgtggtctttaactacctgcatgccacagcattccagggcacacctctagcccaggctgtggaggggcccagtgagaatgtcaggaagctgtctcgtgcagacttgaccgagtacctcagcacacattacaaggcccctcgaatggtgctggcagcagctggaggagtggagcaccagcaactgttagacctcgcccagaagcacctcggtggcatcccatggacatatgcagaggacgctgtgcccactcttactccatgccgcttcactggcagtgagatccgccaccgtgatgatgctctaccttttgcccacgtggccattgcagtagagggtcctggctgggccagcccggacaatgtggccttgcaagtggccaatgccatcatcggccactatgactgcacttatggtggtggcgtgcacctgtccagcccactggcttcaggtgctgtggccaacaagctatgccagaagttcaagagatttatggattatggttatgcagaaaacggggcattgcgtgggtgagagagatagatatgtgaccggaatgaaaatatggatgaaggtgaagagatggaacatgaaagggagagtggatggaacaagagtaacagggaaagaggaaagtaaggagggaccaggggcagaaa

SEQ ID NO: 332574 - DNA, 1520 bp, Homo sapiens
  misc_feature (59)..(59): n is a, c, g, or t
  misc_feature (72)..(72): n is a, c, g, or t
  misc_feature (138)..(138): n is a, c, g, or t
  misc_feature (141)..(141): n is a, c, g, or t
  misc_feature (143)..(144): n is a, c, g, or t
  misc_feature (146)..(146): n is a, c, g, or t
gggcggaagcaggtgggagggaatggtggggaagcaaggattggggagtaagggaagantaggtcaggagcnacagtaagtgcaggagaaggaggtaagaatggtggaaagagaggggtgggtgtggattgtgtatgnagngnngngaggagagttggagggtgggagtgtggattgatgttggcagccgttttgagactgagaagaataatggggcaggctactttttggagcatctggctttcaagggaacaaagaatcggcctggcagtgccctggagaaggaggtggagagcatgggggcccatcttaatgcctacagcacccgggagcacacagcttactacatcaaggcgctgtccaaggatctgccgaaagctgtggagctcctgggtgacattgtgcagaactgtagtctggaagactcacagattgagaaggaacgtgatgtgatcctgcgggagatgcaggagaatgatgcatctatgcgagatgtggtctttaactacctgcatgccacagcattccagggcacacctctagcccaggctgtggaggggcccagtgagaatgtcaggaagctgtctcgtgcagacttgaccgagtacctcagcacacattacaaggcccctcgaatggtgctggcagcagctggaggagtggagcaccagcaactgttagacctcgcccagaagcacctcggtggcatcccatggacatatgcagaggacgctgtgcccactcttactccatgccgcttcactggcagtgagatccgccaccgtgatgatgctctaccttttgcccacgtggccattgcagtagagggtcctggctgggccagcccggacaatgtggccttgcaagtggccaatgccatcatcggccactatgactgcacttatggtggtggcgtgcacctgtccagcccactggcttcaggtgctgtggccaacaagctatgccagagtttccagaccttcagcatctgctatgcagagacgggcttgctgggtgcacactttgtctgtgaccgaatgaaaatcgatgacatgatgttcgtcctgcaagggcagtggatgcgcctgtgtaccagtgccacggagagtgaggtggcccggggcaaaaacatcctcagaaatgccctggtatctcatctagatggcactactcctgtgtgtgaggacatcggacgcagcctcctgacctatggccgccgcatccccctggctgaatgggaaagccggattgcggaggtggatgccagtgtggtacgtgagatctgctccaagtacatctatgaccagtgcccagcagtggctggatatggccccattgagcagctcccagactacaaccggatccgtagcggcatgttctggctgcgcttctaggcgggaagcctatgtaagcaagagggcagggccggggtttgtggtcccccccccaccacaaacacagcacttcggctcctctaacctgtgccacaggtgaccaccaataaaatcctctgctgagaa

SEQ ID NO: 332575 - DNA, 1425 bp, Homo sapiens
tactgactttcagcaccaacttgtggtcccaggtaagtttccacgctggtactttagccctgggctcgaacctgcggacacgctgtggctgcaactccccgcccgccagacctcagtacgcagcgcggctggtgagaaacataatgcactctgacttccacgcgtggaatggggagatggactgcacggcgggcggacctgctcgggctgatggacggcaggtggactgatgtgcgcagggactggcggcagcgcggtcagagccagtcagccaaagccaggccagcacaatagactgtcccggttcccgccaggaggcggccgagcaccaactgtacggtactgcgcctgcgccgcgaccgccaacgcgcccagtctacgcttgcgcggcgcaacagggccgactgcagctggaagatggcggcgtccgtggtctgtcgggccgctaccgccggggcacaagtgctattgcgcgcccgccgctcgccggccctgctgcggacgccagccttgcggagtacggcaaccttcgctcaggcgctccagttcgtgccggagacgcaggttagcctgctggacaacggcctgcgtgtggcctccgagcagtcctctcagcccacttgcacggtgggagtgtggattgatgttggcagccgttttgagactgagaagaataatggggcaggctactttttggagcatctggctttcaagggaacaaagaatcggcctggcagtgccctggagaaggaggtggagagcatgggggcccatcttaatgcctacagcacccgggagcacacagcttactacatcaaggcgctgtccaaggatctgccgaaagctgtggagctcctgggtgacattgtgcagaactgtagtctggaagactcacagattgagaaggaacgtgatgtgatcctgcgggagatgcaggagaatgatgcatctatgcgagatgtggtctttaactacctgcatgccacagcattccagggcacacctctagcccaggctgtggaggggcccagtgagaatgtcaggaagctgtctcgtgcagacttgaccgagtacctcagcacacattacaaggcccctcgaatggtgctggcagcagctggaggagtggagcaccagcaactgttagacctcgcccagaagcacctcggtggcatcccatggacatatgcagaggacgctgtgcccactcttactccatgccgcttcactggcagtgagaccgcaccggatatgctaactttgccagtggcaggagaaaggccggcaggaaaccgaatgtgtgaatggaggacacgccaaaaggacatggcgggtcgacaaccgcaaggtggacaatcacaaccaacagtacaacagggggacgtgtgaaacactctatgagcgacagggaacaaaaaacggagg

SEQ ID NO: 332576 - DNA, 1900 bp, Homo sapiens
tactgactttcagcaccaacttgtggtcccaggtaagtttccacgctggtactttagccctgggctcgaacctgcggacacgctgtggctgcaactccccgcccgccagacctcagtacgcagcgcggctggtgagaaacataatgcactctgacttccacgcgtggaatggggagatggactgcacggcgggcggacctgctcgggctgatggacggcaggtggactgatgtgcgcagggactggcggcagcgcggtcagagccagtcagccaaagccaggccagcacaatagactgtcccggttcccgccaggaggcggccgagcaccaactgtacggtactgcgcctgcgccgcgaccgccaacgcgcccagtctacgcttgcgcggcgcaacagggccgactgcagctggaagatggcggcgtccgtggtctgtcgggccgctaccgccggggcacaagtgctattgcgcgcccgccgctcgccggccctgctgcggacgccagccttgcggagtacggcaaccttcgctcaggcgctccagttcgtgccggagacgcaggttagcctgctggacaacggcctgcgtgtggcctccgagcagtcctctcagcccacttgcacggtgggagtgtggattgatgttggcagccgttttgagactgagaagaataatggggcaggctactttttggagcatctggctttcaagggaacaaagaatcggcctggcagtgccctggagaaggaggtggactgtggagctcctgggtgacattgtgcagaactgtagtctggaagactcacagattgagaaggaacgtgatgtgatcctgcgggagatgcaggagaatgatgcatctatgcgagatgtggtctttaactacctgcatgccacagcattccagggcacacctctagcccaggctgtggaggggcccagtgagaatgtcaggaagctgtctcgtgcagacttgaccgagtacctcagcacacattacaaggcccctcgaatggtgctggcagcagctggaggagtggagcaccagcaactgttagacctcgcccagaagcacctcggtggcatcccatggacatatgcagaggacgctgtgcccactcttactccatgccgcttcactggcagtgagatccgccaccgtgatgatgctctaccttttgcccacgtggccattgcagtagagggtcctggctgggccagcccggacaatgtggccttgcaagtggccaatgccatcatcggccactatgactgcacttatggtggtggcgtgcacctgtccagcccactggcttcaggtgctgtggccaacaagctatgccagagtttccagaccttcagcatctgctatgcagagacgggcttgctgggtgcacactttgtctgtgaccgaatgaaaatcgatgacatgatgttcgtcctgcaagggcagtggatgcgcctgtgtaccagtgccacggagagtgaggtggcccggggcaaaaacatcctcagaaatgccctggtatctcatctagatggcactactcctgtgtgtgaggacatcggacgcagcctcctgacctatggccgccgcatccccctggctgaatgggaaagccggattgcggaggtggatgccagtgtggtacgtgagatctgctccaagtacatctatgaccagtgcccagcagtggctggatatggccccattgagcagctcccagactacaaccggatccgtagcggcatgttctggctgcgcttctaggcgggaagcctatgtaagcaagagggcagggccggggtttgtggtcccccccccaccacaaacacagcacttcggctcctctaacctgtgccacaggtgaccaccaataaaatcctctgctgagaa

SEQ ID NO: 332577 - DNA, 1077 bp, Homo sapiens
ccaataggctaggtacgaggccgggtgttaatcggccgaggggaaggagatgtggtctttaactacctgcatgccacagcattccagggcacacctctagcccaggctgtggaggggcccagtgagaatgtcaggaagctgtctcgtgcagacttgaccgagtacctcagcacacattacaaggcccctcgaatggtgctggcagcagctggaggagtggagcaccagcaactgttagacctcgcccagaagcacctcggtggcatcccatggacatatgcagaggacgctgtgcccactcttactccatgccgcttcactggcagtgagatccgccaccgtgatgatgctctaccttttgcccacgtggccattgcagtagagggtcctggctgggccagcccggacaatgtggccttgcaagtggccaatgccatcatcggccactatgactgcacttatggtggtggcgtgcacctgtccagcccactggcttcaggtgctgtggccaacaagctatgccagagtttccagaccttcagcatctgctatgcagagacgggcttgctgggtgcacactttgtctgtgaccgaatgaaaatcgatgacatgatgttcgtcctgcaagggcagtggatgcgcctgtgtaccagtgccacggagagtgaggtggcccggggcaaaaacatcctcagaaatgccctggtatctcatctagatggcactactcctgtgtgtgaggacatcggacgcagcctcctgacctatggccgccgcatccccctggctgaatgggaaagccggattgcggaggtggatgccagtgtggtacgtgagatctgctccaagtacatctatgaccagtgcccagcagtggctggatatggccccattgagcagctcccagactacaaccggatccgtagcggcatgttctggctgcgcttctaggcgggaagcctatgtaagcaagagggcagggccggggtttgtggtcccccccccaccacaaacacagcacttcggctcctctaacctgtgccacaggtgaccaccaataaaatcctctgctgagaa

SEQ ID NO: 332578 - DNA, 1318 bp, Homo sapiens
  misc_feature (1151)..(1151): n is a, c, g, or t
  misc_feature (1154)..(1154): n is a, c, g, or t
  misc_feature (1158)..(1159): n is a, c, g, or t
  misc_feature (1161)..(1161): n is a, c, g, or t
  misc_feature (1165)..(1165): n is a, c, g, or t
  misc_feature (1175)..(1175): n is a, c, g, or t
  misc_feature (1181)..(1181): n is a, c, g, or t
  misc_feature (1190)..(1190): n is a, c, g, or t
  misc_feature (1193)..(1193): n is a, c, g, or t
  misc_feature (1197)..(1197): n is a, c, g, or t
  misc_feature (1203)..(1203): n is a, c, g, or t
  misc_feature (1205)..(1205): n is a, c, g, or t
tactgactttcagcaccaacttgtggtcccaggtaagtttccacgctggtactttagccctgggctcgaacctgcggacacgctgtggctgcaactccccgcccgccagacctcagtacgcagcgcggctggtgagaaacataatgcactctgacttccacgcgtggaatggggagatggactgcacggcgggcggacctgctcgggctgatggacggcaggtggactgatgtgcgcagggactggcggcagcgcggtcagagccagtcagccaaagccaggccagcacaatagactgtcccggttcccgccaggaggcggccgagcaccaactgtacggtactgcgcctgcgccgcgaccgccaacgcgcccagtctacgcttgcgcggcgcaacagggccgactgcagctggaagatggcggcgtccgtggtctgtcgggccgctaccgccggggcacaagtgctattgcgcgcccgccgctcgccggccctgctgcggacgccagccttgcggagtacggcaaccttcgctcaggcgctccagttcgtgccggagacgcaggttagcctgctggacaacggcctgcgtgtggcctccgagcagtcctctcagcccacttgcacggtgggagtgtggattgatgttggcagccgttttgagactgagaagaataatggggcaggctactttttggagcatctggctttcaagggaacaaagaatcggcctggcagtgccctggagaaggaggtggagagcatgggggcccatcttaatgcctacagcacccgggagcacacagcttactacatcaaggcgctgtccaaggatctgccgaaagctgtggagctcctgggtgacattgtgcagaactgtagtctggaagactcacagattgagaaggaacgtgatgtgatcctgcgggagatgcaggagaatgatgcatctatgcgagatgtggtctttaactacctgcatgccacagcattccagggcacacctctagcccaggctgtggaggggcccagtgagaatgtcaggaagctgtctcgtgcagacttgaccgagtacctcagcacacattacaaggcccctcgaatggtgctggcagcagctggagagtgggcccgcactgtgtgacctgccanaanactnngnggcncctggctttncgaggngcgtgcccnctntccngcggtntngggggaacccgcggggtgtcccttggccggctcggaaggcgtgcgggccgcaaagtgccgggcgcaccccccaatgcttgtggggccacccgctggcgtcacaccctcggggt

SEQ ID NO: 332579 - DNA, 917 bp, Homo sapiens
tactgactttcagcaccaacttgtggtcccaggtaagtttccacgctggtactttagccctgggctcgaacctgcggacacgctgtggctgcaactccccgcccgccagacctcagtacgcagcgcggctggtgagaaacataatgcactctgacttccacgcgtggaatggggagatggactgcacggcgggcggacctgctcgggctgatggacggcaggtggactgatgtgcgcagggactggcggcagcgcggtcagagccagtcagccaaagccaggccagcacaatagactgtcccggttcccgccaggaggcggccgagcaccaactgtacggtactgcgcctgcgccgcgaccgccaacgcgcccagtctacgcttgcgcggcgcaacagggccgactgcagctggaagatggcggcgtccgtggtctgtcgggccgctaccgccggggcacaagtgctattgcgcgcccgccgctcgccggccctgctgcggacgccagccttgcggagtacggcaaccttcgctcaggcgctccagttcgtgccggagacgcaggttagcctgctggacaacggcctgcgtgtggcctcctgacctatggccgccgcatccccctggctgaatgggaaagccggattgcggaggtggatgccagtgtggtacgtgagatctgctccaagtacatctatgaccagtgcccagcagtggctggatatggccccattgagcagctcccagactacaaccggatccgtagcggcatgttctggctgcgcttctaggcgggaagcctatgtaagcaagagggcagggccggggtttgtggtcccccccccaccacaaacacagcacttcggctcctctaacctgtgccacaggtgaccaccaataaaatcctctgctgagaa

SEQ ID NO: 332580 - DNA, 865 bp, Homo sapiens
tactgactttcagcaccaacttgtggtcccaggtaagtttccacgctggtactttagccctgggctcgaacctgcggacacgctgtggctgcaactccccgcccgccagacctcagtacgcagcgcggctggtgagaaacataatgcactctgacttccacgcgtggaatggggagatggactgcacggcgggcggacctgctcgggctgatggacggcaggtggactgatgtgcgcagggactggcggcagcgcggtcagagccagtcagccaaagccaggccagcacaatagactgtcccggttcccgccaggaggcggccgagcaccaactgtacggtactgcgcctgcgccgcgaccgccaacgcgcccagtctacgcttgcgcggcgcaacagggccgactgcagctggaagatggcggcgtccgtggtctgtcgggccgctaccgccggggcacaagtgctattgcgcgcccgccgctcgccggccctgctgcggacgccagccttgcggagtacggcaaccttcgctcaggcgctccagttcgtgccggagacgcaggttagcctgctggacaacggcctgcgtgtggcctccgagcagtcctctcagcccacttgcacggtgggagtgtggattgatgttggcagccgttttgagactgagaagaataatggggcaggctactttttggagcatctggctttcaagcggcatgttctggctgcgcttctaggcgggaagcctatgtaagcaagagggcagggccggggtttgtggtcccccccccaccacaaacacagcacttcggctcctctaacctgtgccacaggtgaccaccaataaaatcctctgctgagaa

SEQ ID NO: 332581 - DNA, 1210 bp, Homo sapiens
tactgactttcagcaccaacttgtggtcccaggtaagtttccacgctggtactttagccctgggctcgaacctgcggacacgctgtggctgcaactccccgcccgccagacctcagtacgcagcgcggctggtgagaaacataatgcactctgacttccacgcgtggaatggggagatggactgcacggcgggcggacctgctcgggctgatggacggcaggtggactgatgtgcgcagggactggcggcagcgcggtcagagccagtcagccaaagccaggccagcacaatagactgtcccggttcccgccaggaggcggccgagcaccaactgtacggtactgcgcctgcgccgcgaccgccaacgcgcccagtctacgcttgcgcggcgcaacagggccgactgcagctggaagatggcggcgtccgtggtctgtcgggccgctaccgccggggcacaagtgctattgcgcgcccgccgctcgccggccctgctgcggacgccagccttgcggagtacggcaaccttcgctcaggcgctccagttcgtgccggagacgcaggttagcctgctggacaacggcctgcgtgtggcctccgagcagtcctctcagcccacttgcacgggagtgtggattgatgttgcgcacgccgtttagagcaacttgcagcaagaatcatggcgcgcagtgcatagctgttttggtgagtcatctggcctttcacacgggtaacaatagaatcgtcctgtgcagctgccctgtgtagaagggacggtggatgatgcagtgggagtgccccagtcttaattgcctacagcaatccggaaattcaaccacatgggtatacctaccatcaaaagggcagactgtcgcaatggtatctgccgacaaaagctggtgttcaagctcctggcgtagaacatgtgtgccaaaaagacttgttagcttcatcgggaatggagcgtcacaagattgtaggtacacgagcaacggttggcattggtagaactacctgcgggagcatgattgcttagggggaacaagagtgcattcgccaattcctttatttggcggcaagtaattgctcgggtcccttcttgaaacctttaacgcttgtcgattgcccctaatcaggccctattttcccaagggggtcccaccacccttcgttatgtcccgccagggccctgttggcacgggcgggccc

SEQ ID NO: 332582 - DNA, 393 bp, Homo sapiens
gatgtgatcctgcgggagatgcaggagaatgatgcatctatgcgagatgtggtctttaactacctgcatgccacagcattccagggcacacctctagcccaggctgtggaggggcccagtgagaatgtcaggtgagagttggctggccttgtggggggatgcttgctccattctggcctggccagaccctttccaggtcacatttttagttggctagctgtcggggttattttcctgagttatgcaactggagacagtttctgtatccatgtggtccagtgagtcttttttaatggctttgtgggcttcacttgaattttgggctttgttttaaggtatgttttggtgcatgtcctgacagtccaagggcgaagtgtctgggtgtcccctcca

SEQ ID NO: 332583 - DNA, 786 bp, Homo sapiens
  misc_feature (685)..(685): n is a, c, g, or t
ccaataggctaggtacgaggccgggtgttaatcggccgaggggaagcagctggaagatggcggcgtccgtggtctgtcgggccgctaccgccggggcacaagtgctattgcgcgcccgccgctcgccggccctgctgcggacgccagccttgcggagtacggcaaccttcgctcaggcgctccagttcgtgccggagacgcaggttagcctgctggacaacggcctgcgtgtggcctccgagcagtcctctcagcccacttgcacggtgggagtgtggattgatgttggcagccgttttgagactgagaagaataatggggcaggctactttttggagcatctggctttcaagggaacaaagaatcggcctggcagtgccctggagaaggaggtggagagcatgggggcccatcttaatgcctacagcacccgggagcacacagcttactacatcaaggcgctgtccaaggatctgccgaaagctgtggagctcctgggtgacattgtgcagaactgtagtctggaagactcacagattgagaaggaacgtgatgtgatcctgcgggagatgcaggagaatgatgcatctatgcgagatgtggtctttaactacctgcatgccacagcattccagggcacacctctagcccaggctgtggaggggcccagtgagaatgtcaggangctgtctcgtgcagacttgacgagtactcacgcccattacaggccctcgatggctgcgcgctgccgatggcccccactgtttactcccaaccccgggctcc

SEQ ID NO: 332584 - DNA, 1625 bp, Homo sapiens
ccaataggctaggtacgaggccgggtgttaatcggccgaggggaagcagctggaagatggcggcgtccgtggtctgtcgggccgctaccgccggggcacaagtgctattgcgcgcccgccgctcgccggccctgctgcggacgccagccttgcggagtacggcaaccttcgctcaggcgctccagttcgtgccggagacgcaggttagcctgctggacaacggcctgcgtgtggcctccgagcagtcctctcagcccacttgcacggtgggagtgtggattgatgttggcagccgttttgagactgagaagaataatggggcaggctactttttggagcatctggctttcaagggaacaaagaatcggcctggcagtgccctggagaaggaggtggagagcatgggggcccatcttaatgcctacagcacccgggagcacacagcttactacatcaaggcgctgtccaaggatctgccgaaagctgtggagctcctgggtgacattgtgcagaactgtagtctggaagactcacagattgagaaggaacgtgatgtgatcctgcgggagatgcaggagaatgatgcatctatgcgagatgtggtctttaactacctgcatgccacagcattccagggcacacctctagcccaggctgtggaggggcccagtgagaatgtcaggaagctgtctcgtgcagacttgaccgagtacctcagcacacattacaaggcccctcgaatggtgctggcagcagctggaggagtggagcaccagcaactgttagacctcgcccagaagcacctcggtggcatcccatggacatatgcagaggacgctgtgcccactcttactccatgccgcttcactggcagtgagatccgccaccgtgatgatgctctaccttttgcccacgtggccattgcagtagagggtcctggctgggccagcccggacaatgtggccttgcaagtggccaatgccatcatcggccactatgactgcacttatggtggtggcgtgcacctgtccagcccactggcttcaggtgctgtggccaacaagctatgccagagtttccagaccttcagcatctgctatgcagagacgggcttgctgggtgcacactttgtctgtgaccgaatgaaaatcgatgacatgatgttcgtcctgcaagggcagtggatgcgcctgtgtaccagtgccacggagagtgaggtggcccggggcaaaaacatcctcagaaatgccctggtatctcatctagatggcactactcctgtgtgtgaggacatcggacgcagcctcctgacctatggccgccgcatccccctggctgaatgggaaagccggattgcggaggtggatgccagtgtggtacgtgagatctgctccaagtacatctatgaccagtgcccagcagtggctggatatggccccattgagcagctcccagactacaaccggatccgtagcggcatgttctggctgcgcttctaggcgggaagcctatgtaagcaagagggcagggccggggtttgtggtcccccccccaccacaaacacagcacttcggctcctctaacctgtgccacaggtgaccaccaataaaatcctctgctgagaa

SEQ ID NO: 332585 - DNA, 1620 bp, Homo sapiens
  misc_feature (40)..(41): n is a, c, g, or t
accgtgcagtactcctacggtcttaggtcgaggctggggnncagctggaagatggcggcgtccgtggtctgtcgggccgctaccgccggggcacaagtgctattgcgcgcccgccgctcgccggccctgctgcggacgccagccttgcggagtacggcaaccttcgctcaggcgctccagttcgtgccggagacgcaggttagcctgctggacaacggcctgcgtgtggcctccgagcagtcctctcagcccacttgcacggtgggagtgtggattgatgttggcagccgttttgagactgagaagaataatggggcaggctactttttggagcatctggctttcaagggaacaaagaatcggcctggcagtgccctggagaaggaggtggagagcatgggggcccatcttaatgcctacagcacccgggagcacacagcttactacatcaaggcgctgtccaaggatctgccgaaagctgtggagctcctgggtgacattgtgcagaactgtagtctggaagactcacagattgagaaggaacgtgatgtgatcctgcgggagatgcaggagaatgatgcatctatgcgagatgtggtctttaactacctgcatgccacagcattccagggcacacctctagcccaggctgtggaggggcccagtgagaatgtcaggaagctgtctcgtgcagacttgaccgagtacctcagcacacattacaaggcccctcgaatggtgctggcagcagctggaggagtggagcaccagcaactgttagacctcgcccagaagcacctcggtggcatcccatggacatatgcagaggacgctgtgcccactcttactccatgccgcttcactggcagtgagatccgccaccgtgatgatgctctaccttttgcccacgtggccattgcagtagagggtcctggctgggccagcccggacaatgtggccttgcaagtggccaatgccatcatcggccactatgactgcacttatggtggtggcgtgcacctgtccagcccactggcttcaggtgctgtggccaacaagctatgccagagtttccagaccttcagcatctgctatgcagagacgggcttgctgggtgcacactttgtctgtgaccgaatgaaaatcgatgacatgatgttcgtcctgcaagggcagtggatgcgcctgtgtaccagtgccacggagagtgaggtggcccggggcaaaaacatcctcagaaatgccctggtatctcatctagatggcactactcctgtgtgtgaggacatcggacgcagcctcctgacctatggccgccgcatccccctggctgaatgggaaagccggattgcggaggtggatgccagtgtggtacgtgagatctgctccaagtacatctatgaccagtgcccagcagtggctggatatggccccattgagcagctcccagactacaaccggatccgtagcggcatgttctggctgcgcttctaggcgggaagcctatgtaagcaagagggcagggccggggtttgtggtcccccccccaccacaaacacagcacttcggctcctctaacctgtgccacaggtgaccaccaataaaatcctctgctgagaa

SEQ ID NO: 332586 - DNA, 2557 bp, Homo sapiens
tactgactttcagcaccaacttgtggtcccaggtaagtttccacgctggtactttagccctgggctcgaacctgcggacacgctgtggctgcaactccccgcccgccagacctcagtacgcagcgcggctggtgagaaacataatgcactctgacttccacgcgtggaatggggagatggactgcacggcgggcggacctgctcgggctgatggacggcaggtggactgatgtgcgcagggactggcggcagcgcggtcagagccagtcagccaaagccaggccagcacaatagactgtcccggttcccgccaggaggcggccgagcaccaactgtacggtactgcgcctgcgccgcgaccgccaacgcgcccagtctacgcttgcgcggcgcaacagggccgactgcagctggaagatggcggcgtccgtggtctgtcgggccgctaccgccggggcacaagtgctattgcgcgcccgccgctcgccggccctgctgcggacgccagccttgcggagtacggcaaccttcgctcaggcgctccagttcgtgccggagacgcaggttagcctgctggacaacggcctgcgtgtggcctccgagcagtcctctcagcccacttgcacggtgggagtgtggattgatgttggcagccgttttgagactgagaagaataatggggcaggctactttttggagcatctggctttcaagggaacaaagaatcggcctggcagtgccctggagaaggaggtggagagcatgggggcccatcttaatgcctacagcacccgggagcacacagcttactacatcaaggcgctgtccaaggatctgccgaaagctgtggagctcctgggtgacattgtgcagaactgtagtctggaagactcacagattgagaaggaacgtgatgtgatcctgcgggagatgcaggagaatgatgcatctatgcgagatgtggtctttaactacctgcatgccacagcattccagggcacacctctagcccaggctgtggaggggcccagtgagaatgtcaggaagctgtctcgtgcagacttgaccgagtacctcagcacacattacaaggcccctcgaatggtgctggcagcagctggaggagtggagcaccagcaactgttagacctcgcccagaagcacctcggtggcatcccatggacatatgcagaggacgctgtgcccactcttactccatgccgcttcactggcagtgagatccgccaccgtgatgatgctctaccttttgcccacgtggccattgcagtagagggtcctggctgggccagcccggacaatgtggccttgcaagtggccaatgccatcatcggccactatgactgcacttatggtggtggcgtgcacctgtccagcccactggcttcaggtgctgtggccaacaagctatgccagagtttccagaccttcagcatctgctatgcagagacgggcttgctgggtgcacactttgtctgtgaccgaatgaaaatcgatgacatgatgttcgtcctgcaagggcagtggatgcgcctgtgtaccagtgccacggagagtgaggtggcccggggcaaaaacatcctcagaaatgccctggtatctcatctagatggcactactcctgtgtgtgaggacatcggacgcagcctcctgacctatggccgccgcatccccctggctgaatgggaaagccggattgcggaggtggatgccagtgtggtacgtgagatctgctccaagtacatctatgaccagtgcccagcagtggctggatatggccccattgagcagctcccagactacaaccggatccgtagcggcatgttctggctgcgcttctaggcgggaagcctatgtaagcaagagggcagggccggggtttgtggtcccccccccaccacaaacacagcacttcggctcctctaacctgtgccacaggtgaccaccaataaaatcctctgctgagaaaaaaaaaaaaaaaaaaaaaaaaaacaaaaaaagggggggggggcccttaaaggtttcccccgggggggccccaattttcggcggccccccggtttgtgttaccacaaggaggggccccccataagagggagagcgccgactataataagatcagaggcgacggagcaggcaggcgttataaacacacacgctggcgagcacggtggaacaaaacacgtccgacgacggcgggacaacctggggaacaagagaacccacatcaaccgcggggggaggggagaaacaatattgggcgcgaagcacaccagctcccacctcctacagcgaaggaaattatattaagacgccgctactaaggggaggaacaaacaattcgcaacagcttttttccgacagcgctggtcaaataatcggcgtggtgtcaacaaaccaaacatcgcgaggaggaaataaagcaggactacgcagacgagccgtcgtcaagaagatacttctggcaggccacacacagcgaggcgagactatgatctagtatgtagcgacagacaaaattttttttaacccccggggg

SEQ ID NO: 332587 - DNA, 2286 bp, Homo sapiens
tactgactttcagcaccaacttgtggtcccaggtaagtttccacgctggtactttagccctgggctcgaacctgcggacacgctgtggctgcaactccccgcccgccagacctcagtacgcagcgcggctggtgagaaacataatgcactctgacttccacgcgtggaatggggagatggactgcacggcgggcggacctgctcgggctgatggacggcaggtggactgatgtgcgcagggactggcggcagcgcggtcagagccagtcagccaaagccaggccagcacaatagactgtcccggttcccgccaggaggcggccgagcaccaactgtacggtactgcgcctgcgccgcgaccgccaacgcgcccagtctacgcttgcgcggcgcaacagggccgactgcagctggaagatggcggcgtccgtggtctgtcgggccgctaccgccggggcacaagtgctattgcgcgcccgccgctcgccggccctgctgcggacgccagccttgcggagtacggcaaccttcgctcaggcgctccagttcgtgccggagacgcaggttagcctgctggacaacggcctgcgtgtggcctccgagcagtcctctcagcccacttgcacggtgggagtgtggattgatgttggcagccgttttgagactgagaagaataatggggcaggctactttttggagcatctggctttcaagggaacaaagaatcggcctggcagtgccctggagaaggaggtggagagcatgggggcccatcttaatgcctacagcacccgggagcacacagcttactacatcaaggcgctgtccaaggatctgccgaaagctgtggagctcctgggtgacattgtgcagaactgtagtctggaagactcacagattgagaaggaacgtgatgtgatcctgcgggagatgcaggagaatgatgcatctatgcgagatgtggtctttaactacctgcatgccacagcattccagggcacacctctagcccaggctgtggaggggcccagtgagaatgtcaggaagctgtctcgtgcagacttgaccgagtacctcagcacacattacaaggcccctcgaatggtgctggcagcagctggaggagtggagcaccagcaactgttagacctcgcccagaagcacctcggtggcatcccatggacatatgcagaggacgctgtgcccactcttactccatgccgcttcactggcagtgagatccgccaccgtgatgatgctctaccttttgcccacgtggccattgcagtagagggtcctggctgggccagcccggacaatgtggccttgcaagtggccaatgccatcatcggccactatgactgcacttatggtggtggcgtgcacctgtccagcccactggcttcaggtgctgtggccaacaagctatgccagagtttccagaccttcagcatctgctatgcagagacgggcttgctgggtgcacactttgtctgtgaccgaatgaaaatcgatgacatgatgttcgtcctgcaagggcagtggatgcgcctgtgtaccagtgccacggagagtgaggtggcccggggcaaaaacatcctcagaaatgccctggtatctcatctagatggcactactcctgtgtgtgaggacatcggacgcagcctcctgacctatggccgccgcatccccctggctgaatgggaaagccggattgcggtaacatggacccctgggagaggttctggagtcttggcctggcagacacctgggaggtgtagggttggggcctggcatagcgcagcctgctcctataggcatccctggtgtcctaggcagctgtcacctgcaggggtagcataggaggtctatagcagggatcccttctgcctttcctcttttgggctggggacagctgcatgctgcctgtgggagatctctgctagttggatgatgctgactggctgaggtggtggccaggtgcccgttagccagtatgccctctgcctcaccctgcaggaggtggatgccagtgtggtacgtgagatctgctccaagtacatctatgaccagtgcccagcagtggctggatatggccccattgagcagctcccagactacaaccggatccgtagcggcatgttctggctgcgcttctaggcgggaagcctatgtaagcaagagggcagggccggggtttgtggtcccccccccaccacaaacacagcacttcggctcctctaacctgtgccacaggtgaccaccaataaaatcctctgctgagaa

SEQ ID NO: 332588 - DNA, 2457 bp, Homo sapiens
tactgactttcagcaccaacttgtggtcccaggtaagtttccacgctggtactttagccctgggctcgaacctgcggacacgctgtggctgcaactccccgcccgccagacctcagtacgcagcgcggctggtgagaaacataatgcactctgacttccacgcgtggaatggggagatggactgcacggcgggcggacctgctcgggctgatggacggcaggtggactgatgtgcgcagggactggcggcagcgcggtcagagccagtcagccaaagccaggccagcacaatagactgtcccggttcccgccaggaggcggccgagcaccaactgtacggtactgcgcctgcgccgcgaccgccaacgcgcccagtctacgcttgcgcggcgcaacagggccgactgcagctggaagatggcggcgtccgtggtctgtcgggccgctaccgccggggcacaagtgctattgcgcgcccgccgctcgccggccctgctgcggacgccagccttgcggagtacggcaaccttcgctcaggcgctccagttcgtgccggagacgcaggttagcctgctggacaacggcctgcgtgtggcctccgagcagtcctctcagcccacttgcacggtgggagtgtggattgatgttggcagccgttttgagactgagaagaataatggggcaggctactttttggagcatctggctttcaagggaacaaagaatcggcctggcagtgccctggagaaggaggtggagagcatgggggcccatcttaatgcctacagcacccgggagcacacagcttactacatcaaggcgctgtccaaggatctgccgaaagctgtggagctcctgggtgacattgtgcagaactgtagtctggaagactcacagattgagaaggaacgtgatgtgatcctgcgggagatgcaggagaatgatgcatctatgcgagatgtggtctttaactacctgcatgccacagcattccagggcacacctctagcccaggctgtggaggggcccagtgagaatgtcaggaagctgtctcgtgcagacttgaccgagtacctcagcacacattacaaggcccctcgaatggtgctggcagcagctggaggagtggagcaccagcaactgttagacctcgcccagaagcacctcggtggcatcccatggacatatgcagaggacgctgtgcccactcttactccatgccgcttcactggcagtgagatccgccaccgtgatgatgctctaccttttgcccacgtggccattgcagtagagggtcctggctgggccagcccggacaatgtggccttgcaagtggccaatgccatcatcggccactatgactgcacttatggtggtggcgtgcacctgtccagcccactggcttcaggtgctgtggccaacaagctatgccagagtttccagaccttcagcatctgctatgcagagacgggcttgctgggtgcacactttgtctgtgaccgaatgaaaatcgatgacatgatgttcgtcctgcaagggcagtggatgcgcctgtgtaccagtgccacggagagtgaggtggcccggggcaaaaacatcctcagaaatgccctggtatctcatctagatggcactactcctgtgtgtgaggacatcggacgcagcctcctgacctatggccgccgcatccccctggctgaatgggaaagccggattgcggtaacatggacccctgggagaggttctggagtcttggcctggcagacacctgggaggtgtagggttggggcctggcatagcgcagcctgctcctataggcatccctggtgtcctaggcagctgtcacctgcaggggtagcataggaggtctatagcagggatcccttctgcctttcctcttttgggctggggacagctgcatgctgcctgtgggagatctctgctagttggatgatgctgactggctgaggtggtggccaggtgcccgttagccagtatgccctctgcctcaccctgcaggaggtggatgccagtgtggtacgtgagatctgctccaagtacatctatgaccagtgcccagcagtggctggatatggtaagtggcctagggggtctgctctttgtttatttcctcaggccgttctcttggcctccccttccacctctgctcccgcactgctgctcagcttacagagcagccagttaaggccccaagcagctctccccagtcccctggctgccagggagttcttgctcagaaaacctgtcccagcagttccttgactgcctgccaaggtgccttcatcaataccctgcacccgtcaggtaacgggcacctccatgtggggtggggcttcaagggccagaacatgaagggacaggctcagcacccctgggggaatgttcttcctctaacctgtgccacaggtgaccaccaataaaatcctctgctgagaa

SEQ ID NO: 332589 - DNA, 1680 bp, Homo sapiens
ccaataggctaggtacgaggccgggtgttaatcggccgaggggaagcagctggaagatggcggcgtccgtggtctgtcgggccgctaccgccggggcacaagtgctattgcgcgcccgccgctcggtgaggtggtggcgagagcgcggggcttcgggacagggcttcgggaagcggacagccggccctgctgcggacgccagccttgcggagtacggcaaccttcgctcaggcgctccagttcgtgccggagacgcaggttagcctgctggacaacggcctgcgtgtggcctccgagcagtcctctcagcccacttgcacggtgggagtgtggattgatgttggcagccgttttgagactgagaagaataatggggcaggctactttttggagcatctggctttcaagggaacaaagaatcggcctggcagtgccctggagaaggaggtggagagcatgggggcccatcttaatgcctacagcacccgggagcacacagcttactacatcaaggcgctgtccaaggatctgccgaaagctgtggagctcctgggtgacattgtgcagaactgtagtctggaagactcacagattgagaaggaacgtgatgtgatcctgcgggagatgcaggagaatgatgcatctatgcgagatgtggtctttaactacctgcatgccacagcattccagggcacacctctagcccaggctgtggaggggcccagtgagaatgtcaggaagctgtctcgtgcagacttgaccgagtacctcagcacacattacaaggcccctcgaatggtgctggcagcagctggaggagtggagcaccagcaactgttagacctcgcccagaagcacctcggtggcatcccatggacatatgcagaggacgctgtgcccactcttactccatgccgcttcactggcagtgagatccgccaccgtgatgatgctctaccttttgcccacgtggccattgcagtagagggtcctggctgggccagcccggacaatgtggccttgcaagtggccaatgccatcatcggccactatgactgcacttatggtggtggcgtgcacctgtccagcccactggcttcaggtgctgtggccaacaagctatgccagagtttccagaccttcagcatctgctatgcagagacgggcttgctgggtgcacactttgtctgtgaccgaatgaaaatcgatgacatgatgttcgtcctgcaagggcagtggatgcgcctgtgtaccagtgccacggagagtgaggtggcccggggcaaaaacatcctcagaaatgccctggtatctcatctagatggcactactcctgtgtgtgaggacatcggacgcagcctcctgacctatggccgccgcatccccctggctgaatgggaaagccggattgcggaggtggatgccagtgtggtacgtgagatctgctccaagtacatctatgaccagtgcccagcagtggctggatatggccccattgagcagctcccagactacaaccggatccgtagcggcatgttctggctgcgcttctaggcgggaagcctatgtaagcaagagggcagggccggggtttgtggtcccccccccaccacaaacacagcacttcggctcctctaacctgtgccacaggtgaccaccaataaaatcctctgctgagaa

SEQ ID NO: 332590 - DNA, 1484 bp, Homo sapiens
ccaataggctaggtacgaggccgggtgttaatcggccgaggggaagcagctggaagatggcggcgtccgtggtctgtcgggccgctaccgccggggcacaagtgctattgcgcgcccgccgctcggtgggagtgtggattgatgttggcagccgttttgagactgagaagaataatggggcaggctactttttggagcatctggctttcaagggaacaaagaatcggcctggcagtgccctggagaaggaggtggagagcatgggggcccatcttaatgcctacagcacccgggagcacacagcttactacatcaaggcgctgtccaaggatctgccgaaagctgtggagctcctgggtgacattgtgcagaactgtagtctggaagactcacagattgagaaggaacgtgatgtgatcctgcgggagatgcaggagaatgatgcatctatgcgagatgtggtctttaactacctgcatgccacagcattccagggcacacctctagcccaggctgtggaggggcccagtgagaatgtcaggaagctgtctcgtgcagacttgaccgagtacctcagcacacattacaaggcccctcgaatggtgctggcagcagctggaggagtggagcaccagcaactgttagacctcgcccagaagcacctcggtggcatcccatggacatatgcagaggacgctgtgcccactcttactccatgccgcttcactggcagtgagatccgccaccgtgatgatgctctaccttttgcccacgtggccattgcagtagagggtcctggctgggccagcccggacaatgtggccttgcaagtggccaatgccatcatcggccactatgactgcacttatggtggtggcgtgcacctgtccagcccactggcttcaggtgctgtggccaacaagctatgccagagtttccagaccttcagcatctgctatgcagagacgggcttgctgggtgcacactttgtctgtgaccgaatgaaaatcgatgacatgatgttcgtcctgcaagggcagtggatgcgcctgtgtaccagtgccacggagagtgaggtggcccggggcaaaaacatcctcagaaatgccctggtatctcatctagatggcactactcctgtgtgtgaggacatcggacgcagcctcctgacctatggccgccgcatccccctggctgaatgggaaagccggattgcggaggtggatgccagtgtggtacgtgagatctgctccaagtacatctatgaccagtgcccagcagtggctggatatggccccattgagcagctcccagactacaaccggatccgtagcggcatgttctggctgcgcttctaggcgggaagcctatgtaagcaagagggcagggccggggtttgtggtcccccccccaccacaaacacagcacttcggctcctctaacctgtgccacaggtgaccaccaataaaatcctctgctgagaa

SEQ ID NO: 332591 - DNA, 1462 bp, Homo sapiens
tactgactttcagcaccaacttgtggtcccaggtaagtttccacgctggtactttagccctgggctcgaacctgcggacacgctgtggctgcaactccccgcccgccagacctcagtacgcagcgcggctggtgagaaacataatgcactctgacttccacgcgtggaatggggagatggactgcacggcgggcggacctgctcgggctgatggacggcaggtggactgatgtgcgcagggactggcggcagcgcggtcagagccagtcagccaaagccaggccagcacaatagactgtcccggttcccgccaggaggcggccgagcaccaactgtacggtactgcgcctgcgccgcgaccgccaacgcgcccagtctacgcttgcgcggcgcaacagggccgactgcagctggaagatggcggcgtccgtggtctgtcgggccgctaccgccggggcacaagtgctattgcgcgcccgccgctcgccggccctgctgcggacgccagccttgcggagtacggcaaccttcgctcaggcgctccagttcgtgccggagacgcaggttagcctgctggacaacggcctgcgtgtggcctccgagcagtcctctcagcccacttgcacggtgggagtgtggattgatgttggcagccgttttgagactgagaagaataatggggcaggctactttttggagcatctggctttcaagggaacaaagaatcggcctggcagtgccctggagaaggaggtggagagcatgggggcccatcttaatgcctacagcacccgggagcacacagcttactacatcaaggcgctgtccaaggatctgccgaaagctgtggagctcctgggtgacattgtgcagaactgtagtctggaagactcacagattgagaaggaacgtgatgtgatcctgcgggagatgcaggagaatgatgcatctatgcgagatgtggtctttaactacctgcatgccacagcattccagggcacacctctagcccaggctgtggaggggcccagtgagaatgtcaggaagctgtctcgtgcagacttgaccgagtacctcagcacacattacaaggcccctcgaatggtgctggcagcagctggaggagtggagcaccagcaactgttagacctcgcccagaagcacctcggtggcatcccatggacatatgcagaggacgctgtgcccactcttactccatgccgcttcactggcagtgagaatcggcacggatgatgctctaactttggccacgtggcctggagaaaaggcctggtgggcacccggaaaagtgctcttgtaggggcacggcctctgggccaataagggcacgggggggggggacagatcaccagcgtgttggtgtgtccaaaaagctgaaggcacaccaacagctgacaagagtcgtccacatgtgtgaaaccaagaaacacgaggcgacacc

SEQ ID NO: 332592 - DNA, 1895 bp, Homo sapiens
tactgactttcagcaccaacttgtggtcccaggtaagtttccacgctggtactttagccctgggctcgaacctgcggacacgctgtggctgcaactccccgcccgccagacctcagtacgcagcgcggctggtgagaaacataatgcactctgacttccacgcgtggaatggggagatggactgcacggcgggcggacctgctcgggctgatggacggcaggtggactgatgtgcgcagggactggcggcagcgcggtcagagccagtcagccaaagccaggccagcacaatagactgtcccggttcccgccaggaggcggccgagcaccaactgtacggtactgcgcctgcgccgcgaccgccaacgcgcccagtctacgcttgcgcggcgcaacagggccgactgcagctggaagatggcggcgtccgtggtctgtcgggccgctaccgccggggcacaagtgctattgcgcgcccgccgctcgccggccctgctgcggacgccagccttgcggagtacggcaaccttcgctcaggcgctccagttcgtgccggagacgcaggttagcctgctggacaacggcctgcgtgtggcctccgagcagtcctctcagcccacttgcacggtgggagtgtggattgatgttggcagccgttttgagactgagaagaataatggggcaggctactttttggagcatctggctttcaagggaacaaagaatcggcctggcagtgccctggagaaggaggtggagagcatgggggcccatcttaatgcctacagcacccgggagcacacagcttactacatcaaggcgctgtccaaggatctgccgaaagctgtggagctcctgggtgacattgtgcagaactgtagtctggaagactcacagattgagaaggaacgtgatgtgatcctgcgggagatgcaggagaatgatgcatctatgcgagatgtggtctttaactacctgcatgccacagcattccagggcacacctctagcccaggctgtggaggggcccagtgagaatgtcaggaagctgtctcgtgcagacttgaccgagtacctcagcacacattacaaggcccctcgaatggagtggagcaccagcaactgttagacctcgcccagaagcacctcggtggcatcccatggacatatgcagtcttactccatgccgcttcactggcagtgagatccgccaccgtgatgatgctctaccttttgcccacgtggccattgcagtagaggcccggacaatgtggccttgcaagtggccaatgccatcatcggccactatgactgcacttatggtggtggcgtgcacctgtccagcccactggcttcaggtgctgtggccaacaagctatgccagagtttccagaccttcagcatctgctatgcagagacgggcttgctgggtgcacactttgtctgtgaccgtggatgcgcctgtgtaccagtgccacggagagtgaggtggcccggggcaaaaacatcctcagaaatgccctggtatctcatctagatggcactactcctgtgtgtgaggacatcggacgcagcctcctgacctatggccgccgcatccccctggctgaatgggaaagccggattgcggaggtggatgccagtgtggtacgtgagatctgctccaagtacatctatgaccagtgcccagcagtggctggatatggccccattgagcagctcccagactacaaccggatccgtagcggcatgttctggctgcgcttctaggcgggaagcctatgtaagcaagagggcagggccggggtttgtggtcccccccccaccacaaacacagcacttcggctcctctaacctgtgccacaggtgaccaccaataaaatcctctgctgagaa

SEQ ID NO: 332593 - DNA, 1269 bp, Homo sapiens
tactgactttcagcaccaacttgtggtcccaggtaagtttccacgctggtactttagccctgggctcgaacctgcggacacgctgtggctgcaactccccgcccgccagacctcagtacgcagcgcggctggtgagaaacataatgcactctgacttccacgcgtggaatggggagatggactgcacggcgggcggacctgctcgggctgatggacggcaggtggactgatgtgcgcagggactggcggcagcgcggtcagagccagtcagccaaagccaggccagcacaatagactgtcccggttcccgccaggaggcggccgagcaccaactgtacggtactgcgcctgcgccgcgaccgccaacgcgcccagtctacgcttgcgcggcgcaacagggccgactgcagctggaagatggcggcgtccgtggtctgtcgggccgctaccgccggggcacaagtgctattgcgcgcccgccgctcgccggccctgctgcggacgccagccttgcggagtacggcaaccttcgctcaggcgctccagttcgtgccggagacgcaggttagcctgctggacaacggcctgcgtgtggcctccgagcagtcctctcagcccacttgcacggtgggagtgtggattgatgttggcagccgttttgagactgagaagaataatggggcaggctactttttggagcatctggctttcaagggaacaaagaatcggcctggcagtgccctggagaaggaggtggagagcatgggggcccatcttaatgcctacagcacccgggagcacacagcttactacatcaaggcgctgtccaaggatctgccgaaagctgtggagctcctgggtgacattgtgcagaactgtagtctggaagactcacagattgagaaggaacgtgatgtgatcctgcgggagatgcaggagaatgatgcatctatgcgagatgtggtctttaactacctggctgaatgggaaagccggattgcggaggtggatgccagtgtggtacgtgagatctgctccaagtacatctatgaccagtgcccagcagtggctggatatggccccattgagcagctcccagactacaaccggatccgtagcggcatgttctggctgcgcttctaggcgggaagcctatgtaagcaagagggcagggccggggtttgtggtcccccccccaccacaaacacagcacttcggctcctctaacctgtgccacaggtgaccaccaataaaatcctctgctgagaa

SEQ ID NO: 332594 - DNA, 949 bp, Homo sapiens
tactgactttcagcaccaacttgtggtcccaggtaagtttccacgctggtactttagccctgggctcgaacctgcggacacgctgtggctgcaactccccgcccgccagacctcagtacgcagcgcggctggtgagaaacataatgcactctgacttccacgcgtggaatggggagatggactgcacggcgggcggacctgctcgggctgatggacggcaggtggactgatgtgcgcagggactggcggcagcgcggtcagagccagtcagccaaagccaggccagcacaatagactgtcccggttcccgccaggaggcggccgagcaccaactgtacggtactgcgcctgcgccgcgaccgccaacgcgcccagtctacgcttgcgcggcgcaacagggccgactgcagctggaagatggcggcgtccgtggtctgtcgggccgctaccgccggggcacaagtgctattgcgcgcccgccgctcgccggccctgctgcggacgccagccttgcggagtacggcaaccttcgctcaggcgctccagttcgtgccggagacgcaggttagcctgctggacaacggcctgcgtgtggcctccgagcagtcctctcagcccacttgcacggtgggagtgtggattgatgttggcagccgttttgagactgagaagaataatggggcaggctactttttggagcatctggctttcaagggaacaaagaatcggcctggcagtgccctggagaaggaggtggagccccattgagcagctcccagactacaaccggatccgtagcggcatgttctggctgcgcttctaggcgggaagcctatgtaagcaagagggcagggccggggtttgtggtcccccccccaccacaaacacagcacttcggctcctctaacctgtgccacaggtgaccaccaataaaatcctctgctgagaa

SEQ ID NO: 332595 - DNA, 445 bp, Homo sapiens
tttgaagaccacgccatgccccatcaccccacccttggagatgcaggcaggtgtgagacaggtccacagcccatcactgccataataggtgaccatagaagagagggctgtgatctgagtcagcatgaggtcagggaggtccttgtcaacctgaggctggagattgtttgtgtacctgtgggtccaggattgggctgggtggacctctgagccttctctcacccttaaaggcactactcctgtgtgtgaggacatcggacgcagcctcctgacctatggccgccgcatccccctggctgaatgggaaagccggattgcggtaacatggacccctgggagaggttctggagtcttggcctggcagacacctgggaggtgtagggttggggcctggcatagcgcagcctgctcctataggcatccctggtgtcctaggcagctgtca

SEQ ID NO: 332596 - DNA, 397 bp, Homo sapiens
ggcaatcctgcctcccattctattcaaagtcacccctctgctcactgagataaatatgtatctgattgcctcctttggagaggctaatcagaaactcaaaagattgcaaccatttctttcttattgacctatggcctagaaaccccctctccacttggacttgtcccacctttccagacagaaccaatgttcatcttacatatgttgattgatgtctcatgtctccctaaaatgtataaaaccaaactgtgctctgaccaccttgggcacatgttgtcaggacctcctgaggctgtgtcatgggcatgtgtcctcaaccttggcaaaataaactttcaaaattaactgagacctctttcagatatttggggttcacagtagaataaagtggcagcca

SEQ ID NO: 332597 - DNA, 9395 bp, Homo sapiens
cattgaccaactcaagtcatctttaaacaaattggaaactgagggaaccttgagaatttgtgctgttatgggatgcataatgacagaagcattagagaataaaagtgtacattttcccctaagaagtaaatacaacaggcttacaaaagttgctcgctttctccaagaaaatccttcatgtttactatgtaatatactacaccactatctgcaccaggcaaattactccatcattgatgatgctacaatgagcgatggacttcctgctttggtaactttgaagaaaggtttagttgcactggcaaggcagtggatgaagtttattgtggtgacaccagcctttaaaggagttagcttacatagaccagctcagcctctgaaacctcaaatagctatggaccatgaacatgaagatggacttggattggacaatgggggtggtcttcaaagtgataccagtgctgatggagcagaatttgagttcgatgcagccacagtcagtgaacacacaatgctattagaaggaacagctaaccggcctccacctggtagctctggacctgtaactggagctgagataatgaggaaactttctaaaactcatacccatagtgactctgcattaaaaataaagggcattcacccatatcattctctgagctataccagtggagacactgccactgattctccagtgcatgttggacgtgctgggatgccagtaaaggacagtccaaggaaggagagcctactcagctacctgactggaagcttcccaagcctgcacaacctcctggaaggtactcctcagagaagcagtgctgctgtgaaaagtagctccctaacgagaacaggaaatacagtagccactgatatgttatctgaacatcccttgctatctgagccatcatctgtgagtttctataattggatgtcaaatgctgtgggtaatcgaggaagtgtgttacaagaatctcctgttacaaaatcaggacacaatagtcttcccacaggtgttgcacccaatcttccaacaataccctcagcctcagatttcaacactgtcttgtctagtgaccaaaatactttggatgggacacattctcagcatagcaccagtcaggatgatgtggcaggtgtagaagaagcaaaccaagggtttcctgctgttcagcttgctgatgcacaggttgttttcaagcctcttctgagtcatacagggatccagtcacaggatacaatgccattctgctaccgaatgtactttggagaacacctttcattttcagggactttggactgcctcagagcagatattgtggattcagacacagccaaagagagaaaaggcaaaagagcaagaaggcaaggccatgtgaatcttcctccacttgagttcaaaccagcattaatgttgggaacctttagcatcagtgctgttgtaatggaaaagtccgtgtgcacccctcagaactctaccagtgccctttcttttcatgatctcagcaagcggtattataacacctttcactgcaactttactatttcctgtcagtcaataagccagcatgtagacatggctttggttcgtcttattcatcagtttagcacaatgatagatgacatcaaagcaactcagactgatattaaacttagcagatatacagccggatctgcttccccaacacctaccttcaaaaccagaaaacatcgggactttcgttcatctgactttagccgcagttctagaggaagtcttaatggtggcaatagagtaaataatgcaaagaacaaacggaccaacaatgagaataacaaaaaggaatctcgaaacaagaattcattaggaagatctgaaagaagaacatcaaaagtgtctaggaaaggttcaaaagatgtggtggatcacatgactattcatatggatgactctgattcaattacagtgtcagaacaaagtgagccttcagctgagtgctggcagaatatgtataaattgcttaacttctattcacttatctccgatccaacaggaatattggaaaagtcttcagaaacatttggaccagcaggagttcggagccctacagagccaacatgtaaagttgtgtttgagaatgaacaagacaacagcagtttgactaagactcagaggaaacgtagcttggtaacttctgaacctcagcatgttactctaatagtgtttgggattggcatggtgaaccgcacacacctagaggcagatattggtggactaacaatggaatcagaactgaagaggatccatggcagttttactcttaaggaaaaaatgaaagatgttttacatcaaaagatgactgagacttgtgctactgctcatattggtggggttaatattgtgctgcttgaagggattacaccaaatatacaactggaggattttcctacatctcctacaagtacagccaaacaagagtttctaactgtagtgaaatgtagtattgccaagtcccaagccctctacagtgcccaaagagggctgaagacaaacaatgctgctgtgttcaaagtaggagctatcagtatcaacattcctcagcaccctgccaccttacatagcatgatggttcgaagttctcaccaactatctaaacaaatctcagacctaatcagacagccttctacagccccacagcctgtaaaagaagatattgcaaccccactaccttctgaaaaaaccccaacaagtgttaatcaaactcctgttgaaacaaatgaatttcctcagctaccagaaggcttagaaaagaagcctattgttcttaaattcagtgccatgttagatggtatagccattggagcagcacttttaccatctctgaaagcagaatacaagatgggaagaatgagaagtcatggaatgacaggtgcacagacaagatttacatttgagctgccaaatcacagattgcgttttacttcaaaagtttctgccacagatatgtcaaccattcctccttctgccagtcttaaccttccccctgttaccatgtcagggaaatatataatggaagaacatgatagttattcggatcaggtgtggagtatagatgaactgccttctaaacaaggttactatttacagggaaattatctgcgttgtgtggcagaagttggttcctttgaacataatcttacaactgatcttctaaaccacttggtatttgtacagaaagtgttcatgaaggaagttaatgaagtaatacaaaaagtttctggtggggagcagcctattcctctctggaacgaacatgatggaacagcagatggagataaacctaaaattctcctctattccctaaacttgcagttcaagggtattcaagtaacggccactactccatcaatgagagctgtaagatttgaaactggattgattgaactggaactttctaaccgacttcaaaccaaagcttcaccaggaagtagcagctatctgaaactgtttggcaaatgccaggtggatttaaatctggcattaggacaaattgtcaaacatcaggtttatgaggaagctggttctgattttcatcaagttgcctattttaaaaccagaattggattaagaaatgccctccgagaagaaatcagtggttcttcagatagggaagctgtgcttattactttgaatagaccaattgtttatgcacagcctgtggcctttgatagagctgtgctgttttggctgaattataaggccgcctatgacaactggaatgaacaacgaatggctttacataaggatattcatatggctacaaaggaagtagtagatatgctacctggtatccagcaaacatcagcccaggcctttgggactctttttctccagctcactgtcaatgatctgggaatttgcctacctatcacaaatactgcacagtctaatcatactggagaccttgacactggttctgctttggtattaaccattgaaagtactctcatcactgcatgctcttcagagtctctggttagcaaagggcatttcaaaaacttttgtatccgttttgctgatggatttgagacatcatgggatgactggaaaccagaaattcatggggatttagtgatgaatgcctgtgtagttccagatggcacctatgaagtatgttcaagaactacaggacaagcagcagctgaaagcagtagtgctggaacctggacactcaacgtattgtggaaaatgtgtgggattgatgttcacatggatcctaacattggcaaaaggcttaatgctctgggcaatactcttacaacactgacaggagaggaagacatagatgacattgctgacttaaattcagtgaacatagctgacctgtcagatgaggatgaagttgatactatgtctcccactatccatactgaagccacagattatcgaagacaggcagcatctgctagccagccgggagaacttagaggaagaaaaattatgaagcgtatagtggatatcagagaactgaatgaacaggccaaagtaatagatgatctgaaaaaattaggtgcaagtgaaggaaccataaaccaggaaattcaacgttaccaacagttagaatctgtggctgtgaatgacattagaagagatgttcgtaaaaaattacggaggtccagtatgcgggctgcttccctaaaggataagtggggtttgagttacaaaccaagttacagccgatcaaaaagcatttctgcttctggaagaccacctcttaagcgaatggaaagggcaagttctcgagtaggagaaactgaagagctcccagaaatccgtgtggatgcagcatctcctggacctagagtaacttttaatatccaggatacatttccagaggagacagaactggaccttttgtcagtaaccattgaaggtccatcccattattcatcaaatagtgaaggatcatgttctgtgttcagttctcccaaaactccaggaggcttttcaccaggcattcctttccaaactgaagagggccgacgggatgacagtttgtcttctaccagtgaagattccgagaaggatgaaaaagatgaagaccatgagagggaaaggttttatatttacaggaaaccctcacatacgtctcgtaaaaaagcaacaggctttgctgctgttcatcagctatttacagaacgctggccaacaacaccagtcaatagaagtcttagtggcacagctacagagagaaatattgactttgaacttgatatacgggttgaaattgatagtggaaaatgtgtactccacccaaccacccttctacaagaacatgatgatataagtttgagaaggagttatgatcgaagttccaggagcttagatcaagattcaccttcaaaaaagaagaagtttcaaactaattatgcttctaccacccatttaatgaccggcaagaaagtgccatcatctctacagacaaagcctagtgacttagaaacaacagtattttacattcccggagttgatgtaaagttgcattacaattccaagacgctaaagactgaatcacctaatgcctccaggggatcttccttgccaagaacactgtccaaagagtccaagctgtatggtatgaaagatagtgcaacatctcctccttctcctcctttaccttccactgtccagagcaagactaacaccttacttcctccccagcccccacctattcctgcagccaaaggaaaaggaagtggaggagtaaaaacagccaagttatatgcctgggtagcacttcagtcattgccagaagaaatggttattagtccctgcctattagactttctggaaaaagctctggaaactatcccaattacaccagttgaaaggaattatacagctgtcagctcacaagatgaagatatgggacattttgaaataccagatcctatggaagaatcaacaacatcactagtgtcgtcttcaacatctgcttactcttccttccctgtagatgttgtggtttatgtacgagttcagccctcacagatcaaatttagctgtttaccagtatcaagagtagaatgcatgttaaagctgccatccctggatttggtgttttcttcaaaccgaggagaactggagactttagggactacatatcctgcagagactttatcccctggaggtaatgctactcagagtggaacaaagacttctgctagcaaaactggaataccaggttcatcgggattaggcagccctcttggccgaagtcgacatagtagtagtcagtcagacctgaccagttccagcagtagttcatctggcttgagcttcactgcatgcatgtctgacttttccctttatgtatttcatccatatggagcagggaaacaaaaaactgctgtttctggcctcacacctggatcaggaggattagggaatgtggatgaggagcccacttcagtcactggtcgaaaagattcactcagtataaaccttgagtttgtaaaagtgagtttgtcacggatcaggcgttcaggaggtgcctcattttttgaaagtcagtctgtaagcaagtctgcaagcaaaatggatactacgttaataaatatatctgctgtttgtgatatagggtctgcctcctttaaatatgatatgcgccgactcagtgaaattctggcatttccaagagcatggtatagaagaagtattgcaagacgtctattccttggagaccaaactataaatttgccaacatctggcccagggacacctgattccattgaaggggtaagccaacacctttcccctgaatcatcaagaaaagcttactgcaagacctgggagcagccaagtcagtcagcctccttcacccacatgcctcagtcacctaatgtgttcaatgagcatatgacaaacagcaccatgtcaccagggacagtaggacagagcctaaaatccccagcttccataagatcaaggagtgtatctgattcttcagttcctcgaagagattcactttcaaaaacatcaactccttttaacaaatcaaacaaagcagcaagccaacaagggaccccatgggaaacacttgtcgtgtttgctatcaacttgaagcaattaaacgttcaaatgaatatgagtaatgtaatgggaaatacaacttggacaactagtggtttgaagagccagggccgtctgtcagtaggaagtaatcgtgatcgagagatcagcatgtctgttggtctgggaagatcacaattagattctaaaggaggagtagttggagggaccatagatgtcaatgctttggagatggttgctcatatttctgaacatccaaatcagcaacccagtcacaaaattcagattactatgggttctactgaagctcgtgttgattacatgggctcaagtatcctcatgggcatcttcagtaatgctgatcttaagcttcaggatgaatggaaagtaaacttgtataatacattggattcaagcataactgataaaagtgagattttcgtccatggagatttgaagtgggatattttccaagtaatgatatcaaggtcaaccacaccagatctgataaaaataggaatgaagctccaggaatttttcacacaacaatttgataccagcaaacgagctctgtctacctggggaccagttccttaccttccgccaaagacaatgactagcaacctagaaaaaagttcacaagaacaattacttgatgcagcacatcatcgacactggcctggagtattgaaggtggtatcaggatgccacatatccttatttcagattccattaccagaagatggaatgcaatttggaggatcaatgagcttacatggaaatcatatgacactggcatgttttcatggtccaaattttcgttcaaaatcttgggccctttttcatttagaagaaccaaatattgctttttggactgaagctcagaaaatctgggaagatggctccagtgatcattctacatatattgtacaaacactagattttcacctgggtcataatactatggttaccaaaccatgtggtgctttggaaagtcctatggcaacaataaccaagataacaaggcgtcgccatgaaaatccaccccatggagtagcaagtgtgaaagaatggttcaattatgttacagctacaaggaatgaagagctaaatctgcttcgtaatgttgatgctaacaacactgagaatagcactactgtgaagaattctagtttgttgagtggattcagaggaggttctagctacaaccatgaaacagagactatctttgcattaccaaggatgcagcttgactttaaatccattcatgttcaagaaccacaggagccttcattacaggatgccagcctgaagccaaaagtagaatgtagtgtggtgacagagttcactgaccacatttgtgtgactatggatgctgagctcatcatgtttcttcatgatttagtatcagcttatcttaaagaaaaagaaaaagccatctttccacctcggattttatctactcgaccaggacaaaaaagtccaattattatacatgacgacaattcctctgataaagatagagaagatagcatcacttatactactgtggactggagagattttatgtgcaatacatggcatctagaacctactcttagattaatttcttggactggaagaaagattgatccagtaggtgttgattatattcttcaaaaattgggctttcatcatgctaggactactattcctaaatggcttcaaagaggagtcatggatccactggacaaggttctgtcagttcttatcaaaaagctcggtactgcactacaggatgaaaaggaaaagaaaggcaaagacaaagaagaacactaaaaaagtaatttgatctgtgaacaaattatgattgtgtctgttttattacactggagtgtttttttagtataataatttgaaatataactttaaaataattctaaatttgtggctataattaaaagtttgtaagttaacctgttctagttccatcattctgtgtacagtgaagtattgcatgataatgtaaattttgtgaaaaactagattaaaatatataactgcttgttatggtttataattatataatgtgcaatacaattcctgcatctttaaaatgtctgcagaataactgtgaatttttttgttattggattggccgtaacttttagaaaaaaatcttgttgatgataatgtgattttggggaggtcattaattgctttttcttttttaaatgtagacttatataaatacctgtttgtatatagcttgagtaattgtgatatgattgtataccactaaaatattgttaactattataataaagtcacagtaatggtttaa

SEQ ID NO: 332598 - DNA, 9365 bp, Homo sapiens
cattgaccaactcaagtcatctttaaacaaattggaaactgagggaaccttgagaatttgtgctgttatgggatgcataatgacagaagcattagagaataaaagtgtacattttcccctaagaagtaaatacaacaggcttacaaaagttgctcgctttctccaagaaaatccttcatgtttactatgtaatatactacaccactatctgcaccaggcaaattactccatcattgatgatgctacaatgagcgatggacttcctgctttggtaactttgaagaaaggtttagttgcactggcaaggcagtggatgaagtttattgtggtgacaccagcctttaaaggagttagcttacatagaccagctcagcctctgaaacctcaaatagctatggaccatgaacatgaagatggacttggattggacaatgggggtggtcttcaaagtgataccagtgctgatggagcagaatttgagttcgatgcagccacagtcagtgaacacacaatgctattagaaggaacagctaaccggcctccacctggtagctctggacctgtaactggagctgagataatgaggaaactttctaaaactcatacccatagtgactctgcattaaaaataaagggcattcacccatatcattctctgagctataccagtggagacactgccactgattctccagtgcatgttggacgtgctgggatgccagtaaaggacagtccaaggaaggagagcctactcagctacctgactggaagcttcccaagcctgcacaacctcctggaaggtactcctcagagaagcagtgctgctgtgaaaagtagctccctaacgagaacaggaaatacagtagccactgatatgttatctgaacatcccttgctatctgagccatcatctgtgagtttctataattggatgtcaaatgctgtgggtaatcgaggaagtgtgttacaagaatctcctgttacaaaatcaggacacaatagtcttcccacaggtgttgcacccaatcttccaacaataccctcagcctcagatttcaacactgtcttgtctagtgaccaaaatactttggatgggacacattctcagcatagcaccagtcaggatgatgtggcaggtgtagaagaagcaaaccaagggtttcctgctgttcagcttgctgatgcacaggttgttttcaagcctcttctgagtcatacagggatccagtcacaggatacaatgccattctgctaccgaatgtactttggagaacacctttcattttcagggactttggactgcctcagagcagatattgtggattcagacacagccaaagagagaaaaggcaaaagagcaagaaggcaaggccatgtgaatcttcctccacttgagttcaaaccagcattaatgttgggaacctttagcatcagtgctgttgtaatggaaaagtccgtgtgcacccctcagaactctaccagtgccctttcttttcatgatctcagcaagcggtattataacacctttcactgcaactttactatttcctgtcagtcaataagccagcatgtagacatggctttggttcgtcttattcatcagtttagcacaatgatagatgacatcaaagcaactcagactgatattaaacttagcagatatacagccggatctgcttccccaacacctaccttcaaaaccagaaaacatcgggactttcgttcatctgactttagccgcagttctagaggaagtcttaatggtggcaatagagtaaataatgcaaagaacaaacggaccaacaatgagaataacaaaaaggaatctcgaaacaagaattcattaggaagatctgaaagaagaacatcaaaagtgtctaggaaaggttcaaaagatgtggtggatcacatgactattcatatggatgactctgattcaattacagtgtcagaacaaagtgagccttcagctgagtgctggcagaatatgtataaattgcttaacttctattcacttatctccgatccaacaggaatattggaaaagtcttcagaaacatttggaccagcaggagttcggagccctacagagccaacatgtaaagttgtgtttgagaatgaacaagacaacagcagtttgactaagactcagaggaaacgtagcttggtaacttctgaacctcagcatgttactctaatagtgtttgggattggcatggtgaaccgcacacacctagaggcagatattggtggactaacaatggaatcagaactgaagaggatccatggcagttttactcttaaggaaaaaatgaaagatgttttacatcaaaagatgactgagacttgtgctactgctcatattggtggggttaatattgtgctgcttgaagggattacaccaaatatacaactggaggattttcctacatctcctacaagtacagccaaacaagagtttctaactgtagtgaaatgtagtattgccaagtcccaagccctctacagtgcccaaagagggctgaagacaaacaatgctgctgtgttcaaagtaggagctatcagtatcaacattcctcagcaccctgccaccttacatagcatgatggttcgaagttctcaccaactatctaaacaaatctcagacctaatcagacagccttctacagccccacagcctgtaaaagaagatattgcaaccccactaccttctgaaaaaaccccaacaagtgttaatcaaactcctgttgaaacaaatgaatttcctcagctaccagaaggcttagaaaagaagcctattgttcttaaattcagtgccatgttagatggtatagccattggagcagcacttttaccatctctgaaagcagaatacaagatgggaagaatgagaagtcatggaatgacaggtgcacagacaagatttacatttgagctgccaaatcacagattgcgttttacttcaaaagtttctgccacagatatgtcaaccattcctccttctgccagtcttaaccttccccctgttaccatgtcagggaaatatataatggaagaacatgatagttattcggatcaggtgtggagtatagatgaactgccttctaaacaaggttactatttacagggaaattatctgcgttgtgtggcagaagttggttcctttgaacataatcttacaactgatcttctaaaccacttggtatttgtacagaaagtgttcatgaaggaagttaatgaagtaatacaaaaagtttctggtggggagcagcctattcctctctggaacgaacatgatggaacagcagatggagataaacctaaaattctcctctattccctaaacttgcagttcaagggtattcaagtaacggccactactccatcaatgagagctgtaagatttgaaactggattgattgaactggaactttctaaccgacttcaaaccaaagcttcaccaggaagtagcagctatctgaaactgtttggcaaatgccaggtggatttaaatctggcattaggacaaattgtcaaacatcaggtttatgaggaagctggttctgattttcatcaagttgcctattttaaaaccagaattggattaagaaatgccctccgagaagaaatcagtggttcttcagatagggaagctgtgcttattactttgaatagaccaattgtttatgcacagcctgtggcctttgatagagctgtgctgttttggctgaattataaggccgcctatgacaactggaatgaacaacgaatggctttacataaggatattcatatggctacaaaggaagtagtagatatgctacctggtatccagcaaacatcagcccaggcctttgggactctttttctccagctcactgtcaatgatctgggaatttgcctacctatcacaaatactgcacagtctaatcatactggagaccttgacactggttctgctttggtattaaccattgaaagtactctcatcactgcatgctcttcagagtctctggttagcaaagggcatttcaaaaacttttgtatccgttttgctgatggatttgagacatcatgggatgactggaaaccagaaattcatggggatttagtgatgaatgcctgtgtagttccagatggcacctatgaagtatgttcaagaactacaggacaagcagcagctggagaggaagacatagatgacattgctgacttaaattcagtgaacatagctgacctgtcagatgaggatgaagttgatactatgtctcccactatccatactagttcagatggaagttcaataagtggagatggccacaaactcacctttgggcagcgacttgtaaatcacctactaggcctgacacccccaaatcagcgccattctgttcctgcagagtatctgtgtgacccagagatgtggggctcccctcagtctagccagtcccatttgaaagcatgcagagcacactcatggggaaacgaagccacagattatcgaagacaggcagcatctgctagccagccgggagaacttagaggaagaaaaattatgaagcgtatagtggatatcagagaactgaatgaacaggccaaagtaatagatgatctgaaaaaattaggtgcaagtgaaggaaccataaaccaggaaattcaacgttaccaacagttagaatctgtggctgtgaatgacattagaagagatgttcgtaaaaaattacggaggtccagtatgcgggctgcttccctaaaggataagtggggtttgagttacaaaccaagttacagccgatcaaaaagcatttctgcttctggaagaccacctcttaagcgaatggaaagggcaagttctcgagtaggagaaactgaagagctcccagaaatccgtgtggatgcagcatctcctggacctagagtaacttttaatatccaggatacatttccagaggagacagaactggaccttttgtcagtaaccattgaaggtccatcccattattcatcaaatagtgaaggatcatgttctgtgttcagttctcccaaaactccaggaggcttttcaccaggcattcctttccaaactgaagagggccgacgggatgacagtttgtcttctaccagtgaagattccgagaaggatgaaaaagatgaagaccatgagagggaaaggttttatatttacaggaaaccctcacatacgtctcgtaaaaaagcaacaggctttgctgctgttcatcagctatttacagaacgctggccaacaacaccagtcaatagaagtcttagtggcacagctacagagagaaatattgactttgaacttgatatacgggttgaaattgatagtggaaaatgtgtactccacccaaccacccttctacaagaacatgatgatataagtttgagaaggagttatgatcgaagttccaggagcttagatcaagattcaccttcaaaaaagaagaagtttcaaactaattatgcttctaccacccatttaatgaccggcaagaaagtgccatcatctctacagacaaagcctagtgacttagaaacaacagtattttacattcccggagttgatgtaaagttgcattacaattccaagacgctaaagactgaatcacctaatgcctccaggggatcttccttgccaagaacactgtccaaagagtccaagctgtatgccaaaggaaaaggaagtggaggagtaaaaacagccaagttatatgcctgggtagcacttcagtcattgccagaagaaatggttattagtccctgcctattagactttctggaaaaagctctggaaactatcccaattacaccagttgaaaggaattatacagctgtcagctcacaagatgaagatatgggacattttgaaataccagatcctatggaagaatcaacaacatcactagtgtcgtcttcaacatctgcttactcttccttccctgtagatgttgtggtttatgtacgagttcagccctcacagatcaaatttagctgtttaccagtatcaagagtagaatgcatgttaaagctgccatccctggatttggtgttttcttcaaaccgaggagaactggagactttagggactacatatcctgcagagactttatcccctggaggtaatgctactcagagtggaacaaagacttctgctagcaaaactggaataccaggttcatcgggattaggcagccctcttggccgaagtcgacatagtagtagtcagtcagacctgaccagttccagcagtagttcatctggcttgagcttcactgcatgcatgtctgacttttccctttatgtatttcatccatatggagcagggaaacaaaaaactgctgtttctggcctcacacctggatcaggaggattagggaatgtggatgaggagcccacttcagtcactggtcgaaaagattcactcagtataaaccttgagtttgtaaaagtgagtttgtcacggatcaggcgttcaggaggtgcctcattttttgaaagtcagtctgtaagcaagtctgcaagcaaaatggatactacgttaataaatatatctgctgtttgtgatatagggtctgcctcctttaaatatgatatgcgccgactcagtgaaattctggcatttccaagagcatggtatagaagaagtattgcaagacgtctattccttggagaccaaactataaatttgccaacatctggcccagggacacctgattccattgaaggggtaagccaacacctttcccctgaatcatcaagaaaagcttactgcaagacctgggagcagccaagtcagtcagcctccttcacccacatgcctcagtcacctaatgtgttcaatgagcatatgacaaacagcaccatgtcaccagggacagtaggacagagcctaaaatccccagcttccataagatcaaggagtgtatctgattcttcagttcctcgaagagattcactttcaaaaacatcaactccttttaacaaatcaaacaaagcagcaagccaacaagggaccccatgggaaacacttgtcgtgtttgctatcaacttgaagcaattaaacgttcaaatgaatatgagtaatgtaatgggaaatacaacttggacaactagtggtttgaagagccagggccgtctgtcagtaggaagtaatcgtgatcgagagatcagcatgtctgttggtctgggaagatcacaattagattctaaaggaggagtagttggagggaccatagatgtcaatgctttggagatggttgctcatatttctgaacatccaaatcagcaacccagtcacaaaattcagattactatgggttctactgaagctcgtgttgattacatgggctcaagtatcctcatgggcatcttcagtaatgctgatcttaagcttcaggatgaatggaaagtaaacttgtataatacattggattcaagcataactgataaaagtgagattttcgtccatggagatttgaagtgggatattttccaagtaatgatatcaaggtcaaccacaccagatctgataaaaataggaatgaagctccaggaatttttcacacaacaatttgataccagcaaacgagctctgtctacctggggaccagttccttaccttccgccaaagacaatgactagcaacctagaaaaaagttcacaagaacaattacttgatgcagcacatcatcgacactggcctggagtattgaaggtggtatcaggatgccacatatccttatttcagattccattaccagaagatggaatgcaatttggaggatcaatgagcttacatggaaatcatatgacactggcatgttttcatggtccaaattttcgttcaaaatcttgggccctttttcatttagaagaaccaaatattgctttttggactgaagctcagaaaatctgggaagatggctccagtgatcattctacatatattgtacaaacactagattttcacctgggtcataatactatggttaccaaaccatgtggtgctttggaaagtcctatggcaacaataaccaagataacaaggcgtcgccatgaaaatccaccccatggagtagcaagtgtgaaagaatggttcaattatgttacagctacaaggaatgaagagctaaatctgcttcgtaatgttgatgctaacaacactgagaatagcactactgtgaagaattctagtttgttgagtggattcagaggaggttctagctacaaccatgaaacagagactatctttgcattaccaaggatgcagcttgactttaaatccattcatgttcaagaaccacaggagccttcattacaggatgccagcctgaagccaaaagtagaatgtagtgtggtgacagagttcactgaccacatttgtgtgactatggatgctgagctcatcatgtttcttcatgatttagtatcagcttatcttaaagaaaaagaaaaagccatctttccacctcggattttatctactcgaccaggacaaaaaagtccaattattatacatgacgacaattcctctgataaagatagagaagatagcatcacttatactactgtggactggagagattttatgtgcaatacatggcatctagaacctactcttagattaatttcttggactggaagaaagattgatccagtaggtgttgattatattcttcaaaaattgggctttcatcatgctaggactactattcctaaatggcttcaaagaggagtcatggatccactggacaaggttctgtcagttcttatcaaaaagctcggtactgcactacaggatgaaaaggaaaagaaaggcaaagacaaagaagaacactaaaaaagtaatttgatctgtgaacaaattatgattgtgtctgttttattacactggagtgtttttttagtataataatttgaaatataactttaaaataattctaaatttgtggctataattaaaagtttgtaagttaacctgttctagttccatcattctgtgtacagtgaagtattgcatgataatgtaaattttgtgaaaaactagattaaaatatataactgcttgttatggtttataattatataatgtgcaatacaattcctgcatctttaaaatgtctgcagaataactgtgaatttttttgttattggattggccgtaacttttagaaaaaaatcttgttgatgataatgtgattttggggaggtcattaattgctttttcttttttaaatgtagacttatataaatacctgtttgtatatagcttgagtaattgtgatatgattgtataccactaaaatattgttaactattataataaagtcacagtaatggtttaa

SEQ ID NO: 332599 - DNA, 8995 bp, Homo sapiens
cattgaccaactcaagtcatctttaaacaaattggaaactgagggaaccttgagaatttgtgctgttatgggatgcataatgacagaagcattagagaataaaagtgtacattttcccctaagaagtaaatacaacaggcttacaaaagttgctcgctttctccaagaaaatccttcatgtttactatgtaatatactacaccactatctgcaccaggcaaattactccatcattgatgatgctacaatgagcgatggacttcctgctttggtaactttgaagaaaggtttagttgcactggcaaggcagtggatgaagtttattgtggtgacaccagcctttaaaggagttagcttacatagaccagctcagcctctgaaacctcaaatagctatggaccatgaacatgaagatggacttggattggacaatgggggtggtcttcaaagtgataccagtgctgatggagcagaatttgagttcgatgcagccacagtcagtgaacacacaatgctattagaaggaacagctaaccggcctccacctggtagctctggacctgtaactggagctgagataatgaggaaactttctaaaactcatacccatagtgactctgcattaaaaataaagggcattcacccatatcattctctgagctataccagtggagacactgccactgattctccagtgcatgttggacgtgctgggatgccagtaaaggacagtccaaggaaggagagcctactcagctacctgactggaagcttcccaagcctgcacaacctcctggaaggtactcctcagagaagcagtgctgctgtgaaaagtagctccctaacgagaacaggaaatacagtagccactgatatgttatctgaacatcccttgctatctgagccatcatctgtgagtttctataattggatgtcaaatgctgtgggtaatcgaggaagtgtgttacaagaatctcctgttacaaaatcaggacacaatagtcttcccacaggtgttgcacccaatcttccaacaataccctcagcctcagatttcaacactgtcttgtctagtgaccaaaatactttggatgggacacattctcagcatagcaccagtcaggatgatgtggcaggtgtagaagaagcaaaccaagggtttcctgctgttcagcttgctgatgcacaggttgttttcaagcctcttctgagtcatacagggatccagtcacaggatacaatgccattctgctaccgaatgtactttggagaacacctttcattttcagggactttggactgcctcagagcagatattgtggattcagacacagccaaagagagaaaaggcaaaagagcaagaaggcaaggccatgtgaatcttcctccacttgagttcaaaccagcattaatgttgggaacctttagcatcagtgctgttgtaatggaaaagtccgtgtgcacccctcagaactctaccagtgccctttcttttcatgatctcagcaagcggtattataacacctttcactgcaactttactatttcctgtcagtcaataagccagcatgtagacatggctttggttcgtcttattcatcagtttagcacaatgatagatgacatcaaagcaactcagactgatattaaacttagcagatatacagccggatctgcttccccaacacctaccttcaaaaccagaaaacatcgggactttcgttcatctgactttagccgcagttctagaggaagtcttaatggtggcaatagagtaaataatgcaaagaacaaacggaccaacaatgagaataacaaaaaggaatctcgaaacaagaattcattaggaagatctgaaagaagaacatcaaaagtgtctaggaaaggttcaaaagatgtggtggatcacatgactattcatatggatgactctgattcaattacagtgtcagaacaaagtgagccttcagctgagtgctggcagaatatgtataaattgcttaacttctattcacttatctccgatccaacaggaatattggaaaagtcttcagaaacatttggaccagcaggagttcggagccctacagagccaacatgtaaagttgtgtttgagaatgaacaagacaacagcagtttgactaagactcagaggaaacgtagcttggtaacttctgaacctcagcatgttactctaatagtgtttgggattggcatggtgaaccgcacacacctagaggcagatattggtggactaacaatggaatcagaactgaagaggatccatggcagttttactcttaaggaaaaaatgaaagatgttttacatcaaaagatgactgagacttgtgctactgctcatattggtggggttaatattgtgctgcttgaagggattacaccaaatatacaactggaggattttcctacatctcctacaagtacagccaaacaagagtttctaactgtagtgaaatgtagtattgccaagtcccaagccctctacagtgcccaaagagggctgaagacaaacaatgctgctgtgttcaaagtaggagctatcagtatcaacattcctcagcaccctgccaccttacatagcatgatggttcgaagttctcaccaactatctaaacaaatctcagacctaatcagacagccttctacagccccacagcctgtaaaagaagatattgcaaccccactaccttctgaaaaaaccccaacaagtgttaatcaaactcctgttgaaacaaatgaatttcctcagctaccagaaggcttagaaaagaagcctattgttcttaaattcagtgccatgttagatggtatagccattggagcagcacttttaccatctctgaaagcagaatacaagatgggaagaatgagaagtcatggaatgacaggtgcacagacaagatttacatttgagctgccaaatcacagattgcgttttacttcaaaagtttctgccacagatatgtcaaccattcctccttctgccagtcttaaccttccccctgttaccatgtcagggaaatatataatggaagaacatgatagttattcggatcaggtgtggagtatagatgaactgccttctaaacaaggttactatttacagggaaattatctgcgttgtgtggcagaagttggttcctttgaacataatcttacaactgatcttctaaaccacttggtatttgtacagaaagtgttcatgaaggaagttaatgaagtaatacaaaaagtttctggtggggagcagcctattcctctctggaacgaacatgatggaacagcagatggagataaacctaaaattctcctctattccctaaacttgcagttcaagggtattcaagtaacggccactactccatcaatgagagctgtaagatttgaaactggattgattgaactggaactttctaaccgacttcaaaccaaagcttcaccaggaagtagcagctatctgaaactgtttggcaaatgccaggtggatttaaatctggcattaggacaaattgtcaaacatcaggtttatgaggaagctggttctgattttcatcaagttgcctattttaaaaccagaattggattaagaaatgccctccgagaagaaatcagtggttcttcagatagggaagctgtgcttattactttgaatagaccaattgtttatgcacagcctgtggcctttgatagagctgtgctgttttggctgaattataaggccgcctatgacaactggaatgaacaacgaatggctttacataaggatattcatatggctacaaaggaagtagtagatatgctacctggtatccagcaaacatcagcccaggcctttgggactctttttctccagctcactgtcaatgatctgggaatttgcctacctatcacaaatactgcacagtctaatcatactggagaccttgacactggttctgctttggtattaaccattgaaagtactctcatcactgcatgctcttcagagtctctggttagcaaagggcatttcaaaaacttttgtatccgttttgctgatggatttgagacatcatgggatgactggaaaccagaaattcatggggatttagtgatgaatgcctgtgtagttccagatggcacctatgaagtatgttcaagaactacaggacaagcagcagctggagaggaagacatagatgacattgctgacttaaattcagtgaacatagctgacctgtcagatgaggatgaagttgatactatgtctcccactatccatactagttcagatggaagttcaataagtggagatggccacaaactcacctttgggcagcgacttgtaaatcacctactaggcctgacacccccaaatcagcgccattctgttcctgcagagtatctgtgtgacccagagatgtggggctcccctcagtctagccagtcccatttgaaagcatgcagagcacactcatggggaaacgaagccacagattatcgaagacaggcagcatctgctagccagccgggagaacttagaggaagaaaaattatgaagcgtatagtggatatcagagaactgaatgaacaggccaaagtaatagatgatctgaaaaaattaggtgcaagtgaaggaaccataaaccaggaaattcaacgttaccaacagttagaatctgtggctgtgaatgacattagaagagatgttcgtaaaaaattacggaggtccagtatgcgggctgcttccctaaaggataagtggggtttgagttacaaaccaagttacagccgatcaaaaagcatttctgcttctggaagaccacctcttaagcgaatggaaagggcaagttctcgagtaggagaaactgaagagctcccagaaatccgtgtggatgcagcatctcctggacctagagtaacttttaatatccaggatacatttccagaggagacagaactggaccttttgtcagtaaccattgaaggtccatcccattattcatcaaatagtgaaggatcatgttctgtgttcagttctcccaaaactccaggaggcttttcaccaggcattcctttccaaactgaagagggccgacgggatgacagtttgtcttctaccagtgaagattccgagaaggatgaaaaagatgaagaccatgagagggaaaggttttatatttacaggaaaccctcacatacgtctcgtaaaaaagcaacaggctttgctgctgttcatcagctatttacagaacgctggccaacaacaccagtcaatagaagtcttagtggcacagctacagagagaaatattgactttgaacttgatatacgggttgaaattgatagtggaaaatgtgtactccacccaaccacccttctacaagaacatgatgatataagtttgagaaggagttatgatcgaagttccaggagcttagatcaagattcaccttcaaaaaagaagaagtttcaaactaattatgcttctaccacccatttaatgaccggcaagaaagtgccatcatctctacagacaaagcctagtgacttagaaacaacagtattttacattcccggagttgatgtaaagttgcattacaattccaagacgctaaagactgaatcacctaatgcctccaggggatcttccttgccaagaacactgtccaaagagtccaagctgtatgccaaaggaaaaggaagtggaggagtaaaaacagccaagttatatgcctgggtagcacttcagtcattgccagaagaaatggttattagtccctgcctattagactttctggaaaaagctctggaaactatcccaattacaccagttgaaaggaattatacagctgtcagctcacaagatgaagatatgggacattttgaaataccagatcctatggaagaatcaacaacatcactagtgtcgtcttcaacatctgcttactcttccttccctgtagatgttgtggtttatgtacgagttcagccctcacagatcaaatttagctgtttaccagtatcaagagtagaatgcatgttaaagctgccatccctggatttggtgttttcttcaaaccgaggagaactggagactttagggactacatatcctgcagagactttatcccctggaggtaatgctactcagagtggaacaaagacttctgctagcaaaactggaataccaggttcatcgggattaggcagccctcttggccgaagtcgacatagtagtagtcagtcagacctgaccagttccagcagtagttcatctggcttgagcttcactgcatgcatgtctgacttttccctttatgtatttcatccatatggagcagggaaacaaaaaactgctgtttctggcctcacacctggatcaggaggattagggaatgtggatgaggagcccacttcagtcactggtcgaaaagattcactcagtataaaccttgagtttgtaaaagtgagtttgtcacggatcaggcgttcaggaggtgcctcattttttgaaagtcagtctgtaagcaagtctgcaagcaaaatggatactacgttaataaatatatctgctgtttgtgatatagggtctgcctcctttaaatatgatatgcgccgactcagtgaaattctggcatttccaagagcatggtatagaagaagtattgcaagacgtctattccttggagaccaaactataaatttgccaacatctggcccagggacacctgattccattgaaggggtaagccaacacctttcccctgaatcatcaagaaaagcttactgcaagacctgggagcagccaagtcagtcagcctccttcacccacatgcctcagtcacctaatgtgttcaatgagcatatgacaaacagcaccatgtcaccagggacagtaggacagagcctaaaatccccagcttccataagatcaaggagtgtatctgattcttcagttcctcgaagagattcactttcaaaaacatcaactccttttaacaaatcaaacaaagcagcaagccaacaagggaccccatgggaaacacttgtcgtgtttgctatcaacttgaagcaattaaacgttcaaatgaatatgagtaatgtaatgggaaatacaacttggacaactagtggtttgaagagccagggccgtctgtcagtaggaagtaatcgtgatcgagagatcagcatgtctgttggtctgggaagatcacaattagattctaaaggaggagtagttggagggaccatagatgtcaatgctttggagatggttgctcatatttctgaacatccaaatcagcaacccagtcacaaaattcagattactatgggttctactgaagctcgtgttgattacatgggctcaagtatcctcatgggcatcttcagtaatgctgatcttaagcttcaggatgaatggaaagtaaacttgtataatacattggattcaagcataactgataaaagtgagattttcgtccatggagatttgaagtgggatattttccaagtaatgatatcaaggtcaaccacaccagatctgataaaaataggaatgaagctccaggaatttttcacacaacaatttgataccagcaaacgagctctgtctacctggggaccagttccttaccttccgccaaagacaatgactagcaacctagaaaaaagttcacaagaacaattacttgatgcagcacatcatcgacactggcctggagtattgaaggtggtatcaggatgccacatatccttatttcagattccattaccagaagatggaatgcaatttggaggatcaatgagcttacatggaaatcatatgacactggcatgttttcatggtccaaattttcgttcaaaatcttgggccctttttcatttagaagaaccaaatattgctttttggactgaagctcagaaaatctgggaagatggctccagtgatcattctacatatattgtacaaacactagattttcacctgggtcataatactatggttaccaaaccatgtggtgctttggaaagtcctatggcaacaataaccaagataacaaggcgtcgccatgaaaatccaccccatggagtagcaagtgtgaaagaatggttcaattatgttacagctacaaggaatgaagagctaaatctgcttcgtaatgttgatgctaacaacactgagaatagcactactgtgaagaattctagtttgttgagtggattcagaggaggttctagctacaaccatgaaacagagactatctttgcattaccaaggatgcagcttgactttaaatccattcatgttcaagaaccacaggagccttcattacaggatgccagcctgaagccaaaagtagaatgtagtgtggtgacagagttcactgaccacatttgtgtgactatggatgctgagctcatcatgtttcttcatgatttagtatcagcttatcttaaagaaaaagaaaaagccatctttccacctcggattttatctactcgaccaggacaaaaaagtccaattattatacatgacgacaattcctctgataaagatagagaagatagcatcacttatactactgtggactggagagattttatgtgcaatacatggcatctagaacctactcttagattaatttcttggactggaagaaagattgatccagtaggtgttgattatattcttcaaaaattgggctttcatcatgctaggactactattcctaaatggcttcaaagaggagtcatggatccactggacaaggttctgtcagttcttatcaaaaagctcggtactgcactacaggatgaaaaggaaaagaaaggcaaagacaaagaagaacactaaaaaagtaatttgatctgtgaacaaattatgattgtgtctgttttattacactggagtgtttttttagtataataatttgaaatataactttaaaataattctaaatttgtggctataattaaaagtttgtaagtt

SEQ ID NO: 332600 - DNA, 6622 bp, Homo sapiens
cattgaccaactcaagtcatctttaaacaaattggaaactgagggaaccttgagaatttgtgctgttatgggatgcataatgacagaagcattagagaataaaagtgtacattttcccctaagaagtaaatacaacaggcttacaaaagttgctcgctttctccaagaaaatccttcatgtttactatgtaatatactacaccactatctgcaccaggcaaattactccatcattgatgatgctacaatgagcgatggacttcctgctttggtaactttgaagaaaggtttagttgcactggcaaggcagtggatgaagtttattgtggtgacaccagcctttaaaggagttagcttacatagaccagctcagcctctgaaacctcaaatagctatggaccatgaacatgaagatggacttggattggacaatgggggtggtcttcaaagtgataccagtgctgatggagcagaatttgagttcgatgcagccacagtcagtgaacacacaatgctattagaaggaacagctaaccggcctccacctggtagctctggacctgtaactggagctgagataatgaggaaactttctaaaactcatacccatagtgactctgcattaaaaataaagggcattcacccatatcattctctgagctataccagtggagacactgccactgattctccagtgcatgttggacgtgctgggatgccagtaaaggacagtccaaggaaggagagcctactcagctacctgactggaagcttcccaagcctgcacaacctcctggaaggtactcctcagagaagcagtgctgctgtgaaaagtagctccctaacgagaacaggaaatacagtagccactgatatgttatctgaacatcccttgctatctgagccatcatctgtgagtttctataattggatgtcaaatgctgtgggtaatcgaggaagtgtgttacaagaatctcctgttacaaaatcaggacacaatagtcttcccacaggtgttgcacccaatcttccaacaataccctcagcctcagatttcaacactgtcttgtctagtgaccaaaatactttggatgggacacattctcagcatagcaccagtcaggatgatgtggcaggtgtagaagaagcaaaccaagggtttcctgctgttcagcttgctgatgcacaggttgttttcaagcctcttctgagtcatacagggatccagtcacaggatacaatgccattctgctaccgaatgtactttggagaacacctttcattttcagggactttggactgcctcagagcagatattgtggattcagacacagccaaagagagaaaaggcaaaagagcaagaaggcaaggccatgtgaatcttcctccacttgagttcaaaccagcattaatgttgggaacctttagcatcagtgctgttgtaatggaaaagtccgtgtgcacccctcagaactctaccagtgccctttcttttcatgatctcagcaagcggtattataacacctttcactgcaactttactatttcctgtcagtcaataagccagcatgtagacatggctttggttcgtcttattcatcagtttagcacaatgatagatgacatcaaagcaactcagactgatattaaacttagcagatatacagccggatctgcttccccaacacctaccttcaaaaccagaaaacatcgggactttcgttcatctgactttagccgcagttctagaggaagtcttaatggtggcaatagagtaaataatgcaaagaacaaacggaccaacaatgagaataacaaaaaggaatctcgaaacaagaattcattaggaagatctgaaagaagaacatcaaaagtgtctaggaaaggttcaaaagatgtggtggatcacatgactattcatatggatgactctgattcaattacagtgtcagaacaaagtgagccttcagctgagtgctggcagaatatgtataaattgcttaacttctattcacttatctccgatccaacaggaatattggaaaagtcttcagaaacatttggaccagcaggagttcggagccctacagagccaacatgtaaagttgtgtttgagaatgaacaagacaacagcagtttgactaagactcagaggaaacgtagcttggtaacttctgaacctcagcatgttactctaatagtgtttgggattggcatggtgaaccgcacacacctagaggcagatattggtggactaacaatggaatcagaactgaagaggatccatggcagttttactcttaaggaaaaaatgaaagatgttttacatcaaaagatgactgagacttgtgctactgctcatattggtggggttaatattgtgctgcttgaagggattacaccaaatatacaactggaggattttcctacatctcctacaagtacagccaaacaagagtttctaactgtagtgaaatgtagtattgccaagtcccaagccctctacagtgcccaaagagggctgaagacaaacaatgctgctgtgttcaaagtaggagctatcagtatcaacattcctcagcaccctgccaccttacatagcatgatggttcgaagttctcaccaactatctaaacaaatctcagacctaatcagacagccttctacagccccacagcctgtaaaagaagatattgcaaccccactaccttctgaaaaaaccccaacaagtgttaatcaaactcctgttgaaacaaatgaatttcctcagctaccagaaggcttagaaaagaagcctattgttcttaaattcagtgccatgttagatggtatagccattggagcagcacttttaccatctctgaaagcagaatacaagatgggaagaatgagaagtcatggaatgacaggtgcacagacaagatttacatttgagctgccaaatcacagattgcgttttacttcaaaagtttctgccacagatatgtcaaccattcctccttctgccagtcttaaccttccccctgttaccatgtcagggaaatatataatggaagaacatgatagttattcggatcaggtgtggagtatagatgaactgccttctaaacaaggttactatttacagggaaattatctgcgttgtgtggcagaagttggttcctttgaacataatcttacaactgatcttctaaaccacttggtatttgtacagaaagtgttcatgaaggaagttaatgaagtaatacaaaaagtttctggtggggagcagcctattcctctctggaacgaacatgatggaacagcagatggagataaacctaaaattctcctctattccctaaacttgcagttcaagggtattcaagtaacggccactactccatcaatgagagctgtaagatttgaaactggattgattgaactggaactttctaaccgacttcaaaccaaagcttcaccaggaagtagcagctatctgaaactgtttggcaaatgccaggtggatttaaatctggcattaggacaaattgtcaaacatcaggtttatgaggaagctggttctgattttcatcaagttgcctattttaaaaccagaattggattaagaaatgccctccgagaagaaatcagtggttcttcagatagggaagctgtgcttattactttgaatagaccaattgtttatgcacagcctgtggcctttgatagagctgtgctgttttggctgaattataaggccgcctatgacaactggaatgaacaacgaatggctttacataaggatattcatatggctacaaaggaagtagtagatatgctacctggtatccagcaaacatcagcccaggcctttgggactctttttctccagctcactgtcaatgatctgggaatttgcctacctatcacaaatactgcacagtctaatcatactggagaccttgacactggttctgctttggtattaaccattgaaagtactctcatcactgcatgctcttcagagtctctggttagcaaagggcatttcaaaaacttttgtatccgttttgctgatggatttgagacatcatgggatgactggaaaccagaaattcatggggatttagtgatgaatgcctgtgtagttccagatggcacctatgaagtatgttcaagaactacaggacaagcagcagctggagaggaagacatagatgacattgctgacttaaattcagtgaacatagctgacctgtcagatgaggatgaagttgatactatgtctcccactatccatactagttcagatggaagttcaataagtggagatggccacaaactcacctttgggcagcgacttgtaaatcacctactaggcctgacacccccaaatcagcgccattctgttcctgcagagtatctgtgtgacccagagatgtggggctcccctcagtctagccagtcccatttgaaagcatgcagagcacactcatggggaaacgaagccacagattatcgaagacaggcagcatctgctagccagccgggagaacttagaggaagaaaaattatgaagcgtatagtggatatcagagaactgaatgaacaggccaaagtaatagatgatctgaaaaaattaggtgcaagtgaaggaaccataaaccaggaaattcaacgttaccaacagttagaatctgtggctgtgaatgacattagaagagatgttcgtaaaaaattacggaggtccagtatgcgggctgcttccctaaaggataagtggggtttgagttacaaaccaagttacagccgatcaaaaagcatttctgcttctggaagaccacctcttaagcgaatggaaagggcaagttctcgagtaggagaaactgaagagctcccagaaatccgtgtggatgcagcatctcctggacctagagtaacttttaatatccaggatacatttccagaggagacagaactggaccttttgtcagtaaccattgaaggtccatcccattattcatcaaatagtgaaggatcatgttctgtgttcagttctcccaaaactccaggaggcttttcaccaggcattcctttccaaactgaagagggccgacgggatgacagtttgtcttctaccagtgaagattccgagaaggatgaaaaagatgaagaccatgagagggaaaggttttatatttacaggaaaccctcacatacgtctcgtaaaaaagcaacaggctttgctgctgttcatcagctatttacagaacgctggccaacaacaccagtcaatagaagtcttagtggcacagctacagagagaaatattgactttgaacttgatatacgggttgaaattgatagtggaaaatgtgtactccacccaaccacccttctacaagaacatgatgatataagtttgagaaggagttatgatcgaagttccaggagcttagatcaagattcaccttcaaaaaagaagaagtttcaaactaattatgcttctaccacccatttaatgaccggcaagaaagtgccatcatctctacagacaaagcctagtgacttagaaacaacagtattttacattcccggagttgatgtaaagttgcattacaattccaagacgctaaagactgaatcacctaatgcctccaggggatcttccttgccaagaacactgtccaaagagtccaagctgtatgccaaaggaaaaggaagtggaggagtaaaaacagccaagttatatgcctgggtagcacttcagtcattgccagaagaaatggttattagtccctgcctattagactttctggaaaaagctctggaaactatcccaattacaccagttgaaaggaattatacagctgtcagctcacaagatgaagatatgggacattttgaaataccagatcctatggaagaatcaacaacatcactagtgtcgtcttcaacatctgcttactcttccttccctgtagatgttgtggtttatgtacgagttcagccctcacagatcaaatttagctgtttaccagtatcaagagtagaatgcatgttaaagctgccatccctggatttggtgttttcttcaaaccgaggagaactggagactttagggactacatatcctgcagagactttatcccctggaggtaatgctactcagagtggaacaaagacttctgctagcaaaactggaataccaggttcatcgggattaggcagccctcttggccgaagtcgacatagtagtagtcagtcagacctgaccagttccagcagtagttcatctggcttgagcttcactgcatgcatgtctgacttttccctttatgtatttcatccatatggagcagggaaacaaaaaactgctgtttctggcctcacacctggatcaggaggattagggaatgtggatgaggagcccacttcagtcactggtcgaaaagattcactcagtataaaccttgagtttgtaaaagtgagtttgtcacggatcaggcgttcaggaggtgcctcattttttgaaagtcagtctgtaagcaagtctgcaagcaaaatggatactacgttaataaatatatctggtactcaattttatagtttttaaattaaaatactgttttccaaaatt

SEQ ID NO: 332601 - DNA, 403 bp, Homo sapiens
gtaatatatatttcagccattgaaacaagtaataaaattgttgactcttttaccaaggtcaactacttttttatgttctaattataaaattaagataacaaaaattaattttattagtaaaatagcaataacagtggatactatcaaactcagaagtttatttaaggaatctctcatcacatttataaccacaatgcggtaagtgctttttagtaatgaagtacgctgctatttagacaagtttctgttttatttacataaaactgtggtttagaaggatagacaagttttatgcgtaaacttatagattatccaaagaaattaaaaggtgcatactagtagctactgctctagatttgtcagtttagaaaaggtatagtcacacagacatttagcatatgaa

SEQ ID NO: 332602 - DNA, 134 bp, Homo sapiens
ggtctgggaagatcacaattagattctaaaggaggagtagttggagggaccatagatgtcaatgctttggagatggttggtatgttgaaattttaaaactgacctaacatatccttaagatatatatatcaaaa

SEQ ID NO: 332603 - DNA, 591 bp, Homo sapiens
attcactttcaaaaacatcaactccttttaacaaatcaaacaaagcagcaagccaacaagggaccccatgggaaacacttgtcgtgtttgctatcaacttgaagcaattaaacgttcaaatgaatatgagtaatgtaatgggaaatacaacgtaagctattcagatacaaaggaaatgtatttaatcatttttgtaacttttcttctactgtagtaaagatattcagaaccttttttgaatgctaaatatttgaaaaagaagtagataaacgatataaaatgttttatcctgaaaatggcttaattctaaggatactgcaatataaaacatcatgaaatatatgttctataaaaagggaatcaattataaggagaacagggtaattttctagcttttctagctaggagtaaagcttcattatcaatgttaatattcaaatatttaccacacagtttttatataaagtatgttgtttcattgtcaaacttgaccttttaaataatctgatttaactcctttttaatttaaatcctgttttaattcatgacactggaagctatatatataataacctttttttcattttttag

SEQ ID NO: 332604 - DNA, 4959 bp, Homo sapiens
cattgaccaactcaagtcatctttaaacaaattggaaactgagggaaccttgagaatttgtgctgttatgggatgcataatgacagaagcattagagaataaaagtgtacattttcccctaagaagtaaatacaacaggcttacaaaagttgctcgctttctccaagaaaatccttcatgtttactatgtaatatactacaccactatctgcaccaggcaaattactccatcattgatgatgctacaatgagcgatggacttcctgctttggtaactttgaagaaaggtttagttgcactggcaaggcagtggatgaagtttattgtggtgacaccagcctttaaaggagttagcttacatagaccagctcagcctctgaaacctcaaatagctatggaccatgaacatgaagatggacttggattggacaatgggggtggtcttcaaagtgataccagtgctgatggagcagaatttgagttcgatgcagccacagtcagtgaacacacaatgctattagaaggaacagctaaccggcctccacctggtagctctggacctgtaactggagctgagataatgaggaaactttctaaaactcatacccatagtgactctgcattaaaaataaagggcattcacccatatcattctctgagctataccagtggagacactgccactgattctccagtgcatgttggacgtgctgggatgccagtaaaggacagtccaaggaaggagagcctactcagctacctgactggaagcttcccaagcctgcacaacctcctggaaggtactcctcagagaagcagtgctgctgtgaaaagtagctccctaacgagaacaggaaatacagtagccactgatatgttatctgaacatcccttgctatctgagccatcatctgtgagtttctataattggatgtcaaatgctgtgggtaatcgaggaagtgtgttacaagaatctcctgttacaaaatcaggacacaatagtcttcccacaggtgttgcacccaatcttccaacaataccctcagcctcagatttcaacactgtcttgtctagtgaccaaaatactttggatgggacacattctcagcatagcaccagtcaggatgatgtggcaggtgtagaagaagcaaaccaagggtttcctgctgttcagcttgctgatgcacaggttgttttcaagcctcttctgagtcatacagggatccagtcacaggatacaatgccattctgctaccgaatgtactttggagaacacctttcattttcagggactttggactgcctcagagcagatattgtggattcagacacagccaaagagagaaaaggcaaaagagcaagaaggcaaggccatgtgaatcttcctccacttgagttcaaaccagcattaatgttgggaacctttagcatcagtgctgttgtaatggaaaagtccgtgtgcacccctcagaactctaccagtgccctttcttttcatgatctcagcaagcggtattataacacctttcactgcaactttactatttcctgtcagtcaataagccagcatgtagacatggctttggttcgtcttattcatcagtttagcacaatgatagatgacatcaaagcaactcagactgatattaaacttagcagatatacagccggatctgcttccccaacacctaccttcaaaaccagaaaacatcgggactttcgttcatctgactttagccgcagttctagaggaagtcttaatggtggcaatagagtaaataatgcaaagaacaaacggaccaacaatgagaataacaaaaaggaatctcgaaacaagaattcattaggaagatctgaaagaagaacatcaaaagtgtctaggaaaggttcaaaagatgtggtggatcacatgactattcatatggatgactctgattcaattacagtgtcagaacaaagtgagccttcagctgagtgctggcagaatatgtataaattgcttaacttctattcacttatctccgatccaacaggaatattggaaaagtcttcagaaacatttggaccagcaggagttcggagccctacagagccaacatgtaaagttgtgtttgagaatgaacaagacaacagcagtttgactaagactcagaggaaacgtagcttggtaacttctgaacctcagcatgttactctaatagtgtttgggattggcatggtgaaccgcacacacctagaggcagatattggtggactaacaatggaatcagaactgaagaggatccatggcagttttactcttaaggaaaaaatgaaagatgttttacatcaaaagatgactgagacttgtgctactgctcatattggtggggttaatattgtgctgcttgaagggattacaccaaatatacaactggaggattttcctacatctcctacaagtacagccaaacaagagtttctaactgtagtgaaatgtagtattgccaagtcccaagccctctacagtgcccaaagagggctgaagacaaacaatgctgctgtgttcaaagtaggagctatcagtatcaacattcctcagcaccctgccaccttacatagcatgatggttcgaagttctcaccaactatctaaacaaatctcagacctaatcagacagccttctacagccccacagcctgtaaaagaagatattgcaaccccactaccttctgaaaaaaccccaacaagtgttaatcaaactcctgttgaaacaaatgaatttcctcagctaccagaaggcttagaaaagaagcctattgttcttaaattcagtgccatgttagatggtatagccattggagcagcacttttaccatctctgaaagcagaatacaagatgggaagaatgagaagtcatggaatgacaggtgcacagacaagatttacatttgagctgccaaatcacagattgcgttttacttcaaaagtttctgccacagatatgtcaaccattcctccttctgccagtcttaaccttccccctgttaccatgtcagggaaatatataatggaagaacatgatagttattcggatcaggtgtggagtatagatgaactgccttctaaacaaggttactatttacagggaaattatctgcgttgtgtggcagaagttggttcctttgaacataatcttacaactgatcttctaaaccacttggtatttgtacagaaagtgttcatgaaggaagttaatgaagtaatacaaaaagtttctggtggggagcagcctattcctctctggaacgaacatgatggaacagcagatggagataaacctaaaattctcctctattccctaaacttgcagttcaagggtattcaagtaacggccactactccatcaatgagagctgtaagatttgaaactggattgattgaactggaactttctaaccgacttcaaaccaaagcttcaccaggaagtagcagctatctgaaactgtttggcaaatgccaggtggatttaaatctggcattaggacaaattgtcaaacatcaggtttatgaggaagctggttctgattttcatcaagttgcctattttaaaaccagaattggattaagaaatgccctccgagaagaaatcagtggttcttcagatagggaagctgtgcttattactttgaatagaccaattgtttatgcacagcctgtggcctttgatagagctgtgctgttttggctgaattataaggccgcctatgacaactggaatgaacaacgaatggctttacataaggatattcatatggctacaaaggaagtagtagatatgctacctggtatccagcaaacatcagcccaggcctttgggactctttttctccagctcactgtcaatgatctgggaatttgcctacctatcacaaatactgcacagtctaatcatactggagaccttgacactggttctgctttggtattaaccattgaaagtactctcatcactgcatgctcttcagagtctctggttagcaaagggcatttcaaaaacttttgtatccgttttgctgatggatttgagacatcatgggatgactggaaaccagaaattcatggggatttagtgatgaatgcctgtgtagttccagatggcacctatgaagtatgttcaagaactacaggacaagcagcagctgaaagcagtagtgctggaacctggacactcaacgtattgtggaaaatgtgtgggattgatgttcacatggatcctaacattggcaaaaggcttaatgctctgggcaatactcttacaacactgacaggagaggaagacatagatgacattgctgacttaaattcagtgaacatagctgacctgtcagatgaggatgaagttgatactatgtctcccactatccatactgaagccacagattatcgaagacaggcagcatctgctagccagccgggagaacttagaggaagaaaaattatgaagcgtatagtggatatcagagaactgaatgaacaggccaaagtaatagatgatctgaaaaaattaggtgcaagtgaaggaaccataaaccaggaaattcaacgttaccaacagttagaatctgtggctgtgaatgacattagaagagatgttcgtaaaaaattacggaggtccagtatgcgggctgcttccctaaaggataagtggggtttgagttacaaaccaagttacagccgatcaaaaagcatttctgcttctggaagaccacctcttaagcgaatggaaagggcaagttctcgagtaggagaaactgaagagctcccagaaatccgtgtggatgcagcatctcctggacctagagtaacttttaatatccaggatacaatagcagaaattagaaggaagaagatcagcttcaaagttgtattctaatttcatagcatattaaacattatattaaaatgtttattttgttt

SEQ ID NO: 332605 - DNA, 2788 bp, Homo sapiens
  misc_feature (2778)..(2778): n is a, c, g, or t
  misc_feature (2783)..(2783): n is a, c, g, or t
tggtagaaactccttgtttagcaaagctttcctgaacactgtactgcaagtggataggaatagggaggatggccaagtcgtacaaccagggctaaaggatgaaaagaatgagaatatcaacttctttttttttttttttgagacagaatctcactctgtcgcccaggctggagtacagtggcacaatctcagctcactgcagtctccgcctcctgggttcaagcaattctcctgcctcagcctcccaagtagctgggattacaggtgcctgccactacgcccagctaattttttgtatttttagtagagacggggtttcaccatgttggccaggcttgtctcgaactcctagccttgtgattcgcctgcctcggcctcccaaagtgctgggaatacaggcatgagctactgcgcccagccgagaatatcaacttctttaggactactcaagaagggagtcaaggcagggaccttggtctgtgccactgtgacgcagagatgtataataccagtactcataagaggtccatctctaaattgccctcctcttacttcttccccctgcctcatgttttttctctttaatgactagcatcgaaactctttaaatggggcaggcctgtgttcttatctcaggaatagtaagaaaagggggttgggaacaggggaaatccagaataaagacttgagaaaggaacagagtgggtgatggcagctatgaagaaaaaacagatcagaagaagagtcctggcaccttaggaagagaaagtgtcacagacacgaggcctaggctagagagatggtgtaggtggtagctgctgtgaagaagaaatgacaacaggctggagctgttccctgaaacctgtgggaaggaagagagacctgcacaggccggcacttagcttgtggagaaggtcctaactcaacactgcaactttaagctggcttaacttgtccaagttccagatgaccaacaaagacagctatagacactctaactctgtgccaattacccaaggccttcagggccctgggacctattccatgatagtggtaccctaactgaacccatttcagccactcagattgatagggtggaaaagacagggcaggtggtagcagctgtgaagaaaagaggaaagcagaagggtggcctataatctacaggcatgtagagaggactacataggcctctgttctttgccctcaggagcccccttcctgtcccttggactcagaatggatccttccagcacacatggcccaacactgagagtgcaggaagcatgggtaggggcctcctgctgctggtatgtacccaggccagcctcctgccgacacagcctactggctgggttcatgttcttactattcacctcaggccattgtctgggtgcttaatttgacttgtttcccctggtcaccagtctcccctccgatattcacaggacatcaagcagcttcagccacgggtaagaggcttttcaccctgcctgttgggtagcccagaggacccacaaaggtcaacctgagtctccacagcctcctccccagggcagtaggaattgatatctcattcactggtattttccctctgtccctaattgggttttctatagttactagttttccaggcctccaagggagattctgaggcttgatgtgttctgactgtgtcttggctttgtgatgctgagtgccagaaatactctgtactataaaaactaccatcgttctttgaaacaacaaagaggaataaagaacttaattctggtgaaaaaaaaaacaaaaaaaaaaaaaaaaacaaaaaacacaaaaaacaccacaaaaaaaaaaaacacacaaaaaaaaaaaaaaaacacaaaaaacaaaaaaaaaaaaaaaaaaaaaaaacaatacaaaaacaacacacaaaaaaagaaaaacaaaacaaaaaataccactataaatataaaacataaaataaataacataaaaacaataaccactgaaacaatcactaactaatatacattacaactatatttatcacttcctcttcacctcctctttactatatatcaaccatccacacttctccgcatcaccttcttactctttgctacatcatacaaacacccatataagcatcacagatgctacaacaacgaataactaaagaaacaaaacaaaaccataaacaaaacaatatatatatattaataaattatacataaccaacaaacatactacaatcacatatcaatcttaatctaacaacatgactgatctaacaactatacatggaggatggagaagacagaaggaggagttgggcagacggtacctcattctgatagttgagggttgtagcgcgtgtgtggtagcagaggaggaggaagggaggcgtgcagtcggcgaggagcgtagcagccgaggcgagggtggcgatagagacgggacgtcgtgcgggccgagagcaagagaaacgatagatcaggtacgtagttctgactgatgataagcatcagtgcggaccagtggtctagggacggcatgtgggatgatcgaggacaagacgtacagcatgctctcacatcgaatgcaggagtggagccacgagttgaagctaggttgcgcgctgacgagctagtagcgcgacggggtgagcggaccaggcacaccgaccgcctcacgcgtcagccccaagctggcgagcagatgtaatcgatactagccggcttgacaacgagcagcacgacgacggctagacagccgagaggaggagacggcacgacnggggngagtc

SEQ ID NO: 332606 - DNA, 1650 bp, Homo sapiens
tggtagaaactccttgtttagcaaagctttcctgaacactgtactgcaagtggataggaatagggaggatggccaagtcgtacaaccagggctaaaggatgaaaagaatgagaatatcaacttctttttttttttttttgagacagaatctcactctgtcgcccaggctggagtacagtggcacaatctcagctcactgcagtctccgcctcctgggttcaagcaattctcctgcctcagcctcccaagtagctgggattacaggtgcctgccactacgcccagctaattttttgtatttttagtagagacggggtttcaccatgttggccaggcttgtctcgaactcctagccttgtgattcgcctgcctcggcctcccaaagtgctgggaatacaggcatgagctactgcgcccagccgagaatatcaacttctttaggactactcaagaagggagtcaaggcagggaccttggtctgtgccactgtgacgcagagatgtataataccagtactcataagaggtccatctctaaattgccctcctcttacttcttccccctgcctcatgttttttctctttaatgactagcatcgaaactctttaaatggggcaggcctgtgttcttatctcaggaatagtaagaaaagggggttgggaacaggggaaatccagaataaagacttgagaaaggaacagagtgggtgatggcagctatgaagaaaaaacagatcagaagaagagtcctggcaccttaggaagagaaagtgtcacagacacgaggcctaggctagagagatggtgtaggtggtagctgctgtgaagaagaaatgacaacaggctggagctgttccctgaaacctgtgggaaggaagagagacctgcacaggccggcacttagcttgtggagaaggtcctaactcaacactgcaactttaagctggcttaacttgtccaagttccagatgaccaacaaagacagctatagacactctaactctgtgccaattacccaaggccttcagggccctgggacctattccatgatagtggtaccctaactgaacccatttcagccactcagattgatagggtggaaaagacagggcaggtggtagcagctgtgaagaaaagaggaaagcagaagggtggcctataatctacaggcatgtagagaggactacataggcctctgttctttgccctcaggagcccccttcctgtcccttggactcagaatggatccttccagcacacatggcccaacactgagagtgcaggaagcatgggtaggggcctcctgctgctggtatgtacccaggccagcctcctgccgacacagcctactggctgggttcatgttcttactattcacctcaggccattgtctgggtgcttaatttgacttgtttcccctggtcaccagtctcccctccgatattcacaggacatcaagcagcttcagccacgggtaagaggcttttcaccctgcctgttgggtagcccagaggacccacaaaggtcaacctgagtctccacagcctcctccccagggcagtaggaattgatatctcacttttgccagattaggcttctcactcttcttgagtaggccataatccacctcttcagtaggccatgcatcttgt

SEQ ID NO: 332607 - DNA, 1526 bp, Homo sapiens
  misc_feature (1516)..(1516): n is a, c, g, or t
  misc_feature (1521)..(1521): n is a, c, g, or t
ccatccttggcctctggagctaattgagaaggctagggggagttccgctgtagggagaaggatgttgcatccctttgtagattgtgtagcattcaaaacctgctgaacactcaccctcaatgtatattctctgttctggcctgcttcaaggtcagttacactacttcctgggatgggcctttctctggcttaagcttggttgtccctggctttcccaaggatcacagcccaaaaggcacagtggggaaaatttatggcctattcgagaagagtgagcagcctaatcaagccaagccttgatttggggttctcacttcactggtattttccctctgtccctaattgggttttctatagttactagttttccaggcctccaagggagattctgaggcttgatgtgttctgactgtgtcttggctttgtgatgctgagtgccagaaatactctgtactataaaaactaccatcgttctttgaaacaacaaagaggaataaagaacttaattctggtgaaaaaaaaaacaaaaaaaaaaaaaaaaacaaaaaacacaaaaaacaccacaaaaaaaaaaaacacacaaaaaaaaaaaaaaaacacaaaaaacaaaaaaaaaaaaaaaaaaaaaaaacaatacaaaaacaacacacaaaaaaagaaaaacaaaacaaaaaataccactataaatataaaacataaaataaataacataaaaacaataaccactgaaacaatcactaactaatatacattacaactatatttatcacttcctcttcacctcctctttactatatatcaaccatccacacttctccgcatcaccttcttactctttgctacatcatacaaacacccatataagcatcacagatgctacaacaacgaataactaaagaaacaaaacaaaaccataaacaaaacaatatatatatattaataaattatacataaccaacaaacatactacaatcacatatcaatcttaatctaacaacatgactgatctaacaactatacatggaggatggagaagacagaaggaggagttgggcagacggtacctcattctgatagttgagggttgtagcgcgtgtgtggtagcagaggaggaggaagggaggcgtgcagtcggcgaggagcgtagcagccgaggcgagggtggcgatagagacgggacgtcgtgcgggccgagagcaagagaaacgatagatcaggtacgtagttctgactgatgataagcatcagtgcggaccagtggtctagggacggcatgtgggatgatcgaggacaagacgtacagcatgctctcacatcgaatgcaggagtggagccacgagttgaagctaggttgcgcgctgacgagctagtagcgcgacggggtgagcggaccaggcacaccgaccgcctcacgcgtcagccccaagctggcgagcagatgtaatcgatactagccggcttgacaacgagcagcacgacgacggctagacagccgagaggaggagacggcacgacnggggngagtc

SEQ ID NO: 332608 - DNA, 617 bp, Homo sapiens
gctaccaggaaagctgatggggtctacatgcacttttcctatatcccccactgacaagtacagtgaaggccgaatgctcagtgaacagtaactctctgccctaaatccagaatgaaatctcacctcatgtgatagtagtcatgaaacccaaagacacaatgtggagaggagttcacgagaatgcctggtatgaggagagcaccccaaatcactctttatgagctcatctcaaatctcgggctccacttatcccacggcgctgctcctgcctgagttctgcagccaagtgccctgtgattgccataagaaggaggaatgaggactggggggcggcgatgcagcaaactgaccagctgccacctctccattctcccagtcaatctctctgatcattgtctctgcgctagctcacagtctggaagcttggagagcctcttttgtttctccacttttttttttttctcagagttctctgtaaaagcatgttttgggttgtgctctcctgtttcaattaatttatatctaccctctgacttttaggaacttattatattatttgacaaagcacaaatgtgcagaaaatcctaggcctaataaacccagatgttctggatgca

SEQ ID NO: 332609 - DNA, 364 bp, Homo sapiens
gctaccaggaaagctgatggggtctacatgcacttttcctatatcccccactgacaagtacagtgaaggccgaatgctcagtgaacagtaactctctgccctaaatccagaatgaaatctcacctcatgtgatagtagtcatgaaacccaaagacacaatgtggagaggagttcacgagaatgcctggtatgaggagagcaccccaaatcactctttatgagctcatctcaaatctcgggctccacttatcccacgagccattgaagataatgatgaagagatcactcttaaagtgctctttttttcttttcagattttaatagtaaagcagaactttaaaaaaaaataaagctgataaaaatt

SEQ ID NO: 332610 - DNA, 719 bp, Homo sapiens
gctaccaggaaagctgatggggtctacatgcacttttcctatatcccccactgacaagtacagtgaaggccgaatgctcagtgaacagtaactctctgccctaaatccagctgtgactttcatggtccttactcatggaccttccacactgagggagcatgctgcatctggggaattttggatatcaggagcactgagaaaaagagaacacaaatgaaatctcacctcatgtgatagtagtcatgaaacccaaagacacaatgtggagaggagttcacgagaatgcctggtatgaggagagcaccccaaatcactctttatgagctcatctcaaatctcgggctccacttatcccacggcgctgctcctgcctgagttctgcagccaagtgccctgtgattgccataagaaggaggaatgaggactggggggcggcgatgcagcaaactgaccagctgccacctctccattctcccagtcaatctctctgatcattgtctctgcgctagctcacagtctggaagcttggagagcctcttttgtttctccacttttttttttttctcagagttctctgtaaaagcatgttttgggttgtgctctcctgtttcaattaatttatatctaccctctgacttttaggaacttattatattatttgacaaagcacaaatgtgcagaaaatcctaggcctaataaacccagatgttctggatgca

SEQ ID NO: 332611 - DNA, 599 bp, Homo sapiens
gctacacagccccagtgattactgctatgctggaaggaaggactaatgaatccagaatattctgagtttaaatcattttagtaattgactatgtaagctaaacacacatttggccgattctccttgtggctcagatgtctgcagagctgtttctggtgaggtctatgccccctcattgtgggagatcagggcagctctgtggactacccagcctcagactggactcttatctcctttcctatgtaagacatggaggccagggcttgaaagaaggggggctaagaggttctgtggaaagaaatccgcaacttccacagaagcaggtaattgaattcagacttacaatttaattcatctgtgttgattagctgtgattaaatttgttctggttctgtttagatctgagccttaatcatagcaaacttgttcaggtagggaatggtaggccttccgtcattacgtagcaagccagtgggtttgtctgcctttttggtgtggtatgtgagttcattctgcatacttgagtgagagaagcgtggcagctggaaagagcaggcttctaggagaagtaggataggaaaatatagcctgggttgggg

SEQ ID NO: 332612 - DNA, 500 bp, Homo sapiens
ggtggggttggggtggggagggcttgaaacctcacagcaaaaagatttgcatttagtctgtggaccagaaaccctcaaactccagtaatgatgtttgccagtctgcaagttctagcatatactttgcatctgtcctgaaatcacctcccttttagaaacatatgtatctctctacttagtgttatcttaagcattcatagtcacaatatcatggatttgccttgccagttgtatttttcccctaacacatcaaagtaagtgcacaggtattaaactagagaggatgtgcttgcccccctccaaaatgcggactcgcgtctgcctttggaaaccaggaccgtgggtttaggcagcttggaggcttgatccgatctggactacagaaggatttctcggaggttagaagggataggggaggcattcctgggaatctgcccttgtcccatgacaaaggtctgggggtgccagcatgcccccaagctgagagtgccactcttgcc

SEQ ID NO: 332613 - DNA, 217 bp, Homo sapiens
taaaaaggaatatggttagtattttaataaatatggccaaacacgtgtatctgattcattcggtggcccgtgtctgtagttccagctactctgctcaggaggctggggcgggaagatcctttgagcccaggaggagaatccagactgggcagcagagagacacttatgtgtttatatatgtggagcacacagctatatctgacaccctccttcaaag

SEQ ID NO: 332614 - DNA, 4654 bp, Homo sapiens
tgcgtagtgcgctccccgcccagcctgcagagctcgcgccgcggcagcccagccgctcggccccgccgcgctcgcagaggccgccatgggcaccgcgcgctggctcgcgctgggcagcctcttcgccctggctgggctgctggaaggccggctcgtgggcgaggaggaagccggctttggcgaatgtgacaagttcttctacgccgggaccccgcctgcggggctggcggccgattcccacgtgaagatctgtcagcgcgcggagggtgctgagcgcttcgccaccctctacagcacccgggaccgcatccccgtgtactccgcgttccgcgccccgcgccctgcgcccggcggcgccgagcagcgatggctggtggagccgcagatcgatgaccccaacagcaaccttgaggaggcgattaatgaggcagaggccatcacctctgtgaacagcctgggaagcaagcaagccttgaatacagattaccttgattctgattaccaaagaggacagctttacccattctcccttagcagtgatgtccaggtggccacatttactctcacaaattcagccccaatgactcagtccttccaggaacggtggtatgtgaatctccacagcctaatggaccgggctttgaccccacagtgtggcagtggggaagacctatatatcctcacaggcacagtgccctcagactacagagttaaagacaaagtggcagtccctgagtttgtttggctggcagcctgttgtgctgtccctggaggaggctgggccatgggctttgtcaagcacacccgggacagtgacatcatagaagatgtgatggtaaaagatcttcagaaactgcttccatttaaccctcagctgtttcagaacaactgtggtgaaactgagcaagacacagagaaaatgaaaaaaatcctggaagtggttaaccaaatccaggatgaagaacgaatggtacaatctcaaaagagttctagtcccctttctagcaccaggagcaagaggtctactctgttgcctccagaggcatctgagggaagtagtagctttttgggaaaactcatgggcttcattgctaccccattcatcaagctttttcaattaatttattaccttgtggtagcaatcctgaagaacattgtctatttcctgtggtgtgttaccaagcaggtgattaatggcatagaaagttgcctttaccgcctgggctcagccaccatctcatacttcatggccattggggaagagttggtgagcattccctggaaggtgctcaaggtcgtggccaaagtcatcagggctctcctccggatcctttgttgtctgctgaaggccatttgccgagttctgagcatccctgtccgtgtccttgtggatgtggccactttccctgtgtacaccatgggcgctattccaattgtttgcaaggacattgcactgggccttggtggcactgtctcactgctctttgacactgcttttggtaccctgggtggcctatttcaggtggtttttagtgtctgcaagcggattggctacaaggttacttttgacaattctggggagttataaactcaaaaaactaatagtatccagtcacagtgaatttgaaagctggaatagtttgtctttacaatgggtttctgttcactgtcagttatcattatattttggcctttggtggggatgtctgcttgtttttgcaaaagaagatggcagaatttagacttgacagaggagaaatgctcagggtgagattaggtgtagtaatctgctgtttacctccagttatatgtgcaaactcccaagccactaataacttcagttatgcactctaacacagacgaccacctgaaatgcactggtatttatttctgataattaaaaattacaggggagggaagaactagaaaaagaacaactttagaccaaaggtgtctgagaaaaggagaaagggagcttgttcttcccattgctctttgtgatttaaggcaaaacagattaaaaaaaaaatatgcagccaatttcttggcatttgcttctctttctcctcaactcgactgaccttggtggaatgcagataatgcctctttgttgaaataactttgtgggaatgtacaattttctatatctcttagctttccgtggttctcaaggatatgtacagttttcattttcctccaaagttgaattttgctacatttttcttttaggtaatgataagcattttttaaaaaatcatttttaggtaatggtaagcattttatgccaaatgtggcataacagagtttgaattgaagggcaaagttttcttttctttttttttttggccccttgaatggtataatacagtcctctccggtggaaagaagagaagagaaggtggacagccctgctcttagtaggtgctgcagatccaaggacatcttttgtccagcttggattaacttgacgtgtatccctgcctgacaaggttgaactgaaagatctatatgttaagctaacatgaaaattcatattctgcaacatagtagatttttctaatgcatgaaataagtacccagcacagtaaaaatactctgacttatgtccctaaatggttgttttgatacaactatatagaaaagagccacaaaataaagataaaagttattgtggccatctctgaaaaaaatatataaaatatttaagaagaattatatcttaggaaattatttttacagtgtgtttgaggctacaaacataactcccccattaatacaaattaaatgtgagagctcattctcaaaatttttttgatcaagcacttgtcattttaaatcttgcactaaaaaatggtaacaagagggaccaaactttgcttcccacaattgggatggaatcacctggatttttctgaatgttttaaagaattgctgagaggtagaaacagccaagtatgaaatactgatcttggggctaccgcccaggatcaatcagaaagttatatgcaaaaattcggggtcccaacaaggagagaacaatatgtcaaccatttgcatggggtcgatggatgagaaacatgagcgtagcaagagttacattttgcagaaaaatagcggaggcacacccagagtagaagagcagccagcaagctgccatcctgatcaatttgtgatgcaaggttagggagtatgagcaccgcatgggtccatgctagggagatgtgcaccaggcttagctaagaaacttaaagcagtattttaccaactcttgtcttagggagcataaagtttggatgtccctttatttcagcagtgtgaaggtaaatggaagggtgagggtttgacttggtactgattggtcaagaatcctgctggataaagaaaaggaattttagaagtgaccagagggacagtccagccaaactattatttgataaggaacccaaggccctgggaggcaacaggctagcccttagtttcatggctagctgagagcagattaggagccaacgttgtttgcacatgtcccatcacacctgagatgtcagacatgggaagttcgtgctattattcagttgcctctctggaccatggcaagatttcctcattcatcaaacagactccaggccctgacaaagcagttggatttggcatgtgtgatgaaaacaattagccatccatgtacaacattatgcttactgcatcccatggaaacttaattccctcctagcacatatttgcatactgaaaggtccgaaaagggcatccacggcagcttgagccccttagcaccatgtaaggagcacagcatccaaacggcttcttgagaaccattggggaatgtctttctttttcacatccaattgtttagtgtctatttattcttgggtggccagttttgaaacctaaaaagggacaataaagcaaaaagtatcagtaaggataggtggctgagacccactgccctgagctactagtgtggctgtgcctgtgggtctctagaaccatctgcattggacgtgaagccacagcaggtggctggactgctggcctgttcctaatgagctacgctgggctttgaggtagaggttggggtttatgaaccccaactctggcttaaagatcttgctgtggctctgttatgttctgaggccttgggattagcctcttcctcattacggagctgattttctagtctgtggatcagctatgcctttggacacttctcttttccattgtgccttttgaatgttgtcttctcactcagcatcagcacttcgatctaaatgcagactagggagttgggaggaggaaccaaagtgaaccatccttcatttattcagtcattcgttcatctgtcaaacacgtatttggacatcaaggttgcagagatgaacaatgcatggatttcatctttgaggagttcaaaacctagtggagagaacacatggtacaatcgtaacacatgaaggacaagtaagtgctgcagtaaaggtactaataacatgttccttggaacagaggaagaaaaaccacgaaaccatggaaattagggaagcctttacagagggtgtgacaaaactcaatttgacattttcaagctatgtacaatgatgtgcaccttgcagatgctcaataaagtaattactgacaa

SEQ ID NO: 332615 - DNA, 4629 bp, Homo sapiens
tgcgtagtgcgctccccgcccagcctgcagagctcgcgccgcggcagcccagccgctcggccccgccgcgctcgcagaggccgccatgggcaccgcgcgctggctcgcgctgggcagcctcttcgccctggctgggctgctggaaggccggctcgtgggcgaggaggaagccggctttggcgaatgtgacaagttcttctacgccgggaccccgcctgcggggctggcggccgattcccacgtgaagatctgtcagcgcgcggagggtgctgagcgcttcgccaccctctacagcacccgggaccgcatccccgtgtactccgcgttccgcgccccgcgccctgcgcccggcggcgccgagcagcgatggctggtggagccgcagatcgatgaccccaacagcaaccttgaggaggcgattaatgaggcagaggccatcacctctgtgaacagcctgggaagcaagcaagccttgaatacagattaccttgattctgattaccaaagaggacagctttacccattctcccttagcagtgatgtccaggtggccacatttactctcacaaattcagccccaatgactcagtccttccaggaacggtggtatgtgaatctccacagcctaatggaccgggctttgaccccacagtgtggcagtggggaagacctatatatcctcacaggcacagtgccctcagactacagagttaaagacaaagtggcagtccctgagtttgtttggctggcagcctgttgtgctgtccctggaggaggctgggccatgggctttgtcaagcacacccgggacagtgacatcatagaagatgtgatggtaaaagatcttcagaaactgcttccatttaaccctcagctgtttcagaacaactgtggtgaaactgagcaagacacagagaaaatgaaaaaaatcctggaagtggttaaccaaatccaggatgaagaacgaatggtacaatctcaaaagagttctagtcccctttctagcaccaggagcaagaggtctactctgttgcctccagaggcatctgagggaagtagtagctttttgggaaaactcatgggcttcattgctaccccattcatcaagctttttcaattaatttattaccttgtggtagcaatcctgaagaacattgtctatttcctgtggtgtgttaccaagcaggtgattaatggcatagaaagttgcctttaccgcctgggctcagccaccatctcatacttcatggccattggggaagagttggtgagcattccctggaaggtgctcaaggtcgtggccaaagtcatcagggctctcctccggatcctttgttgtctgctgaaggccatttgccgagttctgagcatccctgtccgtgtccttgtggatgtggccactttccctgtgtacaccatgggcgctattccaattgtttgcaaggacattgcactgggccttggtggcactgtctcactgctctttgacactgcttttggtaccctgggtggcctatttcaggtggtttttagtgtctgcaagcggattggctacaaggttacttttgacaattctggggagttataaactcaaaaaactaatagtatccagtcacagtgaatttgaaagctggaatagtttgtctttacaatgggtttctgttcactgtcagttatcattatattttggcctttggtggggatgtctgcttgtttttgcaaaagaagatggcagaatttagacttgacagaggagaaatgctcagggtgagattaggtgtagtaatctgctgtttacctccagttatatgtgcaaactcccaagccactaataacttcagttatgcactctaacacagacgaccacctgaaatgcactggtatttatttctgataattaaaaattacaggggagggaagaactagaaaaagaacaactttagaccaaaggtgtctgagaaaaggagaaagggagcttgttcttcccattgctctttgtgatttaaggcaaaacagattaaaaaaaaaatatgcagccaatttcttggcatttgcttctctttctcctcaactcgactgaccttggtggaatgcagataatgcctctttgttgaaataactttgtgggaatgtacaattttctatatctcttagctttccgtggttctcaaggatatgtacagttttcattttcctccaaagttgaattttgctacatttttcttttaggtaatgataagcattttttaaaaaatcatttttaggtaatggtaagcattttatgccaaatgtggcataacagagtttgaattgaagggcaaagttttcttttctttttttttttggccccttgaatggtataatacagtcctctccggtggaaagaagagaagagaaggtggacagccctgctcttagtaggtgctgcagatgattaacttgacgtgtatccctgcctgacaaggttgaactgaaagatctatatgttaagctaacatgaaaattcatattctgcaacatagtagatttttctaatgcatgaaataagtacccagcacagtaaaaatactctgacttatgtccctaaatggttgttttgatacaactatatagaaaagagccacaaaataaagataaaagttattgtggccatctctgaaaaaaatatataaaatatttaagaagaattatatcttaggaaattatttttacagtgtgtttgaggctacaaacataactcccccattaatacaaattaaatgtgagagctcattctcaaaatttttttgatcaagcacttgtcattttaaatcttgcactaaaaaatggtaacaagagggaccaaactttgcttcccacaattgggatggaatcacctggatttttctgaatgttttaaagaattgctgagaggtagaaacagccaagtatgaaatactgatcttggggctaccgcccaggatcaatcagaaagttatatgcaaaaattcggggtcccaacaaggagagaacaatatgtcaaccatttgcatggggtcgatggatgagaaacatgagcgtagcaagagttacattttgcagaaaaatagcggaggcacacccagagtagaagagcagccagcaagctgccatcctgatcaatttgtgatgcaaggttagggagtatgagcaccgcatgggtccatgctagggagatgtgcaccaggcttagctaagaaacttaaagcagtattttaccaactcttgtcttagggagcataaagtttggatgtccctttatttcagcagtgtgaaggtaaatggaagggtgagggtttgacttggtactgattggtcaagaatcctgctggataaagaaaaggaattttagaagtgaccagagggacagtccagccaaactattatttgataaggaacccaaggccctgggaggcaacaggctagcccttagtttcatggctagctgagagcagattaggagccaacgttgtttgcacatgtcccatcacacctgagatgtcagacatgggaagttcgtgctattattcagttgcctctctggaccatggcaagatttcctcattcatcaaacagactccaggccctgacaaagcagttggatttggcatgtgtgatgaaaacaattagccatccatgtacaacattatgcttactgcatcccatggaaacttaattccctcctagcacatatttgcatactgaaaggtccgaaaagggcatccacggcagcttgagccccttagcaccatgtaaggagcacagcatccaaacggcttcttgagaaccattggggaatgtctttctttttcacatccaattgtttagtgtctatttattcttgggtggccagttttgaaacctaaaaagggacaataaagcaaaaagtatcagtaaggataggtggctgagacccactgccctgagctactagtgtggctgtgcctgtgggtctctagaaccatctgcattggacgtgaagccacagcaggtggctggactgctggcctgttcctaatgagctacgctgggctttgaggtagaggttggggtttatgaaccccaactctggcttaaagatcttgctgtggctctgttatgttctgaggccttgggattagcctcttcctcattacggagctgattttctagtctgtggatcagctatgcctttggacacttctcttttccattgtgccttttgaatgttgtcttctcactcagcatcagcacttcgatctaaatgcagactagggagttgggaggaggaaccaaagtgaaccatccttcatttattcagtcattcgttcatctgtcaaacacgtatttggacatcaaggttgcagagatgaacaatgcatggatttcatctttgaggagttcaaaacctagtggagagaacacatggtacaatcgtaacacatgaaggacaagtaagtgctgcagtaaaggtactaataacatgttccttggaacagaggaagaaaaaccacgaaaccatggaaattagggaagcctttacagagggtgtgacaaaactcaatttgacattttcaagctatgtacaatgatgtgcaccttgcagatgctcaataaagtaattactgacaa

SEQ ID NO: 332616 - DNA, 4600 bp, Homo sapiens
tgcgtagtgcgctccccgcccagcctgcagagctcgcgccgcggcagcccagccgctcggccccgccgcgctcgcagaggccgccatgggcaccgcgcgctggctcgcgctgggcagcctcttcgccctggctgggctgctggaaggccggctcgtgggcgaggaggaagccggctttggcgaatgtgacaagttcttctacgccgggaccccgcctgcggggctggcggccgattcccacgtgaagatctgtcagcgcgcggagggtgctgagcgcttcgccaccctctacagcacccgggaccgcatccccgtgtactccgcgttccgcgccccgcgccctgcgcccggcggcgccgagcagcgatggctggtggagccgcagatcgatgaccccaacagcaaccttgaggaggcgattaatgaggcagaggccatcacctctgtgaacagcctgggaagcaagcaagccttgaatacagattaccttgattctgattaccaaagaggacagctttacccattctcccttagcagtgatgtccaggtggccacatttactctcacaaattcagccccaatgactcagtccttccaggaacggtggtatgtgaatctccacagcctaatggaccgggctttgaccccacagtgtggcagtggggaagacctatatatcctcacaggcacagtgccctcagactacagagttaaagacaaagtggcagtccctgagtttgtttggctggcagcctgttgtgctgtccctggaggaggctgggccatgggctttgtcaagcacacccgggacagtgacatcatagaagatgtgatggtaaaagatcttcagaaactgcttccatttaaccctcagctgtttcagaacaactgtggtgaaactgagcaagacacagagaaaatgaaaaaaatcctggaagtggttaaccaaatccaggatgaagaacgaatggtacaatctcaaaagagttctagtcccctttctagcaccaggagcaagaggtctactctgttgcctccagaggcatctgagggaagtagtagctttttgggaaaactcatgggcttcattgctaccccattcatcaagctttttcaattaatttattaccttgtggtagcaatcctgaagaacattgtctatttcctgtggtgtgttaccaagcaggtgattaatggcatagaaagttgcctttaccgcctgggctcagccaccatctcatacttcatggccattggggaagagttggtgagcattccctggaaggtgctcaaggtcgtggccaaagtcatcagggctctcctccggatcctttgttgtctgctgaaggccatttgccgagttctgagcatccctgtccgtgtccttgtggatgtggccactttccctgtgtacaccatgggcgctattccaattgtttgcaaggacattgcactgggccttggtggcactgtctcactgctctttgacactgcttttggtaccctgggtggcctatttcaggtggtttttagtgtctgcaagcggattggctacaaggttacttttgacaattctggggagttataaactcaaaaaactaatagtatccagtcacagtgaatttgaaagctggaatagtttgtctttacaatgggtttctgttcactgtcagttatcattatattttggcctttggtggggatgtctgcttgtttttgcaaaagaagatggcagaatttagacttgacagaggagaaatgctcagggtgagattaggtgtagtaatctgctgtttacctccagttatatgtgcaaactcccaagccactaataacttcagttatgcactctaacacagacgaccacctgaaatgcactggtatttatttctgataattaaaaattacaggggagggaagaactagaaaaagaacaactttagaccaaaggtgtctgagaaaaggagaaagggagcttgttcttcccattgctctttgtgatttaaggcaaaacagattaaaaaaaaaatatgcagccaatttcttggcatttgcttctctttctcctcaactcgactgaccttggtggaatgcagataatgcctctttgttgaaataactttgtgggaatgtacaattttctatatctcttagctttccgtggttctcaaggatatgtacagttttcattttcctccaaagttgaattttgctacatttttcttttaggtaatgataagcattttttaaaaaatcatttttaggtaatggtaagcattttatgccaaatgtggcataacagagtttgaattgaagggcaaagttttcttttctttttttttttggccccttgaatggtataatacagtcctctccggtggaaagaagagaagagaaggtggacagccctgctcttagtaggtgctgcagatccaaggacatcttttgtccagcttggattaacttgacgtgtatccctgcctgacaaggttgaactgaaagatctatatgttaagctaacatgaaaattcatattctgcaacatagtagatttttctaatgcatgaaataagtacccagcacagtaaaaatactctgacttatgtccctaaatggttgttttgatacaactatatagaaaagagccacaaaataaagataaaagttattgtggccatctctgaaaaaaatatataaaatatttaagaagaattatatcttaggaaattatttttacagtgtgtttgaggctacaaacataactcccccattaatacaaattaaatgtgagagctcattctcaaaatttttttgatcaagcacttgtcattttaaatcttgcactaaaaaatggtaacaagagggaccaaactttgcttcccacaattgggatggaatcacctggatttttctgaatgttttaaagaattgctgagaggtagaaacagccaagtatgaaatactgatcttggggctaccgcccaggatcaatcagaaagttatatgcaaaaattcggggtcccaacaaggagagaacaatatgtcaaccatttgcatggggtcgatggatgagaaacatgagcgtagcaagagttacattttgcagaaaaatagcggaggcacacccagagtagaagagcagccagcaagctgccatcctgatcaatttgtgatgcaaggttagggagtatgagcaccgcatgggtccatgctagggagatgtgcaccaggcttagctaagaaacttaaagcagtattttaccaactcttgtcttagggagcataaagtttggatgtccctttatttcagcagtgtgaaggtaaatggaagggtgagggtttgacttggtactgattggtcaagaatcctgctggataaagaaaaggaattttagaagtgaccagagggacagtccagccaaactattatttgataaggaacccaaggccctgggaggcaacaggctagcccttagtttcatggctagctgagagcagattaggagccaacgttgtttgcacatgtcccatcacacctgagatgtcagacatgggaagttcgtgctattattcagttgcctctctggaccatggcaagatttcctcattcatcaaacagactccaggccctgacaaagcagttggatttggcatgtgtgatgaaaacaattagccatccatgtacaacattatgcttactgcatcccatggaaacttaattccctcctagcacatatttgcatactgaaaggtccgaaaagggcatccacggcagcttgagccccttagcaccatgtaaggagcacagcatccaaacggcttcttgagaaccattggggaatgtctttctttttcacatccaattgtttagtgtctatttattcttgggtggccagttttgaaacctaaaaagggacaataaagcaaaaagtatcagtaaggataggtggctgagacccactgccctgagctactagtgtggctgtgcctgtgggtctctagaaccatctgcattggacgtgaagccacagcaggtggctggactgctggcctgttcctaatgagctacgctgggctttgaggtagaggttggggtttatgaaccccaactctggcttaaagatcttgctgtggctctgttatgttctgaggccttgggattagcctcttcctcattacggagctgattttctagtctgtggatcagctatgcctttggacacttctcttttccattgtgccttttgaatgttgtcttctcactcagcatcagcacttcgatctaaatgcagactagggagttgggaggaggaaccaaagtgaaccatccttcatttattcagtcattcgttcatctgtcaaacacgtatttggacatcaaggttgcagagatgaacaatgcatggatttcatctttgaggagttcaaaacctagtggagagaacacatggtacaatcgtaacacatgaaggacaagtaagtgctgcagtaaaggtactaataacatgttccttggaacagaggaagaaaaaccacgaaaccacaagctatgtacaatgatgtgcaccttgcagatgctcaataaagtaattactgacaa

SEQ ID NO: 332617 - DNA, 4351 bp, Homo sapiens
tgcgtagtgcgctccccgcccagcctgcagagctcgcgccgcggcagcccagccgctcggccccgccgcgctcgcagaggccgccatgggcaccgcgcgctggctcgcgctgggcagcctcttcgccctggctgggctgctggaaggccggctcgtgggcgaggaggaagccggctttggcgaatgtgacaagttcttctacgccgggaccccgcctgcggggctggcggccgattcccacgtgaagatctgtcagcgcgcggagggtgctgagcgcttcgccaccctctacagcacccgggaccgcatccccgtgtactccgcgttccgcgccccgcgccctgcgcccggcggcgccgagcagcgatggctggtggagccgcagatcgatgaccccaacagcaaccttgaggaggcgattaatgaggcagaggccatcacctctgtgaacagcctgggaagcaagcaagccttgaatacagattaccttgattctgattaccaaagaggacagctttacccattctcccttagcagtgatgtccaggtggccacatttactctcacaaattcagccccaatgactcagtccttccaggaacggtggtatgtgaatctccacagcctaatggaccgggctttgaccccacagtgtggcagtggggaagacctatatatcctcacaggcacagtgccctcagactacagagttaaagacaaagtggcagtccctgagtttgtttggctggcagcctgttgtgctgtccctggaggaggctgggccatgggctttgtcaagcacacccgggacagtgacatcatagaagatgtgatggtaaaagatcttcagaaactgcttccatttaaccctcagctgtttcagaacaactgtggtgaaactgagcaagacacagagaaaatgaaaaaaatcctggaagtggttaaccaaatccaggatgaagaacgaatggtacaatctcaaaagagttctagtcccctttctagcaccaggagcaagaggtctactctgttgcctccagaggcatctgagggaagtagtagctttttgggaaaactcatgggcttcattgctaccccattcatcaagctttttcaattaatttattaccttgtggtagcaatcctgaagaacattgtctatttcctgtggtgtgttaccaagcaggtgattaatggcatagaaagttgcctttaccgcctgggctcagccaccatctcatacttcatggccattggggaagagttggtgagcattccctggaaggtgctcaaggtcgtggccaaagtcatcagggctctcctccggatcctttgttgtctgctgaaggccatttgccgagttctgagcatccctgtccgtgtccttgtggatgtggccactttccctgtgtacaccatgggcgctattccaattgtttgcaaggacattgcactgggccttggtggcactgtctcactgctctttgacactgcttttggtaccctgggtggcctatttcaggtggtttttagtgtctgcaagcggattggctacaaggttacttttgacaattctggggagttataaactcaaaaaactaatagtatccagtcacagtgaatttgaaagctggaatagtttgtctttacaatgggtttctgttcactgtcagttatcattatattttggcctttggtggggatgtctgcttgtttttgcaaaagaagatggcagaatttagacttgacagaggagaaatgctcagggtgagattaggtgtagtaatctgctgtttacctccagttatatgtgcaaactcccaagccactaataacttcagttatgcactctaacacagacgaccacctgaaatgcactggtatttatttctgataattaaaaattacaggggagggaagaactagaaaaagaacaactttagaccaaaggtgtctgagaaaaggagaaagggagcttgttcttcccattgctctttgtgatttaaggcaaaacagattaaaaaaaaaatatgcagccaatttcttggcatttgcttctctttctcctcaactcgactgaccttggtggaatgcagataatgcctctttgttgaaataactttgtgggaatgtacaattttctatatctcttagctttccgtggttctcaaggatatgtacagttttcattttcctccaaagttgaattttgctacatttttcttttaggtaatgataagcattttttaaaaaatcatttttaggtaatggtaagcattttatgccaaatgtggcataacagagtttgaattgaagggcaaagttttcttttctttttttttttggccccttgaatggtataatacagtcctctccggtggaaagaagagaagagaaggtggacagccctgctcttagtaggtgctgcagatccaaggacatcttttgtccagcttggattaacttgacgtgtatccctgcctgacaaggttgaactgaaagatctatatgttaagctaacatgaaaattcatattctgcaacatagtagatttttctaatgcatgaaataagtacccagcacagtaaaaatactctgacttatgtccctaaatggttgttttgatacaactatatagaaaagagccacaaaataaagataaaagttattgtggccatctctgaaaaaaatatataaaatatttaagaagaattatatcttaggaaattatttttacagtgtgtttgaggctacaaacataactcccccattaatacaaattaaatgtgagagctcattctcaaaatttttttgatcaagcacttgtcattttaaatcttgcactaaaaaatggtaacaagagggaccaaactttgcttcccacaattgggatggaatcacctggatttttctgaatgttttaaagaattgctgagaggtagaaacagccaagtatgaaatactgatcttggggctaccgcccaggatcaatcagaaagttatatgcaaaaattcggggtcccaacaaggagagaacaatatgtcaaccatttgcatggggtcgatggatgagaaacatgagcgtagcaagagttacattttgcagaaaaatagcggaggcacacccagagtagaagagcagccagcaagctgccatcctgatcaatttgtgatgcaaggttagggagtatgagcaccgcatgggtccatgctagggagatgtgcaccaggcttagctaagaaacttaaagcagtattttaccaactcttgtcttagggagcataaagtttggatgtccctttatttcagcagtgtgaaggtaaatggaagggtgagggtttgacttggtactgattggtcaagaatcctgctggataaagaaaaggaattttagaagtgaccagagggacagtccagccaaactattatttgataaggaacccaaggccctgggaggcaacaggctagcccttagtttcatggctagctgagagcagattaggagccaacgttgtttgcacatgtcccatcacacctgagatgtcagacatgggaagttcgtgctattattcagttgcctctctggaccatggcaagatttcctcattcatcaaacagactccaggccctgacaaagcagttggatttggcatgtgtgatgaaaacaattagccatccatgtacaacattatgcttactgcatcccatggaaacttaattccctcctagcacatatttgcatactgaaaggtccgaaaagggcatccacggcagcttgagccccttagcaccatgtaaggagcacagcatccaaacggcttcttgagaaccattggggaatgtctttctttttcacatccaattgtttagtgtctatttattcttgggtggccagttttgaaacctaaaaagggacaataaagcaaaaagtatcagtaaggataggtggctgagacccactgccctgagctactagtgtggctgtgcctgtgggtctctagaaccatctgcattggacgtgaagccacagcaggtggctggactgctggcctgttcctaatgagctacgctgggctttgaggtagaggctgttccacgtcggccttgatatcacctctgggactgtgccttgctcaccgaaacccgcgcccaggagtatgggtgatgccttgcccacccacctgcctgggaagtgcacagaggatggactggttcagtagtgaggggccacatgccttgttactgtaccgggctgtcacactagtacatcatttccgccaagagacggctactgactctttatgaggaccctaagcataccaccgttgaatattgagtcttgggatcgcc

SEQ ID NO: 332618 - DNA, 2038 bp, Homo sapiens
tgcgtagtgcgctccccgcccagcctgcagagctcgcgccgcggcagcccagccgctcggccccgccgcgctcgcagaggccgccatgggcaccgcgcgctggctcgcgctgggcagcctcttcgccctggctgggctgctggaaggccggctcgtgggcgaggaggaagccggctttggcgaatgtgacaagttcttctacgccgggaccccgcctgcggggctggcggccgattcccacgtgaagatctgtcagcgcgcggagggtgctgagcgcttcgccaccctctacagcacccgggaccgcatccccgtgtactccgcgttccgcgccccgcgccctgcgcccggcggcgccgagcagcgatggctggtggagccgcagatcgatgaccccaacagcaaccttgaggaggcgattaatgaggcagaggccatcacctctgtgaacagcctgggaagcaagcaagccttgaatacagattaccttgattctgattaccaaagaggacagctttacccattctcccttagcagtgatgtccaggtggccacatttactctcacaaattcagccccaatgactcagtccttccaggaacggtggtatgtgaatctccacagcctaatggaccgggctttgaccccacagtgtggcagtggggaagacctatatatcctcacaggcacagtgccctcagactacagagttaaagacaaagtggcagtccctgagtttgtttggctggcagcctgttgtgctgtccctggaggaggctgggccatgggctttgtcaagcacacccgggacagtgacatcatagaagatgtgatggtaaaagatcttcagaaactgcttccatttaaccctcagctgtttcagaacaactgtggtgaaactgagcaagacacagagaaaatgaaaaaaatcctggaagtggttaaccaaatccaggatgaagaacgaatggtacaatctcaaaagagttctagtcccctttctagcaccaggagcaagaggtctactctgttgcctccagaggcatctgagggaagtagtagctttttgggaaaactcatgggcttcattgctaccccattcatcaagctttttcaattaatttattaccttgtggtagcaatcctgaagaacattgtctatttcctgtggtgtgttaccaagcaggtgattaatggcatagaaagttgcctttaccgcctgggctcagccaccatctcatacttcatggccattggggaagagttggtgagcattccctggaaggtgctcaaggtcgtggccaaagtcatcagggctctcctccggatcctttgttgtctgctgaaggccatttgccgagttctgagcatccctgtccgtgtccttgtggatgtggccactttccctgtgtacaccatgggcgctattccaattgtttgcaaggacattgcactgggccttggtggcactgtctcactgctctttgacactgcttttggtaccctgggtggcctatttcaggtggtttttagtgtctgcaagcggattggctacaaggttacttttgacaattctggggagttataaactcaaaaaactaatagtatccagtcacagtgaatttgaaagctggaatagtttgtctttacaatgggtttctgttcactgtcagttatcattatattttggcctttggtggggatgtctgcttgtttttgcaaaagaagatggcagaatttagacttgacagaggagaaatgctcagggtgagattaggtgtagtaatctgctgtttacctccagttatatgtgcaaactcccaagccactaataacttcagttatgcactctaacacagacgaccacctgaaatgcactggtatttatttctgataattaaaaattacaggggagggaagaactagaaaaagaacaactttagaccaaaggtgtctgagaaaaggagaaagggagcttgttcttcccattgctctttgtgatttaaggcaaaacagattaaaaaaaaaatatgcagcc

SEQ ID NO: 332619 - DNA, 4622 bp, Homo sapiens
tgcgtagtgcgctccccgcccagcctgcagagctcgcgccgcggcagcccagccgctcggccccgccgcgctcgcagaggccgccatgggcaccgcgcgctggctcgcgctgggcagcctcttcgccctggctgggctgctggaaggccggctcgtgggcgaggaggaagccggctttggcgaatgtgacaagttcttctacgccgggaccccgcctgcggggctggcggccgattcccacgtgaagatctgtcagcgcgcggagggtgctgagcgcttcgccaccctctacagcacccgggaccgcatccccgtgtactccgcgttccgcgccccgcgccctgcgcccggcggcgccgagcagcgatggctggtggagccgcagatcgatgaccccaacagcaaccttgaggaggcgattaatgaggcagaggccatcacctctgtgaacagcctgggaagcaagcaagccttgaatacagattaccttgattctgattaccaaagaggacagctttacccattctcccttagcagtgatgtccaggtggccacatttactctcacaaattcagccccaatgactcagtccttccaggaacggtggtatgtgaatctccacagcctaatggaccgggctttgaccccacagtgtggcagtggggaagacctatatatcctcacaggcacagtgccctcagactacagagttaaagacaaagtggcagtccctgagtttgtttggctggcagcctgttgtgctgtccctggaggaggctgggccatgggctttgtcaagcacacccgggacagtgacatcatagaagatgtgatggtaaaagatcttcagaaactgcttccatttaaccctcagctgtttcagaacaactgtggtgaaactgagcaagacacagagaaaatgaaaaaaatcctggaagtggttaaccaaatccaggatgaagaacgaatggtacaatctcaaaagaaggtctactctgttgcctccagaggcatctgagggaagtagtagctttttgggaaaactcatgggcttcattgctaccccattcatcaagctttttcaattaatttattaccttgtggtagcaatcctgaagaacattgtctatttcctgtggtgtgttaccaagcaggtgattaatggcatagaaagttgcctttaccgcctgggctcagccaccatctcatacttcatggccattggggaagagttggtgagcattccctggaaggtgctcaaggtcgtggccaaagtcatcagggctctcctccggatcctttgttgtctgctgaaggccatttgccgagttctgagcatccctgtccgtgtccttgtggatgtggccactttccctgtgtacaccatgggcgctattccaattgtttgcaaggacattgcactgggccttggtggcactgtctcactgctctttgacactgcttttggtaccctgggtggcctatttcaggtggtttttagtgtctgcaagcggattggctacaaggttacttttgacaattctggggagttataaactcaaaaaactaatagtatccagtcacagtgaatttgaaagctggaatagtttgtctttacaatgggtttctgttcactgtcagttatcattatattttggcctttggtggggatgtctgcttgtttttgcaaaagaagatggcagaatttagacttgacagaggagaaatgctcagggtgagattaggtgtagtaatctgctgtttacctccagttatatgtgcaaactcccaagccactaataacttcagttatgcactctaacacagacgaccacctgaaatgcactggtatttatttctgataattaaaaattacaggggagggaagaactagaaaaagaacaactttagaccaaaggtgtctgagaaaaggagaaagggagcttgttcttcccattgctctttgtgatttaaggcaaaacagattaaaaaaaaaatatgcagccaatttcttggcatttgcttctctttctcctcaactcgactgaccttggtggaatgcagataatgcctctttgttgaaataactttgtgggaatgtacaattttctatatctcttagctttccgtggttctcaaggatatgtacagttttcattttcctccaaagttgaattttgctacatttttcttttaggtaatgataagcattttttaaaaaatcatttttaggtaatggtaagcattttatgccaaatgtggcataacagagtttgaattgaagggcaaagttttcttttctttttttttttggccccttgaatggtataatacagtcctctccggtggaaagaagagaagagaaggtggacagccctgctcttagtaggtgctgcagatccaaggacatcttttgtccagcttggattaacttgacgtgtatccctgcctgacaaggttgaactgaaagatctatatgttaagctaacatgaaaattcatattctgcaacatagtagatttttctaatgcatgaaataagtacccagcacagtaaaaatactctgacttatgtccctaaatggttgttttgatacaactatatagaaaagagccacaaaataaagataaaagttattgtggccatctctgaaaaaaatatataaaatatttaagaagaattatatcttaggaaattatttttacagtgtgtttgaggctacaaacataactcccccattaatacaaattaaatgtgagagctcattctcaaaatttttttgatcaagcacttgtcattttaaatcttgcactaaaaaatggtaacaagagggaccaaactttgcttcccacaattgggatggaatcacctggatttttctgaatgttttaaagaattgctgagaggtagaaacagccaagtatgaaatactgatcttggggctaccgcccaggatcaatcagaaagttatatgcaaaaattcggggtcccaacaaggagagaacaatatgtcaaccatttgcatggggtcgatggatgagaaacatgagcgtagcaagagttacattttgcagaaaaatagcggaggcacacccagagtagaagagcagccagcaagctgccatcctgatcaatttgtgatgcaaggttagggagtatgagcaccgcatgggtccatgctagggagatgtgcaccaggcttagctaagaaacttaaagcagtattttaccaactcttgtcttagggagcataaagtttggatgtccctttatttcagcagtgtgaaggtaaatggaagggtgagggtttgacttggtactgattggtcaagaatcctgctggataaagaaaaggaattttagaagtgaccagagggacagtccagccaaactattatttgataaggaacccaaggccctgggaggcaacaggctagcccttagtttcatggctagctgagagcagattaggagccaacgttgtttgcacatgtcccatcacacctgagatgtcagacatgggaagttcgtgctattattcagttgcctctctggaccatggcaagatttcctcattcatcaaacagactccaggccctgacaaagcagttggatttggcatgtgtgatgaaaacaattagccatccatgtacaacattatgcttactgcatcccatggaaacttaattccctcctagcacatatttgcatactgaaaggtccgaaaagggcatccacggcagcttgagccccttagcaccatgtaaggagcacagcatccaaacggcttcttgagaaccattggggaatgtctttctttttcacatccaattgtttagtgtctatttattcttgggtggccagttttgaaacctaaaaagggacaataaagcaaaaagtatcagtaaggataggtggctgagacccactgccctgagctactagtgtggctgtgcctgtgggtctctagaaccatctgcattggacgtgaagccacagcaggtggctggactgctggcctgttcctaatgagctacgctgggctttgaggtagaggttggggtttatgaaccccaactctggcttaaagatcttgctgtggctctgttatgttctgaggccttgggattagcctcttcctcattacggagctgattttctagtctgtggatcagctatgcctttggacacttctcttttccattgtgccttttgaatgttgtcttctcactcagcatcagcacttcgatctaaatgcagactagggagttgggaggaggaaccaaagtgaaccatccttcatttattcagtcattcgttcatctgtcaaacacgtatttggacatcaaggttgcagagatgaacaatgcatggatttcatctttgaggagttcaaaacctagtggagagaacacatggtacaatcgtaacacatgaaggacaagtaagtgctgcagtaaaggtactaataacatgttccttggaacagaggaagaaaaaccacgaaaccatggaaattagggaagcctttacagagggtgtgacaaaactcaatttgacattttcaagctatgtacaatgatgtgcaccttgcagatgctcaataaagtaattactgacaa

SEQ ID NO: 332620 - DNA, 4600 bp, Homo sapiens
tgcgtagtgcgctccccgcccagcctgcagagctcgcgccgcggcagcccagccgctcggccccgccgcgctcgcagaggccgccatgggcaccgcgcgctggctcgcgctgggcagcctcttcgccctggctgggctgctggaaggccggctcgtgggcgaggaggaagccggctttggcgaatgtgacaagttcttctacgccgggaccccgcctgcggggctggcggccgattcccacgtgaagatctgtcagcgcgcggagggtgctgagcgcttcgccaccctctacagcacccgggaccgcatccccgtgtactccgcgttccgcgccccgcgccctgcgcccggcggcgccgagcagcgatggctggtggagccgcagatcgatgaccccaacagcaaccttgaggaggcgattaatgaggcagaggccatcacctctgtgaacagcctgggaagcaagcaagccttgaatacagattaccttgattctgattaccaaagaggacagctttacccattctcccttagcagtgatgtccaggtggccacatttactctcacaaattcagccccaatgactcagtccttccaggaacggtggtatgtgaatctccacagcctaatggaccgggctttgaccccacagtgtggcagtggggaagacctatatatcctcacaggcacagtgccctcagactacagagttaaagacaaagtggcagtccctgagtttgtttggctggcagcctgttgtgctgtccctggaggaggctgggccatgggctttgtcaagcacacccgggacagtgacatcatagaagatgtgatggtaaaagatcttcagaaactgcttccatttaaccctcagctgtttcagaacaactgtggtgaaactgagcaagacacagagaaaatgaaaaaaatcctggaagtggttaaccaaatccaggatgaagaacgaatggtacaatctcaaaagagttctagtcccctttctagcaccaggagcaagaggtctactctgttgcctccagaggcatctgagggaagtagtagctttttgggaaaactcatgggcttcattgctaccccattcatcaagctttttcaattaatttattaccttgtggtagcaatcctgaagaacattgtctatttcctgtggtgtgttaccaagcaggtgattaatggcatagaaagttgcctttaccgcctgggctcagccaccatctcatacttcatggccattggggaagagttggtgagcattccctggaaggtgctcaaggtcgtggccaaagtcatcagggctctcctccggatcctttgttgtctgctgaaggccatttgccgagttctgagcatccctgtccgtgtccttgtggatgtggccactttccctgtgtacaccatgggcgctattccaattgtttgcaaggacattgcactgggccttggtggcactgtctcactgctctttgacactgcttttggtaccctgggtggcctatttcaggtggtttttagtgtctgcaagcggattggctacaaggttacttttgacaattctggggagttataaactcaaaaaactaatagtatccagtcacagtgaatttgaaagctggaatagtttgtctttacaatgggtttctgttcactgtcagttatcattatattttggcctttggtggggatgtctgcttgtttttgcaaaagaagatggcagaatttagacttgacagaggagaaatgctcagggtgagattaggtgtagtaatctgctgtttacctccagttatatgtgcaaactcccaagccactaataacttcagttatgcactctaacacagacgaccacctgaaatgcactggtatttatttctgataattaaaaattacaggggagggaagaactagaaaaagaacaactttagaccaaaggtgtctgagaaaaggagaaagggagcttgttcttcccattgctctttgtgatttaaggcaaaacagattaaaaaaaaaatatgcagccaatttcttggcatttgcttctctttctcctcaactcgactgaccttggtggaatgcagataatgcctctttgttgaaataactttgtgggaatgtacaattttctatatctcttagctttccgtggttctcaaggatatgtacagttttcattttcctccaaagttgaattttgctacatttttcttttaggtaatgataagcattttttaaaaaatcatttttaggtaatggtaagcattttatgccaaatgtggcataacagagtttgaattgaagggcaaagttttcttttctttttttttttggccccttgaatggtataatacagtcctctccggtggaaagaagagaagagaaggtggacagccctgctcttagtaggtgctgcagatccaaggacatcttttgtccagcttggattaacttgacgtgtatccctgcctgacaaggttgaactgaaagatctatatgttaagctaacatgaaaattcatattctgcaacatagtagatttttctaatgcatgaaataagtacccagcacagtaaaaatactctgacttatgtccctaaatggttgttttgatacaactatatagaaaagagccacaaaataaagataaaagttattgtggccatctctgaaaaaaatatataaaatatttaagaagaattatatcttaggaaattatttttacagtgtgtttgaggctacaaacataactcccccattaatacaaattaaatgtgagagctcattctcaaaatttttttgatcaagcacttgtcattttaaatcttgcactaaaaaatggtaacaagagggaccaaactttgcttcccacaattgggatggaatcacctggatttttctgaatgttttaaagaattgctgagaggtagaaacagccaagtatgaaatactgatcttggggctaccgcccaggatcaatcagaaagttatatgcaaaaattcggggtcccaacaaggagagaacaatatgtcaaccatttgcatggggtcgatggatgagaaacatgagcgtagcaagagttacattttgcagaaaaatagcggaggcacacccagagtagaagagcagccagcaagctgccatcctgatcaatttgtgatgcaaggttagggagtatgagcaccgcatgggtccatgctagggagatgtgcaccaggcttagctaagaaacttaaagcagtattttaccaactcttgtcttagggagcataaagtttggatgtccctttatttcagcagtgtgaaggtaaatggaagggtgagggtttgacttggtactgattggtcaagaatcctgctggataaagaaaaggaattttagaagtgaccagagggacagtccagccaaactattatttgataaggaacccaaggccctgggaggcaacaggctagcccttagtttcatggctagctgagagcagattaggagccaacgttgtttgcacatgtcccatcacacctgagatgtcagacatgggaagttcgtgctattattcagttgcctctctggaccatggcaagatttcctcattcatcaaacagactccaggccctgacaaagcagttggatttggcatgtgtgatgaaaacaattagccatccatgtacaacattatgcttactgcatcccatggaaacttaattccctcctagcacatatttgcatactgaaaggtccatccaaacggcttcttgagaaccattggggaatgtctttctttttcacatccaattgtttagtgtctatttattcttgggtggccagttttgaaacctaaaaagggacaataaagcaaaaagtatcagtaaggataggtggctgagacccactgccctgagctactagtgtggctgtgcctgtgggtctctagaaccatctgcattggacgtgaagccacagcaggtggctggactgctggcctgttcctaatgagctacgctgggctttgaggtagaggttggggtttatgaaccccaactctggcttaaagatcttgctgtggctctgttatgttctgaggccttgggattagcctcttcctcattacggagctgattttctagtctgtggatcagctatgcctttggacacttctcttttccattgtgccttttgaatgttgtcttctcactcagcatcagcacttcgatctaaatgcagactagggagttgggaggaggaaccaaagtgaaccatccttcatttattcagtcattcgttcatctgtcaaacacgtatttggacatcaaggttgcagagatgaacaatgcatggatttcatctttgaggagttcaaaacctagtggagagaacacatggtacaatcgtaacacatgaaggacaagtaagtgctgcagtaaaggtactaataacatgttccttggaacagaggaagaaaaaccacgaaaccatggaaattagggaagcctttacagagggtgtgacaaaactcaatttgacattttcaagctatgtacaatgatgtgcaccttgcagatgctcaataaagtaattactgacaa

SEQ ID NO: 332621 - DNA, 4229 bp, Homo sapiens
tgcgtagtgcgctccccgcccagcctgcagagctcgcgccgcggcagcccagccgctcggccccgccgcgctcgcagaggccgccatgggcaccgcgcgctggctcgcgctgggcagcctcttcgccctggctgggctgctggaaggccggctcgtgggcgaggaggaagccggctttggcgaatgtgacaagttcttctacgccgggaccccgcctgcggggctggcggccgattcccacgtgaagatctgtcagcgcgcggagggtgctgagcgcttcgccaccctctacagcacccgggaccgcatccccgtgtactccgcgttccgcgccccgcgccctgcgcccggcggcgccgagcagcgatggctggtggagccgcagatcgatgaccccaacagcaaccttgaggaggcgattaatgaggcagaggccatcacctctgtgaacagcctgggaagcaagcaagccttgaatacagattaccttgattctgattaccaaagaggacagctttacccattctcccttagcagtgatgtccaggtggccacatttactctcacaaattcagccccaatgactcagtccttccaggaacggtggtatgtgaatctccacagcctaatggaccgggctttgaccccacagtgtggcagtggggaagacctatatatcctcacaggcacagtgccctcagactacagagttaaagacaaagtggcagtccctgagtttgtttggctggcagcctgttgtgctgtccctggaggaggctgggccatgggctttgtcaagcacacccgggacagtgacatcatagaagatgtgatggtaaaagatcttcagaaactgcttccatttaaccctcagctgtttcagaacaactgtggtgaaactgagcaagacacagagaaaatgaaaaaaatcctggaagtggttaaccaaatccaggatgaagaacgaatggtacaatctcaaaagagttctagtcccctttctagcaccaggagcaagaggtctactctgttgcctccagaggcatctgagggaagtagtagctttttgggaaaactcatgggcttcattgctaccccattcatcaagctttttcaattaatttattaccttgtggtagcaatcctgaagaacattgtctatttcctgtggtgtgttaccaagcaggtgattaatggcatagaaagttgcctttaccgcctgggctcagccaccatctcatacttcatggccattggggaagagttggtgagcattccctggaaggtgctcaaggtcgtggccaaagtcatcagggctctcctccggatcctttgttgtctgctgaaggccatttgccgagttctgagcatccctgtccgtgtccttgtggatgtggccactttccctgtgtacaccatgggcgctattccaattgtttgcaaggacattgcactgggccttggtggcactgtctcactgctctttgacactgcttttggtaccctgggtggcctatttcaggtggtttttagtgtctgcaagcggattggctacaaggttacttttgacaattctggggagttataaactcaaaaaactaatagtatccagtcacagtgaatttgaaagctggaatagtttgtctttacaatgggtttctgttcactgtcagttatcattatattttggcctttggtggggatgtctgcttgtttttgcaaaagaagatggcagaatttagacttgacagaggagaaatgctcagggtgagattaggtgtagtaatctgctgtttacctccagttatatgtgcaaactcccaagccactaataacttcagttatgcactctaacacagacgaccacctgaaatgcactggtatttatttctgataattaaaaattacaggggagggaagaactagaaaaagaacaactttagaccaaaggtgtctgagaaaaggagaaagggagcttgttcttcccattgctctttgtgatttaaggcaaaacagattaaaaaaaaaatatgcagccaatttcttggcatttgcttctctttctcctcaactcgactgaccttggtggaatgcagataatgcctctttgttgaaataactttgtgggaatgtacaattttctatatctcttagctttccgtggttctcaaggatatgtacagttttcattttcctccaaagttgaattttgctacatttttcttttaggtaatgataagcattttttaaaaaatcatttttaggtaatggtaagcattttatgccaaatgtggcataacagagtttgaattgaagggcaaagttttcttttctttttttttttggccccttgaatggtataatacagtcctctccggtggaaagaagagaagagaaggtggacagccctgctcttagtaggtgctgcagatccaaggacatcttttgtccagcttggattaacttgacgtgtatccctgcctgacaaggttgaactgaaagatctatatgttaagctaacatgaaaattcatattctgcaacatagtagatttttctaatgcatgaaataagtacccagcacagtaaaaatactctgacttatgtccctaaatggttgttttgatacaactatatagaaaagagccacaaaataaagataaaagttattgtggccatctctgaaaaaaatatataaaatatttaagaagaattatatcttaggaaattatttttacagtgtgtttgaggctacaaacataactcccccattaatacaaattaaatgtgagagctcattctcaaaatttttttgatcaagcacttgtcattttaaatcttgcactaaaaaatggtaacaagagggaccaaactttgcttcccacaattgggatggaatcacctggatttttctgaatgttttaaagaattgctgagaggtagaaacagccaagtatgaaatactgatcttggggctaccgcccaggatcaatcagaaagttatatgcaaaaattcggggtcccaacaaggagagaacaatatgtcaaccatttgcatggggtcgatggatgagaaacatgagcgtagcaagagttacattttgcagaaaaatagcggaggcacacccagagtagaagagcagccagcaagctgccatcctgatcaatttgtgatgcaaggttagggagtatgagcaccgcatgggtccatgctagggagatgtgcaccaggcttagctaagaaacttaaagcagtattttaccaactcttgtcttagggagcataaagtttggatgtccctttatttcagcagtgtgaaggtaaatggaagggtgagggtttgacttggtactgattggtcaagaatcctgctggataaagaaaaggaattttagaagtgaccagagggacagtccagccaaactattatttgataaggaacccaaggccctgggaggcaacaggctagcccttagtttcatggctagctgagagcagattaggagccaacgttgtttgcacatgtcccatcacacctgagatgtcagacatgggaagttcgtgctattattcagttgcctctctggaccatggcaagatttcctcattcatcaaacagactccaggccctgacaaagcagttggatttggcatgtgtgatgaaaacaattagccatccatgtacaacattatgcttactgcatcccatggaaacttaattccctcctagcacatatttgcatactgaaaggtccgaaaagggcatccacggcagcttgagccccttagcaccatgtaaggagcacagcatccaaacggcttcttgagaaccattggggaatgtctttctttttcacatccaattgtttagtgtctatttattcttgggtggccagttttgaaacctaaaaagggacaataaagcaaaaagtatcagtaaggataggtggctgagacccactgccctgagctactagtgtggctgtgcctgtgggtctctagaaccatctgcattggacgtgaagccacagcaggtggctggactgctggcctgttcctaatgagctacgctgggctttgaggtagaggttggggtttatgaaccccaactctggcttaaagatcttgctgtggctctgttatgttctgaggccttgggattagcctcttcctcatgataccacaaggcacgacgatgtgttaaacagacggccatgtccaagaaccac

SEQ ID NO: 332622 - DNA, 4152 bp, Homo sapiens
  misc_feature (4147)..(4147): n is a, c, g, or t
tgcgtagtgcgctccccgcccagcctgcagagctcgcgccgcggcagcccagccgctcggccccgccgcgctcgcagaggccgccatgggcaccgcgcgctggctcgcgctgggcagcctcttcgccctggctgggctgctggaaggccggctcgtgggcgaggaggaagccggctttggcgaatgtgacaagttcttctacgccgggaccccgcctgcggggctggcggccgattcccacgtgaagatctgtcagcgcgcggagggtgctgagcgcttcgccaccctctacagcacccgggaccgcatccccgtgtactccgcgttccgcgccccgcgccctgcgcccggcggcgccgagcagcgatggctggtggagccgcagatcgatgaccccaacagcaaccttgaggaggcgattaatgaggcagaggccatcacctctgtgaacagcctgggaagcaagcaagccttgaatacagattaccttgattctgattaccaaagaggacagctttacccattctcccttagcagtgatgtccaggtggccacatttactctcacaaattcagccccaatgactcagtccttccaggaacggtggtatgtgaatctccacagcctaatggaccgggctttgaccccacagtgtggcagtggggaagacctatatatcctcacaggcacagtgccctcagactacagagttaaagacaaagtggcagtccctgagtttgtttggctggcagcctgttgtgctgtccctggaggaggctgggccatgggctttgtcaagcacacccgggacagtgacatcatagaagatgtgatggtaaaagatcttcagaaactgcttccatttaaccctcagctgtttcagaacaactgtggtgaaactgagcaagacacagagaaaatgaaaaaaatcctggaagtggttaaccaaatccaggatgaagaacgaatggtacaatctcaaaagagttctagtcccctttctagcaccaggagcaagaggtctactctgttgcctccagaggcatctgagggaagtagtagctttttgggaaaactcatgggcttcattgctaccccattcatcaagctttttcaattaatttattaccttgtggtagcaatcctgaagaacattgtctatttcctgtggtgtgttaccaagcaggtgattaatggcatagaaagttgcctttaccgcctgggctcagccaccatctcatacttcatggccattggggaagagttggtgagcattccctggaaggtgctcaaggtcgtggccaaagtcatcagggctctcctccggatcctttgttgtctgctgaaggccatttgccgagttctgagcatccctgtccgtgtccttgtggatgtggccactttccctgtgtacaccatgggcgctattccaattgtttgcaaggacattgcactgggccttggtggcactgtctcactgctctttgacactgcttttggtaccctgggtggcctatttcaggtggtttttagtgtctgcaagcggattggctacaaggttacttttgacaattctggggagttataaactcaaaaaactaatagtatccagtcacagtgaatttgaaagctggaatagtttgtctttacaatgggtttctgttcactgtcagttatcattatattttggcctttggtggggatgtctgcttgtttttgcaaaagaagatggcagaatttagacttgacagaggagaaatgctcagggtgagattaggtgtagtaatctgctgtttacctccagttatatgtgcaaactcccaagccactaataacttcagttatgcactctaacacagacgaccacctgaaatgcactggtatttatttctgataattaaaaattacaggggagggaagaactagaaaaagaacaactttagaccaaaggtgtctgagaaaaggagaaagggagcttgttcttcccattgctctttgtgatttaaggcaaaacagattaaaaaaaaaatatgcagccaatttcttggcatttgcttctctttctcctcaactcgactgaccttggtggaatgcagataatgcctctttgttgaaataactttgtgggaatgtacaattttctatatctcttagctttccgtggttctcaaggatatgtacagttttcattttcctccaaagttgaattttgctacatttttcttttaggtaatgataagcattttttaaaaaatcatttttaggtaatggtaagcattttatgccaaatgtggcataacagagtttgaattgaagggcaaagttttcttttctttttttttttggccccttgaatggtataatacagtcctctccggtggaaagaagagaagagaaggtggacagccctgctcttagtaggtgctgcagatccaaggacatcttttgtccagcttggattaacttgacgtgtatccctgcctgacaaggttgaactgaaagatctatatgttaagctaacatgaaaattcatattctgcaacatagtagatttttctaatgcatgaaataagtacccagcacagtaaaaatactctgacttatgtccctaaatggttgttttgatacaactatatagaaaagagccacaaaataaagataaaagttattgtggccatctctgaaaaaaatatataaaatatttaagaagaattatatcttaggaaattatttttacagtgtgtttgaggctacaaacataactcccccattaatacaaattaaatgtgagagctcattctcaaaatttttttgatcaagcacttgtcattttaaatcttgcactaaaaaatggtaacaagagggaccaaactttgcttcccacaattgggatggaatcacctggatttttctgaatgttttaaagaattgctgagaggtagaaacagccaagtatgaaatactgatcttggggctaccgcccaggatcaatcagaaagttatatgcaaaaattcggggtcccaacaaggagagaacaatatgtcaaccatttgcatggggtcgatggatgagaaacatgagcgtagcaagagttacattttgcagaaaaatagcggaggcacacccagagtagaagagcagccagcaagctgccatcctgatcaatttgtgatgcaaggttagggagtatgagcaccgcatgggtccatgctagggagatgtgcaccaggcttagctaagaaacttaaagcagtattttaccaactcttgtcttagggagcataaagtttggatgtccctttatttcagcagtgtgaaggtaaatggaagggtgagggtttgacttggtactgattggtcaagaatcctgctggataaagaaaaggaattttagaagtgaccagagggacagtccagccaaactattatttgataaggaacccaaggccctgggaggcaacaggctagcccttagtttcatggctagctgagagcagattaggagccaacgttgtttgcacatgtcccatcacacctgagatgtcagacatgggaagttcgtgctattattcagttgcctctctggaccatggcaagatttcctcattcatcaaacagactccaggccctgacaaagcagttggatttggcatgtgtgatgaaaacaattagccatccatgtacaacattatgcttactgcatcccatggaaacttaattccctcctagcacatatttgcatactgaaaggtccgaaaagggcatccacggcagcttgagccccttagcaccatgtaaggagcacagcatccaaacggcttcttgagaaccattggggaatgtctttctttttcacatccaattgtttagtgtctatttattcttgggtggccagttttgaaacctaaaaagggacaataaagcaaaaagtatcagtaaggataggtggctgagacccactgccctgagctactagtgtggctgtgcctgtgggtctctagaaccatctgcattggacgtgaagccacagcaggtggctggactgctggcctgttcctaatgagctacgctgggctttgaggtagagggttaaagggggtggttcctccctctattatcatttttgtctttcccactttttttatntatta

SEQ ID NO: 332623 - DNA, 4029 bp, Homo sapiens
  misc_feature (3704)..(3704): n is a, c, g, or t
  misc_feature (3824)..(3825): n is a, c, g, or t
tgcgtagtgcgctccccgcccagcctgcagagctcgcgccgcggcagcccagccgctcggccccgccgcgctcgcagaggccgccatgggcaccgcgcgctggctcgcgctgggcagcctcttcgccctggctgggctgctggaaggccggctcgtgggcgaggaggaagccggctttggcgaatgtgacaagttcttctacgccgggaccccgcctgcggggctggcggccgattcccacgtgaagatctgtcagcgcgcggagggtgctgagcgcttcgccaccctctacagcacccgggaccgcatccccgtgtactccgcgttccgcgccccgcgccctgcgcccggcggcgccgagcagcgatggctggtggagccgcagatcgatgaccccaacagcaaccttgaggaggcgattaatgaggcagaggccatcacctctgtgaacagcctgggaagcaagcaagccttgaatacagattaccttgattctgattaccaaagaggacagctttacccattctcccttagcagtgatgtccaggtggccacatttactctcacaaattcagccccaatgactcagtccttccaggaacggtggtatgtgaatctccacagcctaatggaccgggctttgaccccacagtgtggcagtggggaagacctatatatcctcacaggcacagtgccctcagactacagagttaaagacaaagtggcagtccctgagtttgtttggctggcagcctgttgtgctgtccctggaggaggctgggccatgggctttgtcaagcacacccgggacagtgacatcatagaagatgtgatggtaaaagatcttcagaaactgcttccatttaaccctcagctgtttcagaacaactgtggtgaaactgagcaagacacagagaaaatgaaaaaaatcctggaagtggttaaccaaatccaggatgaagaacgaatggtacaatctcaaaagagttctagtcccctttctagcaccaggagcaagaggtctactctgttgcctccagaggcatctgagggaagtagtagctttttgggaaaactcatgggcttcattgctaccccattcatcaagctttttcaattaatttattaccttgtggtagcaatcctgaagaacattgtctatttcctgtggtgtgttaccaagcaggtgattaatggcatagaaagttgcctttaccgcctgggctcagccaccatctcatacttcatggccattggggaagagttggtgagcattccctggaaggtgctcaaggtcgtggccaaagtcatcagggctctcctccggatcctttgttgtctgctgaaggccatttgccgagttctgagcatccctgtccgtgtccttgtggatgtggccactttccctgtgtacaccatgggcgctattccaattgtttgcaaggacattgcactgggccttggtggcactgtctcactgctctttgacactgcttttggtaccctgggtggcctatttcaggtggtttttagtgtctgcaagcggattggctacaaggttacttttgacaattctggggagttataaactcaaaaaactaatagtatccagtcacagtgaatttgaaagctggaatagtttgtctttacaatgggtttctgttcactgtcagttatcattatattttggcctttggtggggatgtctgcttgtttttgcaaaagaagatggcagaatttagacttgacagaggagaaatgctcagggtgagattaggtgtagtaatctgctgtttacctccagttatatgtgcaaactcccaagccactaataacttcagttatgcactctaacacagacgaccacctgaaatgcactggtatttatttctgataattaaaaattacaggggagggaagaactagaaaaagaacaactttagaccaaaggtgtctgagaaaaggagaaagggagcttgttcttcccattgctctttgtgatttaaggcaaaacagattaaaaaaaaaatatgcagccaatttcttggcatttgcttctctttctcctcaactcgactgaccttggtggaatgcagataatgcctctttgttgaaataactttgtgggaatgtacaattttctatatctcttagctttccgtggttctcaaggatatgtacagttttcattttcctccaaagttgaattttgctacatttttcttttaggtaatgataagcattttttaaaaaatcatttttaggtaatggtaagcattttatgccaaatgtggcataacagagtttgaattgaagggcaaagttttcttttctttttttttttggccccttgaatggtataatacagtcctctccggtggaaagaagagaagagaaggtggacagccctgctcttagtaggtgctgcagatccaaggacatcttttgtccagcttggattaacttgacgtgtatccctgcctgacaaggttgaactgaaagatctatatgttaagctaacatgaaaattcatattctgcaacatagtagatttttctaatgcatgaaataagtacccagcacagtaaaaatactctgacttatgtccctaaatggttgttttgatacaactatatagaaaagagccacaaaataaagataaaagttattgtggccatctctgaaaaaaatatataaaatatttaagaagaattatatcttaggaaattatttttacagtgtgtttgaggctacaaacataactcccccattaatacaaattaaatgtgagagctcattctcaaaatttttttgatcaagcacttgtcattttaaatcttgcactaaaaaatggtaacaagagggaccaaactttgcttcccacaattgggatggaatcacctggatttttctgaatgttttaaagaattgctgagaggtagaaacagccaagtatgaaatactgatcttggggctaccgcccaggatcaatcagaaagttatatgcaaaaattcggggtcccaacaaggagagaacaatatgtcaaccatttgcatggggtcgatggatgagaaacatgagcgtagcaagagttacattttgcagaaaaatagcggaggcacacccagagtagaagagcagccagcaagctgccatcctgatcaatttgtgatgcaaggttagggagtatgagcaccgcatgggtccatgctagggagatgtgcaccaggcttagctaagaaacttaaagcagtattttaccaactcttgtcttagggagcataaagtttggatgtccctttatttcagcagtgtgaaggtaaatggaagggtgagggtttgacttggtactgattggtcaagaatcctgctggataaagaaaaggaattttagaagtgaccagagggacagtccagccaaactattatttgataaggaacccaaggccctgggaggcaacaggctagcccttagtttcatggctagctgagagcagattaggagccaacgttgtttgcacatgtcccatcacacctgagatgtcagacatgggaagttcgtgctattattcagttgcctctctggaccatggcaagatttcctcattcatcaaacagactccaggccctgacaaagcagttggatggccgggtatgaaccagtgcctcctgtacaacttggtctggccagggacatatcctnagaaattggctgaagggcccaggcacagggtgccctaccttggacacaaggtgaacggagcgtcaccacggacaaagcgcgccgcacataggctcccttttcttgatatgaacactttcnncgccacgcggagaggcacaaacaggccgacgacgcgacgagcgcccccgcaacgacccagaccagacgcaacgacgaaaccgaggagccccgacgcgaccaagcaagcagggagaacaaacgcaaggaaggagacgggagaacagccaaccagaacacaacgcaaccacaacgaagagacaagccagacaggagcccaccacgc

SEQ ID NO: 332624 - DNA, 207 bp, Homo sapiens
gaacctctttccctagctcttagatggcacctaccgtgtgccaggtactgggctaaatgcttcgtgcgtaccacaaccctgcaggtagttaccattattatactcattctccagaaggggaaactgaggcacaaggaacatgcactgtcttacggttatctagtggcagagacaggacccacaccatctggcttcagagtccaagct

SEQ ID NO: 332625 - DNA, 282 bp, Homo sapiens
gtattgagtcttatttgtctattcagtgaatatttggataccaactctgctgttctgggcatgatgttagccactggggagacagaaggaatgaaagagatgagtaacctaatgtgtgctgtctagtggggactgcaaataaagtgggtgttaccactagcgtgctctacagtgttatgctagagagaaatttacttcctttggccactcacttccttgtttttaaataagaactgagttaaagttgctaactgtgaagactgagtaatttgaatctgctgt

SEQ ID NO: 332626 - DNA, 1124 bp, Homo sapiens
cttcttgttgtacttcttcgtacggtgttcctcggtcttgtcgtccgctttccttcttttccttttttcttgtcgttctctgttatgtttagtgtgtgtcgccccccagggggggggctcttcttttgtattttgctgcctccctctttgggcaccccccttgttggtgatgggttcccccctctgtgtgcccctcccgagtctcctctcttcggggtgtttttcaccaaacccctcgctggtggtgcccccgcgcgggctttttatatgtggtggagagagatcccccgccccgttgtactcttccccggtggtctccccttggaccccctcctgtggccactgcttgctcctcttcctccgtgggcgcccccggcgcccccaccccgggtgttgtttctgaaaaccttcttctcagggcccagcgccgctcgcgcagcaaacggttttgtttttttttttttttgttttttttttttaattttttttttttttttttttttttttattttcaattgtctggtgtttccagcttttattggctcttgtcgaaatcaaattggaagatcttcagtcccagctgcacccaacgtggaaaagtattccaggtccatccccaaggaaccaacaccgatgacatggactcaggaatcttataacctacgtggactctttccatccgtacattgtcgtgcacatgccactcatcacctggcgtgcccagatcctcgcagggcaacaccctgtgataattccaggtgattctctacatctgcagcttgaggttagcctcatatcacattacattctcactagaaacaaaacaaaaatgaaatacttaaaacatctaccagaacagaattaggactggaaagcagcggtcttagctgacaaacaagttgtgccatctgagactcatgggagtaaatctcctctttcatagtaaaatctcattacagaatgttccttgactttggcaatttttctgggtcacaagcaagaaaaaaacataagcaggcggagagagctcgccctgccacctggggcttgtgtgtcagcagctccagagaggaattgggatgtgaaaagttcagccaaaatagaaagaattaacatttttgcta

SEQ ID NO: 332627 - DNA, 306 bp, Homo sapiens
tgcggtgattgaaaaaggaagcatgattcctggagcatagcatacctcattccaggtattagtcatagacttgtgcatccaaagagccacatagtctgacatccttcagtttctccagttcctttctccagaatcagtgaggcccaaattctacttaagaacaaaatggatttgcatatacaatagggtcactcaacaggtaatgaaataatgggattgtaaaataattcagaaggaccacctggtcaccttttctctcttgtattttatcctctcctcttacagctctgtgtccagatgtggtag

SEQ ID NO: 332628 - DNA, 3874 bp, Homo sapiens
ccaaagatgggttttgtctgcgggtgatttgggctctcgaagtgcaactttgtggccgggacgcggatcggccggcctgggctcctgcagagcagatcctgtctgcgtcctccaggaggagtgggtggcaggactggggtttcccacaggttttggggcggcggcgagattggcacggtccggggtcgcaggcgcgcagccacgcccctggaagtccgccccggcccccgcccccaacccgcctcttcggggctttatggcgtgaggtttggggctgggatccatctggagccgagcagaaaacttttcccctcccgttcccggtcccttttgtctttcttggacgcggtggcggcgccgcctgagcggcgactccctctcccctgcccggcttgctgcgcccggtgccctccgagggcaggcgcgcctggactctgcgcccggatggcggcggccctctgtgagcaccggcagcggcgcatcccctgccccgaggcctccggtgcccccccggcgcgggcataggggcgcccccaccctccgtccgcttgcaccccttgccacccgccccctcgcctgactcatccgcccgcggtggccgcccgagccctgggatggggagggagaccgcggctgcccgcggcggccgagattcccgctgacgcccccgaccctgccgccttcttcgtccgcctccagaggcgcccgacgtcccgacagctcctggagtgagaccaggactgagaacagggagaggcgacccgacccccagggcccggtgctcaggacagcacacagagccgctgaaaacgactgaagagagcaagggatttcctgggacatctggctctggagagtaaaaggccaagctatgatagcaactggtggagtgataactggcctggccgccttgaaaaggcaagactctgccagatcacagcagcatgtcaacctcagcccgtctcctgctacccaagagaagaagcccatcaggcgccggccccgggcagatgttgtggttgttcgtggcaaaatccggctttattccccatctggtttttttcttattttaggagtgctcatctccattataggaattgctatggccgttcttggatattggccccaaaaagaacattttattgatgctgaaacaacactgtcaacaaatgaaactcaggtcattcggaatgaaggcggtgtggtggttcgcttctttgagcagcatttgcattctgataagatgaaaatgcttggcccattcaccatggggattggcattttcattttcatttgtgctaatgccattcttcatgaaaaccgtgacaaagagaccaaaatcatacacatgagggatatctattccacagtcattgacattcacacgctaagaatcaaggagcaaaggcaaatgaacggcatgtacactggtttgatgggagaaacagaagtaaaacagaatgggagctcctgtgcctcgagattggcagcaaatacgatcgcctctttctcgggttttcggagcagttttcgaatggacagctccgtggaggaggatgaacttatgttaaatgaaggtaagagttctgggcatcttatgccccctttgctctctgacagctctgtgtctgtctttggcctctatccacctccttccaagacaactgatgataagaccagcggctctaagaaatgtgaaaccaagtcaattgtgtcatcgtccatcagtgcttttacattgcctgtgatcaaacttaataactgtgttattgatgagcccagtatagataacatcactgaagatgctgacaacctcaaaagtaggtcaaggaatttgtcaatggattcccttgtggttcctttgcccaacaccagtgaatccttccagcccgtcagcacagtgctaccaaggaataattccattggggagtcgttgtcgagtcagtacaagtcatctatggctctcggacctggggctggacagctcttgtctcctggggctgccagaagacagtttgggtccaatacatccttgcatttgctctcgtcacactcaaagtccttggacttagaccggggtccctccactctaactgttcaggcagaacaacggaaacatccaagttggcctaggttggatcggaacaacagcaagggatatatgaaactagagaacaaagaagacccgatggataggttgcttgtgccccaagttgccatcaaaaaggactttaccaataaggagaagcttcttatgatttcaagatctcacaataatttgagttttgaacatgatgagtttttgagtaacaacctaaagaggggaacttctgaaacaaggttttaatgttaaaagaatatatcattttacaagggtatatattttaaaacgattttcactggtgtttccttcttaaagtattggctgtaagcctttttaatcaaatggtttgtagtgtattagaattggctgcttagttctgtaatgaagatggttgtatgtttgggttacttgtgactgcagtactctatgttaccacacatgattttatttttctcttcctttgaaagcatgatctcttttattaatatgaatgcaaaatgcttgcatccaaattaaagcttattttctttacttttaagttctttgattgccctattcataaaatgaaatgtccagtatggaaaacatagggtaccaaagtgtggaccaggagtacaaattcagtcccaatactcaatacgtattatagatgactatgagtgcaaaccttaggatgtgattttctgaataattgttctttgtaggatttggttacattatttaaaatgaaaaagatctagttttagtgtgagctcagtaatgttaattggttaagttcattgtgaatcttgagttttagataagtagttatttttttcaatatcacttctgtttttagtgatattatatcaagaaacaacgtattcaagagccatggctgacagtgccagatatacttagggataaacatcaaaatgcaattatagttgctataacgttagatactcggaatcaaaatttatttgcaagctgacttgataaactaaatgaaccaataaaatttgtagaaatgctatcctgaaataattatatacatgaagacaatgttgactaatgaattaagatacattatatactagttaatgctaactagtctcagtacctgtttttagccatctgttactgtccaatagcacctcattcccacattctattttcccccggtattctttagatcctagtatttggaaaacaatcggctaaccttgacatttctttttaccttcatatgccactatctcggtagttcaaaaaaatttagttcttgataaattgccttgaagtttaccttgtgctggagagccttatgataactccaaagactttcttacggtataatacatgttgtttaggattgtgtttcttagtcactgaagataataaatattaaaatggatgttttcatcagaaaattttcatgttttcctttaaggtaacataattgtaagaattgtttaataaaatactcaggaaattctaaaggtttctcccaatacctaaacatttctgaacatcagtattgcagttgtggaagagcagaaggaggatacatttgtttgtgttgctccccaaaattccaccttgcatttgcatcacaaacttccctcaattgaggcagttttctttgttagaacattaagtctgtgtattgtaatagagtgggctcaatattttactataaagcatttaataaactgttattaatagaagtttgtgttcttcacacctttgctattgctttttaaataaaatgtacatttctgcttaaag

SEQ ID NO: 332629 - DNA, 589 bp, Homo sapiens
tgcccccagagcaataaagtcagctggctttctcaaaaaaaaaaaaaaaaaaaaaaaaaacgtagttcaaaaaaatttagttcttgataaattgccttgaagtttaccttgtgctggagagccttatgataactccaaagactttcttacggtataatacatgttgtttaggattgtgtttcttagtcactgaagataataaatattaaaatggatgttttcatcagaaaattttcatgttttcctttaaggtaacataattgtaagaattgtttaataaaatactcaggaaattctaaaggtttctcccaatacctaaacatttctgaacatcagtattgcagttgtggaagagcagaaggaggatacatttgtttgtgttgctccccaaaattccaccttgcatttgcatcacaaacttccctcaattgaggcagttttctttgttagaacattaagtctgtgtattgtaatagagtgggctcaatattttactataaagcatttaataaactgttattaatagaagtttgtgttcttcacacctttgctattgctttttaaataaaatgtacatttctgcttaaag

SEQ ID NO: 332630 - DNA, 3343 bp, Homo sapiens
ccaaagatgggttttgtctgcgggtgatttgggctctcgaagtgcaactttgtggccgggacgcggatcggccggcctgggctcctgcagagcagatcctgtctgcgtcctccaggaggagtgggtggcaggactggggtttcccacaggttttggggcggcggcgagattggcacggtccggggtcgcaggcgcgcagccacgcccctggaagtccgccccggcccccgcccccaacccgcctcttcggggctttatggcgtgaggtttggggctgggatccatctggagccgagcagaaaacttttcccctcccgttcccggtcccttttgtctttcttggacgcggtggcggcgccgcctgagcggcgactccctctcccctgcccggcttgctgcgcccggtgccctccgagggcaggcgcgcctggactctgcgcccggatggcggcggccctctgtgagcaccggcagcggcgcatcccctgccccgaggcctccggtgcccccccggcgcgggcataggggcgcccccaccctccgtccgcttgcaccccttgccacccgccccctcgcctgactcatccgcccgcggtggccgcccgagccctgggatggggagggagaccgcggctgcccgcggcggccgagattcccgctgacgcccccgaccctgccgccttcttcgtccgcctccagaggcgcccgacgtcccgacagctcctggagtgagaccaggactgagaacagggagaggcgacccgacccccagggcccggtgctcaggacagcacacagagccgctgaaaacgactgaagagagcaagggatttcctgggacatctggctctggagagtaaaaggccaagctatgatagcaactggtggagtgataactggcctggccgccttgaaaaggcaagactctgccagatcacagcagcatgtcaacctcagcccgtctcctgctacccaagagaagaagcccatcaggcgccggccccgggcagatgttgtggttgttcgtggcaaaatccggctttattccccatctggtttttttcttattttaggagtgctcatctccattataggaattgctatggccgttcttggatattggccccaaaaagaacattttattgatgctgaaacaacactgtcaacaaatgaaactcaggtcattcggaatgaaggcggtgtggtggttcgcttctttgagcagcatttgcattctgataagatgaaaatgcttggcccattcaccatggggattggcattttcattttcatttgtgctaatgccattcttcatgaaaaccgtgacaaagagaccaaaatcatacacatgagggatatctattccacagtcattgacattcacacgctaagaatcaaggagcaaaggcaaatgaacggcatgtacactggtttgatgggagaaacagaagtaaaacagaatgggagctcctgtgcctcgagattggcagcaaatacgatcgcctctttctcgggttttcggagcagttttcgaatggacagctccgtggaggaggatgaacttatgttaaatgaaggtaagagttctgggcatcttatgccccctttgctctctgacagctctgtgtctgtctttggcctctatccacctccttccaagacaactgatgataagaccagcggctctaagaaatgtgaaaccaagtcaattgtgtcatcgtccatcagtgcttttacattgcctgtgatcaaacttaataactgtgttattgatgagcccagtatagataacatcactgaagatgctgacaacctcaaaagtaggtcaaggaatttgtcaatggattcccttgtggttcctttgcccaacaccagtgaatccttccagcccgtcagcacagtgctaccaaggaataattccattggggagtcgttgtcgagtcagtacaagtcatctatggctctcggacctggggctggacagctcttgtctcctggggctgccagaagacagtttgggtccaatacatccttgcatttgctctcgtcacactcaaagtccttggacttagaccggggtccctccactctaactgttcaggcagaacaacggaaacatccaagttggcctaggttggatcggaacaacagcaagggatatatgaaactagagaacaaagaagacccgatggataggttgcttgtgccccaagttgccatcaaaaaggactttaccaataaggagaagcttcttatgatttcaagatctcacaataatttgagttttgaacatgatgagtttttgagtaacaacctaaagaggggaacttctgaaacaaggttttaatgttaaaagaatatatcattttacaagggtatatattttaaaacgattttcactggtgtttccttcttaaagtattggctgtaagcctttttaatcaaatggtttgtagtgtattagaattggctgcttagttctgtaatgaagatggttgtatgtttgggttacttgtgactgcagtactctatgttaccacacatgattttatttttctcttcctttgaaagcatgatctcttttattaatatgaatgcaaaatgcttgcatccaaattaaagcttattttctttacttttaagttctttgattgccctattcataaaatgaaatgtccagtatggaaaacatagggtaccaaagtgtggaccaggagtacaaattcagtcccaatactcaatacgtattatagatgactatgagtgcaaaccttaggatgtgattttctgaataattgttctttgtaggatttggttacattatttaaaatgaaaaagatctagttttagtgtgagctcagtaatgttaattggttaagttcattgtgaatcttgagttttagataagtagttatttttttcaatatcacttctgtttttagtgatattatatcaagaaacaacgtattcaagagccatggctgacagtgccagatatacttagggataaacatcaaaatgcaattatagttgctataacgttagatactcggaatcaaaatttatttgcaagctgacttgataaactaaatgaaccaataaaatttgtagaaatgctatcctgaaataattatatacatgaagacaatgttgactaatgaattaagatacattatatactagttaatgctaactagtctcagtacctgtttttagccatctgttactgtccaatagcacctcattcccacattctattttcccccggtattctttagatcctagtatttggaaaacaatcggctaaccttgacatttcatggcggtccgtgtatcctctaga

SEQ ID NO: 332631 - DNA, 361 bp, Homo sapiens
ctcagcctcccaagtagctgggaccacagggatgcaccacctcatttatttagttttttgtagagatgggggtcttaatatgttgcgtaggctggtctcagattcctgggctcaagcaatcttcctgccttggcctccgaaaagtgttgggattacaagcatgagccccagaaactggcccatccccaaatttagtaggttaaaacagtgaacatttattatctcagtttctggggttccggattctgtgagtgccttagctggatggttctatctcagagacacttatgagatggcagtcaaaattttagcaagtcatctgaagacttgatggggactccaggatattttttgtgtgtgt

SEQ ID NO: 332632 - DNA, 704 bp, Homo sapiens
gttcagaccccctctatgtaggaaagatatggatctataacagatgaataaactgggacccaagcaccatcaagacagcacaacatggagcagaatggagattcagtagccatacctggggcttctttgcattgaccttccaattgggccactctgcctctaagaaaatggaccgtgaccccctagaatggctgtttctcacaagtgaattactgtgaactttttctgagaataaaaacaatatgagtagtattttttcttttcatttgttacttaataaaagaaatgatatttagggcaatattaccattacctatgcacttcctgaattatgtctctttcctttattcttgtttgtaaaacaattaatatcttcttaaaccacacgtcttcattagagatgctttataagtgaattgtgttccattaccttgaaccacagtaataattataaattaggaatacttcaaccagaaagaaatgactcatacatttgttttcatctgtaacatttattcaacagcttgataattgcaatatatacagtggtatgtggaacactatttattaaaagacataatagaaaacttgtttataatatgtatattcaggcatttttacttctgccaatcattgtttaaatctaccttctatacttaaaattttaccttgtaaaatttaataaaataacctgtatggttcta

SEQ ID NO: 332633 - DNA, 557 bp, Homo sapiens
ctctgtcagatctattaggttcttttttttataccggctatttcatccttaagctcctatatcattttattgtgaaaaatttgaaatgtttcatgaatttgtatgccatcatttcacaggggtcatgctaatgctctctgtatcagtgcagttttagtatatgtgctgccccagtgggcagtaaacaacatacttctaaataactcctgagtcaaataagaattcacaagagaaaatagaaaacatttctaaaaacggtaaaacaaagtatcaaaatttgtgtgatgtatctaaagcagggtttaaaaagaaattcataatttcaaatctatataatttaaaaataaaaaggtcaaaaattagtaatctacaattccatttgagaagctaagaaaaaaaggggaaattaaatacaaattaagtagaagaatgcatacattaaggataagatcagaaatcaacaacatagaaaaagtagagagaaataacaaagcctacagttgattatgtaaaaaaattaataatgctgacaaatcttatcatcagcaagattaaga

SEQ ID NO: 332634 - DNA, 161 bp, Homo sapiens
tgttcttctgctgctgagcacttgggctgtttgctcctgtgtccatccttgtcctgtccccctggtgcacacgtgtttctgaaggatgtacactcaggagtggggttgcttgggcgagcgtttgtttatgttcagcttcacccaagaggtgcacaggggct

SEQ ID NO: 332635 - DNA, 355 bp, Homo sapiens
gaaatggaaagtccagcactgtttccttttttttttttttccacttcaaaggggagttaataacacctgtttactccgaatttgaaaagtagcactgtaaaagtccttgagctgtggaaacacattaagaagatgcttttgttaaaaatcaggtaaagagtgtggccttagcattaaagcttgagaccctcaaagtagccgccattagattgaggcagtaagtgcaatcacggtggtgaaaaagaaaaaaaattgacgagtaaaatatgtagaaaatggctctatatgtggctattggaatatggaactaaatcaaaacaaatcagaagttaactgtgtttttgcaggaattgta

SEQ ID NO: 332636 - DNA, 121 bp, Homo sapiens
aacatttcttcacatcatgaatatgtgaggaaaaaatgtattttaaacaactgataggtacagaccctaggaacctgcattctagccccaatgttgccactcagtgacatctgctatgtga

SEQ ID NO: 332637 - DNA, 117 bp, Homo sapiens
ggatctgagatgataaagagattattacagaatttgttttcataaggaactgtgtaattatgatgattagccaaagaaataagaaagaaagaaagagagaaaaagaaagaaaagaaa

SEQ ID NO: 332638 - DNA, 366 bp, Homo sapiens
ccttgctattttttttttttttttgagacagagtcttgctctgtcgtccacgttggagtgcagtggcgtaatctcggctcactgcaagctccatctcccgggttcatgccattctcctgccttggcctcccaaagtgctgggattacaggcgtgagccactgtgcccggcctatccttgctattttataagctttattgagatgtagttcacacaccatataattcaacattttaaagtatatgaatcaatcattttcagtttattcacggatacgtgcaactctcaccacaggtaaactttagggtatgttcatcactctggaaagaagccccatgccctttagcaatcactctccctactctac

SEQ ID NO: 332639 - DNA, 147 bp, Homo sapiens
tgtgtctcgatctcctgacctcatgatctgcccgccttggcctcccaaagtgctgcaattacaggcatgagccaccgcaaccagccaactatcatcttatgtggttaaaaaaaacaggtctttacagatataattaagactcttgag

SEQ ID NO: 332640 - DNA, 295 bp, Homo sapiens
acttctttgagcctctctttgcccatctttaaaatagagagtaggagtgggaactgcatgcttttgtaaaagcacatacagaacaatggacacagagatgtcactcaataatagctactttcattactgggtaaatcgaagctactgtcatgactttttccaccttctttcctaacaacagagaaatctgttagaggttcaggtcattgttttgatgtaattctctttaaataatatttctttgcccctttgaatcatctactactctcaaatgtactctcaaggagagaataca

SEQ ID NO: 332641 - DNA, 2178 bp, Homo sapiens
agacagcttgttagagctgagctgccctactacagcagctgccggcccctaggacagagcagggacctcaactacactgatcaccagccccatcggatccagacccggccaccagctctggctcgtcttgccccagtgccatgaccttctcggagatcctggaccgtgtgggaagcatgggccatttccagttcctgcatgtagccatactgggcctcccgatcctcaacatggccaaccacaacctgctgcagatcttcacagccgccacccctgtccaccactgtcgcccgccccacaatgcctccacagggccttgggtgctccccatgggcccaaatgggaagcctgagaggtgcctccgttttgtacatccgcccaatgccagcctgcccaatgacacccagagggccatggagccatgcctggatggctgggtctacaacagcaccaaggactccattgtgacagagtgggacttggtgtgcaactccaacaaactgaaggagatggcccagtctatcttcatggcaggtatactgattggagggctcgtgcttggagacctgtctgacaggtttggccgcaggcccatcctgacctgcagctacctgctgctggcagccagcggctccggtgcagccttcagccccaccttccccatctacatggtcttccgcttcctgtgtggctttggcatctcaggcattaccctgagcaccgtcatcttgaatgtggaatgggtgcctacccggatgcgggccatcatgtcgacagcactcgggtactgctacacctttggccagttcattctgcccggcctggcctacgccatcccccagtggcgttggctgcagttaactgtgtccattcccttcttcgtcttcttcctatcatcctggtggacaccagagtccatacgctggttggtcttgtctggaaagtcctcgaaggccctgaagatactccggcgggtggctgtcttcaatggcaagaaggaagagggagaaaggctcagcttggaggagctcaaactcaacctgcagaaggagatctccttggccaaggccaagtacaccgcaagtgacctgttccggatacccatgctgcgccgcatgaccttctgtctttccctggcctggtttgctaccggttttgcctactatagtttggctatgggtgtggaagaatttggagtcaacctctacatcctccagatcatctttggtggggtcgatgtcccagccaagttcatcaccatcctctccttaagctacctgggccggcataccactcaggccgctgccctgctcctggcaggaggggccatcttggctctcacctttgtgcccttggacttgcagaccgtgaggacagtattggctgtgtttgggaagggatgcctatccagctccttcagctgcctcttcctctacacaagtgaattataccccacagtcatcaggcaaacaggtatgggcgtaagtaacctgtggacccgcgtgggaagcatggtgtccccgctggtgaaaatcacgggtgaggtacagcccttcatccccaatatcatctacgggatcaccgccctcctcgggggcagtgctgccctcttcctgcctgagaccctgaatcagcccttgccagagactatcgaagacctggaaaactggtccctgcgggcaaagaagccaaagcaggagccagaggtggaaaaggcctcccagaggatccctctacagcctcacggaccaggcctgggctccagctgaggacaacggaaccccctttccctgccctccagagactgatcctagccaggcaccttaggagtatagggaggccccatataggtccatcctcctaggatgaagccttctgagagcttggtgaaggtgtctccatcaccaccaccagagcctcctgcccagccctggccagttcaaaggttcagccatccctgcccttgttctccctgcaacccaggccctgccattcttctgtctagcccttccccactggccaccttcccccactgtcccggtcctcttcccctgaggtcccctgatatcccctggctcagtcctaacaagactgagtcttaacaagatgagaagtcctccccttcttgcctcccacacttttctttgatgggaggtttcaataaacagcgataagaac

SEQ ID NO: 332642 - DNA, 2265 bp, Homo sapiens
agacagcttgttagagctgagctgccctactacagcagctgccggcccctaggacagagcagggacctcaactacactgatcaccagccccatcggatccagacccggccaccagctctggctcgtcttgccccagtgccatgaccttctcggagatcctggaccgtgtgggaagcatgggccatttccagttcctgcatgtagccatactgggcctcccgatcctcaacatggccaaccacaacctgctgcagatcttcacagccgccacccctgtccaccactgtcgcccgccccacaatgcctccacagggccttgggtgctccccatgggcccaaatgggaagcctgagaggtgcctccgttttgtacatccgcccaatgccagcctgcccaatgacacccagagggccatggagccatgcctggatggctgggtctacaacagcaccaaggactccattgtgacagagtgggacttggtgtgcaactccaacaaactgaaggagatggcccagtctatcttcatggcaggtatactgattggagggctcgtgcttggagacctgtctgacaggtttggccgcaggcccatcctgacctgcagctacctgctgctggcagccagcggctccggtgcagccttcagccccaccttccccatctacatggtcttccgcttcctgtgtggctttggcatctcaggcattaccctgagcaccgtcatcttgaatgtggaatgggtgcctacccggatgcgggccatcatgtcgacagcactcgggtactgctacacctttggccagttcattctgcccggcctggcctacgccatcccccagtggcgttggctgcagttaactgtgtccattcccttcttcgtcttcttcctatcatcctggtggacaccagagtccatacgctggttggtcttgtctggaaagtcctcgaaggccctgaagatactccggcgggtggctgtcttcaatggcaagaaggaagagggagaaaggctcagcttggaggagctcaaactcaacctgcagaaggagatctccttggccaaggccaagtacaccgcaagtgacctgttccggatacccatgctgcgccgcatgaccttctgtctttccctggcctggtttgctaccggttttgcctactatagtttggctatgggtgtggaagaatttggagtcaacctctacatcctccagatcatctttggtggggtcgatgtcccagccaagttcatcaccatcctctccttaagctacctgggccggcataccactcaggccgctgccctgctcctggcaggaggggccatcttggctctcacctttgtgcccttggacttgcagaccgtgaggacagtattggctgtgtttgggaagggatgcctatccagctccttcagctgcctcttcctctacacaagtgaattataccccacagtcatcaggcaaacaggtatgggcgtaagtaacctgtggacccgcgtgggaagcatggtgtccccgctggtgaaaatcacgggtgaggtacagcccttcatccccaatatcatctacgggatcaccgccctcctcgggggcagtgctgccctcttcctgcctgagaccctgaatcagcccttgccagagactatcgaagacctggaaaactggtcagtcactgcctctggccccatcagtgctcctccctggggaagcaggtctgggcccagggcttttccttagctctctgtccctaggtccctgcgggcaaagaagccaaagcaggagccagaggtggaaaaggcctcccagaggatccctctacagcctcacggaccaggcctgggctccagctgaggacaacggaaccccctttccctgccctccagagactgatcctagccaggcaccttaggagtatagggaggccccatataggtccatcctcctaggatgaagccttctgagagcttggtgaaggtgtctccatcaccaccaccagagcctcctgcccagccctggccagttcaaaggttcagccatccctgcccttgttctccctgcaacccaggccctgccattcttctgtctagcccttccccactggccaccttcccccactgtcccggtcctcttcccctgaggtcccctgatatcccctggctcagtcctaacaagactgagtcttaacaagatgagaagtcctccccttcttgcctcccacacttttctttgatgggaggtttcaataaacagcgataagaac

SEQ ID NO: 332643 - DNA, 3260 bp, Homo sapiens
agacagcttgttagagctgagctgccctactacagcagctgccggcccctaggacagagcagggacctcaactacactgatcaccagccccatcggatccagacccggccaccagctctggctcgtcttgccccagtgccatgaccttctcggagatcctggaccgtgtgggaagcatgggccatttccagttcctgcatgtagccatactgggcctcccgatcctcaacatggccaaccacaacctgctgcagatcttcacagccgccacccctgtccaccactgtcgcccgccccacaatgcctccacagggccttgggtgctccccatgggcccaaatgggaagcctgagaggtgcctccgttttgtacatccgcccaatgccagcctgcccaatgacacccagagggccatggagccatgcctggatggctgggtctacaacagcaccaaggactccattgtgacagagtgggacttggtgtgcaactccaacaaactgaaggagatggcccagtctatcttcatggcaggtatactgattggagggctcgtgcttggagacctgtctgacaggtttggccgcaggcccatcctgacctgcagctacctgctgctggcagccagcggctccggtgcagccttcagccccaccttccccatctacatggtcttccgcttcctgtgtggctttggcatctcaggcattaccctgagcaccgtcatcttgaatgtggaatgggtgcctacccggatgcgggccatcatgtcgacagcactcgggtactgctacacctttggccagttcattctgcccggcctggcctacgccatcccccagtggcgttggctgcagttaactgtgtccattcccttcttcgtcttcttcctatcatcctggtggacaccagagtccatacgctggttggtcttgtctggaaagtcctcgaaggccctgaagatactccggcgggtggctgtcttcaatggcaagaaggaagagggagaaaggctcagcttggaggagctcaaactcaacctgcagaaggagatctccttggccaaggccaagtacaccgcaagtgacctgttccggatacccatgctgcgccgcatgaccttctgtctttccctggcctggtttgctaccggttttgcctactatagtttggctatgggtgtggaagaatttggagtcaacctctacatcctccagatcatctttggtggggtcgatgtcccagccaagttcatcaccatcctctccttaagctacctgggccggcataccactcaggccgctgccctgctcctggcaggaggggccatcttggctctcacctttgtgcccttggacttgcagaccgtgaggacagtattggctgtgtttgggaagggatgcctatccagctccttcagctgcctcttcctctacacaagtgaattataccccacagtcatcaggcaaacaggtatgggcgtaagtaacctgtggacccgcgtgggaagcatggtgtccccgctggtgaaaatcacgggtgaggtacagcccttcatccccaatatcatctacgggatcaccgccctcctcgggggcagtgctgccctcttcctgcctgagaccctgaatcagcccttgccagagactatcgaagacctggaaaactggtcagtcactgcctctggccccatcagtgctcctccctggggaagcaggtctgggcccagggcttttccttagctctctgtccctaggtccctgcgggcaaagaagccaaagcaggagccagaggtggaaaaggcctcccagaggatccctctacagcctcacggaccaggcctgggctccagctgaggacaacggaaccccctttccctgccctccagagactgatcctagccaggcaccttaggagtatagggaggccccatataggtccatcctcctaggatgaagccttctgagagcttggtgaaggtgtctccatcaccaccaccagagcctcctgcccagccctggccagttcaaaggttcagccatccctgcccttgttctccctgcaacccaggccctgccattcttctgtctagcccttccccactggccaccttcccccactgtcccggtcctcttcccctgaggtcccctgatatcccctggctcagtcctaacaagactgagtcttaacaagatgagaagtcctccccttcttgcctcccacacttttctttgatgggaggtttcaataaacagcgataagaactctagccatgatgttcaggaatgggggtgggatgggagctggccaccgtgtggacacgtgagcatgcacatctgtccatccacacttcatgtacgacaggcctgtgtacaggcaccacaggtacatgcaagctggactgatgtgaacatgagcaagcacatgtgagtgctctgaggtgtgtacaccacgcctgtgcatgaaaatacatgtgtgtgtctacacgtcccagcatgcatatgagcagatgactgaccaagcccacagcagaacagccaatccctccaccagcagccatccctttccctctggggtctctgcccattccctctgtcttggctgccgcccatcaccagttaaacaagcttaggcttctcccaacttaacaaaaatcaacacaaacacatgccaggatgttgtatctccttccaagggccacactggctctttctccccttcgaagccagacttcataaaggagctgtctgcctcccctgtatccaccttctagcctcatacatctcccccactgcactccggctcctaccccttccctccctggaaccgctttcaccaaggacgctcatcccctccctgtgctggatccataagtcactcttcagccctcctcttactggccttttggcaaatttggtcctactggtcactctcttcttccttagtttctgagaggccacgtgtttgcagctcccccccacacactggctactccttctcaggcccctctgcggtatcctataaatgctgcagtgttcactttgcctatcctgcccccaccccttttctaaggatctgcatccccggaatctgccaactgaacagttccataatctgccatctctggtggtgaccaactagaccacagggcactccagatccaaatctcatttatcacatactctctcctgggctaggatttgagatcttaagaggttcttatccatctctttgtccttgccctgggaaggcaggttagc

SEQ ID NO: 332644 - DNA, 1905 bp, Homo sapiens
agacagcttgttagagctgagctgccctactacagcagctgccggcccctaggacagagcagggacctcaactacactgatcaccagccccatcggatccagacccggccaccagcctgcccaatgacacccagagggccatggagccatgcctggatggctgggtctacaacagcaccaaggactccattgtgacagagtgggacttggtgtgcaactccaacaaactgaaggagatggcccagtctatcttcatggcaggtatactgattggagggctcgtgcttggagacctgtctgacaggtttggccgcaggcccatcctgacctgcagctacctgctgctggcagccagcggctccggtgcagccttcagccccaccttccccatctacatggtcttccgcttcctgtgtggctttggcatctcaggcattaccctgagcaccgtcatcttgaatgtggaatgggtgcctacccggatgcgggccatcatgtcgacagcactcgggtactgctacacctttggccagttcattctgcccggcctggcctacgccatcccccagtggcgttggctgcagttaactgtgtccattcccttcttcgtcttcttcctatcatcctggtggacaccagagtccatacgctggttggtcttgtctggaaagtcctcgaaggccctgaagatactccggcgggtggctgtcttcaatggcaagaaggaagagggagaaaggctcagcttggaggagctcaaactcaacctgcagaaggagatctccttggccaaggccaagtacaccgcaagtgacctgttccggatacccatgctgcgccgcatgaccttctgtctttccctggcctggtttgctaccggttttgcctactatagtttggctatgggtgtggaagaatttggagtcaacctctacatcctccagatcatctttggtggggtcgatgtcccagccaagttcatcaccatcctctccttaagctacctgggccggcataccactcaggccgctgccctgctcctggcaggaggggccatcttggctctcacctttgtgcccttggacttgcagaccgtgaggacagtattggctgtgtttgggaagggatgcctatccagctccttcagctgcctcttcctctacacaagtgaattataccccacagtcatcaggcaaacaggtatgggcgtaagtaacctgtggacccgcgtgggaagcatggtgtccccgctggtgaaaatcacgggtgaggtacagcccttcatccccaatatcatctacgggatcaccgccctcctcgggggcagtgctgccctcttcctgcctgagaccctgaatcagcccttgccagagactatcgaagacctggaaaactggtccctgcgggcaaagaagccaaagcaggagccagaggtggaaaaggcctcccagaggatccctctacagcctcacggaccaggcctgggctccagctgaggacaacggaaccccctttccctgccctccagagactgatcctagccaggcaccttaggagtatagggaggccccatataggtccatcctcctaggatgaagccttctgagagcttggtgaaggtgtctccatcaccaccaccagagcctcctgcccagccctggccagttcaaaggttcagccatccctgcccttgttctccctgcaacccaggccctgccattcttctgtctagcccttccccactggccaccttcccccactgtcccggtcctcttcccctgaggtcccctgatatcccctggctcagtcctaacaagactgagtcttaacaagatgagaagtcctccccttcttgcctcccacacttttctttgatgggaggtttcaataaacagcgataagaac

SEQ ID NO: 332645 - DNA, 2244 bp, Homo sapiens
agacagcttgttagagctgagctgccctactacagcagctgccggcccctaggacagagcagggacctcaactacactgatcaccagccccatcggatccagacccggccaccagtgccatgaccttctcggagatcctggaccgtgtgggaagcatgggccatttccagttcctgcatgtagccatactgggcctcccgatcctcaacatggccaaccacaacctgctgcagatcttcacagccgccacccctgtccaccactgtcgcccgccccacaatgcctccacagggccttgggtgctccccatgggcccaaatgggaagcctgagaggtgcctccgttttgtacatccgcccaatgccagcctgcccaatgacacccagagggccatggagccatgcctggatggctgggtctacaacagcaccaaggactccattgtgacagagtgggacttggtgtgcaactccaacaaactgaaggagatggcccagtctatcttcatggcaggtatactgattggagggctcgtgcttggagacctgtctgacaggtttggccgcaggcccatcctgacctgcagctacctgctgctggcagccagcggctccggtgcagccttcagccccaccttccccatctacatggtcttccgcttcctgtgtggctttggcatctcaggcattaccctgagcaccgtcatcttgaatgtggaatgggtgcctacccggatgcgggccatcatgtcgacagcactcgggtactgctacacctttggccagttcattctgcccggcctggcctacgccatcccccagtggcgttggctgcagttaactgtgtccattcccttcttcgtcttcttcctatcatcctggtggacaccagagtccatacgctggttggtcttgtctggaaagtcctcgaaggccctgaagatactccggcgggtggctgtcttcaatggcaagaaggaagagggagaaaggctcagcttggaggagctcaaactcaacctgcagaaggagatctccttggccaaggccaagtacaccgcaagtgacctgttccggatacccatgctgcgccgcatgaccttctgtctttccctggcctggtttgctaccggttttgcctactatagtttggctatgggtgtggaagaatttggagtcaacctctacatcctccagatcatctttggtggggtcgatgtcccagccaagttcatcaccatcctctccttaagctacctgggccggcataccactcaggccgctgccctgctcctggcaggaggggccatcttggctctcacctttgtgcccttggacttgcagaccgtgaggacagtattggctgtgtttgggaagggatgcctatccagctccttcagctgcctcttcctctacacaagtgaattataccccacagtcatcaggcaaacaggtatgggcgtaagtaacctgtggacccgcgtgggaagcatggtgtccccgctggtgaaaatcacgggtgaggtacagcccttcatccccaatatcatctacgggatcaccgccctcctcgggggcagtgctgccctcttcctgcctgagaccctgaatcagcccttgccagagactatcgaagacctggaaaactggtcagtcactgcctctggccccatcagtgctcctccctggggaagcaggtctgggcccagggcttttccttagctctctgtccctaggtccctgcgggcaaagaagccaaagcaggagccagaggtggaaaaggcctcccagaggatccctctacagcctcacggaccaggcctgggctccagctgaggacaacggaaccccctttccctgccctccagagactgatcctagccaggcaccttaggagtatagggaggccccatataggtccatcctcctaggatgaagccttctgagagcttggtgaaggtgtctccatcaccaccaccagagcctcctgcccagccctggccagttcaaaggttcagccatccctgcccttgttctccctgcaacccaggccctgccattcttctgtctagcccttccccactggccaccttcccccactgtcccggtcctcttcccctgaggtcccctgatatcccctggctcagtcctaacaagactgagtcttaacaagatgagaagtcctccccttcttgcctcccacacttttctttgatgggaggtttcaataaacagcgataagaac

SEQ ID NO: 332646 - DNA, 2894 bp, Homo sapiens
agacagcttgttagagctgagctgccctactacagcagctgccggcccctaggacagagcagggacctcaactacactgatcaccagccccatcggatccagacccggccaccagctctggctcgtcttgccccagtgccatgaccttctcggagatcctggaccgtgtgggaagcatgggccatttccagttcctgcatgtagccatactgggcctcccgatcctcaacatggccaaccacaacctgctgcagatcttcacagccgccacccctgtccaccactgtcgcccgccccacaatgcctccacagggccttgggtgctccccatgggcccaaatgggaagcctgagaggtgcctccgttttgtacatccgcccaatgccagcctgcccaatgacacccagagggccatggagccatgcctggatggctgggtctacaacagcaccaaggactccattgtgacagagtgggacttggtgtgcaactccaacaaactgaaggagatggcccagtctatcttcatggcaggtatactgattggagggctcgtgcttggagacctgtctgacaggtttggccgcaggcccatcctgacctgcagctacctgctgctggcagccagcggctccggtgcagccttcagccccaccttccccatctacatggtcttccgcttcctgtgtggctttggcatctcaggcattaccctgagcaccgtcatcttgaatgtggaatgggtgcctacccggatgcgggccatcatgtcgacagcactcgggtactgctacacctttggccagttcattctgcccggcctggcctacgccatcccccagtggcgttggctgcagttaactgtgtccattcccttcttcgtcttcttcctatcatcctggtggacaccagagtccatacgctggttggtcttgtctggaaagtcctcgaaggccctgaagatactccggcgggtggctgtcttcaatggcaagaaggaagagggagaaaggctcagcttggaggagctcaaactcaacctgcagaaggagatctccttggccaaggccaagtacaccgcaagtgacctgttccggatacccatgctgcgccgcatgaccttctgtctttccctggcctggtttgctaccggttttgcctactatagtttggctatgggtgtggaagaatttggagtcaacctctacatcctccagatcatctttggtggggtcgatgtcccagccaagttcatcaccatcctctccttaagctacctgggccggcataccactcaggccgctgccctgctcctggcaggaggggccatcttggctctcacctttgtgcccttggacttgcagaccgtgaggacagtattggctgtgtttgggaagggatgcctatccagctccttcagctgcctcttcctctacacaagtgaattataccccacagtcatcaggcaaacaggtatgggcgtaagtaacctgtggacccgcgtgggaagcatggtgtccccgctggtgaaaatcacgggtgaggtacagcccttcatccccaatatcatctacgggatcaccgccctcctcgggggcagtgctgccctcttcctgcctgagaccctgaatcagcccttgccagagactatcgaagacctggaaaactggtcagtcactgcctctggccccatcagtgctcctccctggggaagcaggtctgggcccagggcttttccttagctctctgtccctaggtccctgcgggcaaagaagccaaagcaggagccagaggtggaaaaggcctcccagaggatccctctacagcctcacggaccaggcctgggctccagctgaggacaacggaaccccctttccctgccctccagagactgatcctagccaggcaccttaggagtatagggaggccccatataggtccatcctcctaggatgaagccttctgagagcttggtgaaggtgtctccatcaccaccaccagagcctcctgcccagccctggccagttcaaaggttcagccatccctgcccttgttctccctgcaacccaggccctgccattcttctgtctagcccttccccactggccaccttcccccactgtcccggtcctcttcccctgaggtcccctgatatcccctggctcagtcctaacaagactgagtcttaacaagatgagaagtcctccccttcttgcctcccacacttttctttgatgggaggtttcaataaacagcgataagaacaaaacgaaacgacaaaaaacaaaaaaaaaaaaaaaaaaaaaaaaaaaaggggggggcgggacaaaaaaaatacccccaggggggcgcccacttatatcagccttcaccccgcatttttctgtgtaaacagaggggggccccctacagagagggaggcggcaataacactagcccagaggcaccgtccaccgtgcattataaacacaaggtgtgcagtgagcgcggaaaaactcgtcggaacgggaggaacaactgtgggcgaagggaacccccccacaagcaacgcggaggacgaggggggggcaacgcaaccactatagtgcgcacagaaaaccaccactccctccgcagcagaagaggcgtcttatcacacacaccgcgcccgccaaggaggggaggaacgaccactaatcataacgacatcggatcgccacccaagcggtcgtaacactaacactcggcgggctgcgcacacacaacaagcgcccggcgacgactagaattacgacacgcacgagccaggtatccagaagagaacaactgagtcggccaccagcacgagcggcgaaagtaaatcatacgtctcgctagcgcgaacccaactattattctactcccccgcaggacgt

SEQ ID NO: 332647 - DNA, 301 bp, Homo sapiens
ttgctaggaaaaggcagacacaccagcatttacacaaattcagttacatcactagtggtaggtttcacataaaaacctttgatttatgagaaggctatgcacatgttacacatccagtcagaaccaatcatgcactctaatcatacactttaatttcccgtgtgttgtgagagggacctggtgggaggtgattgaatcacggggtcaggtctttcccgtgctgttttcatgacagtgaataagtctcatgagatctgatagttttaaaaatgggagtttccctgcacaagctctttgcctg

SEQ ID NO: 332648 - DNA, 138 bp, Homo sapiens
tggctggatttgagctcccgggctcaagtatgatccctcccacctcagcctcccaattagctgggactgctggtgtgcaccactgtgccagggtttgtgattgtgttttttgttgttgttcttttgtttgtttgtttt

SEQ ID NO: 332649 - DNA, 615 bp, Homo sapiens
gcaatgaatattttgacttcagtgctgcttctatatgcaaaagaggaagaagctttttggcttctggttgctgtatgtgaacgaatgttgcctgattattttaatcgtcgaattattggttcagatgattttatgccactagtaagaatccaaggacaatgtgttattggggagaagtagaaaaaggaaaatctggggtagcacctggcatgctctttctccaattttctactacttactcctattccccaaattctcccatcaaggaggaaatgaactctgagacagaagatgagttttcctcaaagcttgaccaggatataagtggatgccttattgggcaaagcagagggtaaccaattagaaggccctggcttctcttgattgatagctgagaactcatcagagggatcagtgctttctctgtgtattgctggagtctgaaagtgtgactctcatgtcactgattcatttctgaagtgttaaattcagaataaatttttgataatcaaaatgaacttagagaactttgttgtttggcattgtcaagagtgaagaattctaattatttgtgtatttatcttgtgttatgctagatattaaactccctgaaca

SEQ ID NO: 332650 - DNA, 159 bp, Homo sapiens
ccactttggcctccttgtcttctcaactctgatctctgcctacccagctgggcaagactacagaatttacagaactctgaggttcctccttcctgtacctgtggtctggaaattgcctccaaacagaaagctagggcaatctagggctcacctcatttg

SEQ ID NO: 332651 - DNA, 324 bp, Homo sapiens
gtcagttaatacctgatctgatcaactatgaatcaaccctttggttatactgtaccaaacattcccaatatatatagcgtgtattgaaccatgaaatttcaaagaaatggaatgtgaactgtgtgggtatgctaacttagatcctttacttatcaaagtcaatgacctcttctcattcttctcaagttctccataaaattagtataaccaagtcccttttctttctaaggtctattaaaatattccataaattttaatttcatgcatcttcctggctctcttccaggcactgctttcttggatttcaacttattccccccctag

SEQ ID NO: 332652 - DNA, 317 bp, Homo sapiens
tgacagatgaatgcatggatgaatggctacacagatgcagctacagagatggataaagaaacagagatggctggaaagaaagaaactagttgaggtagacatataagttaacaatattttataaaaatgatttcttccttgagaagggaagttcttccatctgaccttatgcaatcacatagcaattttacaagaaaaggaatctgggcatcgtggacaaattccaataacagttgatataagtagcatatatctgttttaaaatccactgtaatatcaggatttttcttctttatatcgaggaactagcatgctgc

SEQ ID NO: 332653 - DNA, 376 bp, Homo sapiens
tcaccattagaggtatattcctttgtgccgtatttcaaatgcagaaatgacagtggtcctgtgcaaatgggatttatttgttcatttagcagatatttatagagcgccttctgtatgccaggccttgttttggatactggaggtactgcggagaacaaaacaaacaaaagtccctgtcctcattggcacgcacactcttgggaaaaggaatggcagacaataggcaaaatgaatgtaattatcatacagtatattagaaagcgatgtactgtggggagaaataaagcaggagaggaggatgggggtgggcggtttacaattttagagtggtctgagtaagcctcactgagaagatgacattttagcaaagaaaaat

SEQ ID NO: 332654 - DNA, 115 bp, Homo sapiens
tcaaattttactgccactcaaagtcccagcatgacattttcttgaaaacaaagcatcccatttctgattgctccacaccaggctgaactgcctgcttctgttgcccacagctaaa

SEQ ID NO: 332655 - DNA, 198 bp, Homo sapiens
tttatgagactgaataagaactgaaaaaatggaagaaaggacatgaggtaaagggaggtatctggggaaaatcttcaggtaatatttaaaaatatattgctacatacacatccttactgttctttgggcatggattcatgagattaaaaaatatttgaaagacatttaatgctcaaagtaatatggcttcaagataag

SEQ ID NO: 332656 - DNA, 799 bp, Homo sapiens
gaacccccacccccagccaggggaagccgtgagtgattgtgtgaccctgcctgggaaaccatgcttctcccatggatctttgcaacccatgtatcagatcccttcatgagcccataccaccacagccttgagtctgatacacagagctgtttggagtctcagcagagcagctgctcaggcatacacagagacccaagagttttacatactccggctctgggatccctggcaagacaagaaatctgtctgtacatatccctaggaaaggggctgaatccaaggagccaaacggcatcattctgcaggctgcacttccatggcacctcacaatttaagaccctctggcttggaatcccagccggccaatggcagtgaattagagtcctccttagaagggtccaagttcccaggaagagggacggccacagttcagtcaacttacctgcttcagcctgccagctttggagaacacaggcagtccggatgagggagggtcccccatctccagtgcagcacattggctctaccaaaaagcagccagatccctgatcctgttcctcctgactgggtgagtcctcccagtaggggtctccagccacctcctacaggtgggtgtgggccagcaacaggtcagtaaccactaggacagagcttccagaggaaggagctggctgccatctttgctgtttcacagtattcactggtagtacctctaggtatgggagaaactgaggcaactggcatctggagtagaccgccagcaaatggcaacagccctacagtagaatggcctgttaaa

SEQ ID NO: 332657 - DNA, 240 bp, Homo sapiens
ttgataattactgacactgggtgttagtacatggggactcactatatatagtattgtccctatttttgtatgtatttcaaagtttccctttattaaatattaaaatacaaaaaaccaaagtgacaaagcaacactatttccacttatttttgcaatgacatttcttttataataggaaataacaatattacattttaaaatattgataatgcattttagaatagttacaatacaattctt

SEQ ID NO: 332658 - DNA, 207 bp, Homo sapiens
ttagggaatctaataaaaataatccacgcttataggagaaggctacagagctttgacttcctagccaggcctccctttctccccccagtggaattttaatatgtttcctcagcagacagggcccaaaggattagctaaatgttggatctcaagtgaggagactgatgccatggtaaatggttgggggaagactttagagggagagtg

SEQ ID NO: 332659 - DNA, 79 bp, Homo sapiens
ccactgcagtacattgagctccatagagacagcgccggggcaagtgagagccgtacgggcactgggcgactctgtgcct

SEQ ID NO: 332660 - DNA, 170 bp, Homo sapiens
ccaaaagtttctaaaggccttgggatactagaatgtcagaaccacagaccctagaaataacagatttgtggaaccacaaagaactttcaaggaatagaatcttagacacagtaaatcttagaaacaccaaggctgggtgtggtggctcatgcctgtaatcctagcgcttc

SEQ ID NO: 332661 - DNA, 464 bp, Homo sapiens
cccaggatcagaatttttagctggaaaggatcctaaaaaccgaaccctaatctcctgtgttgacagatgaagaatcggaggcttaatgtggcccgcccatggccacaacagaactcacaaatggcagagctagggagattaatgactcataataaaaaatggaaaaacacagatgtttcatgaattatattcaaataaagctcctttcttacagagaataaccctaagacttcaacagaataaggggtgccaaggtggcatctggtgggagagaaaccaggggatttgtcttgaagttgggttcgaccagctagaacactgtttatttagattagtaaaaatagcagttttctaaacatactcttagtcagactttacagactttacattgagagtcttgagttttacaagtgacctcaaggctgtctggttcataatgacctccagtgggagttggctctttt

SEQ ID NO: 332662 - DNA, 374 bp, Homo sapiens
atcaaaccattcctcacaccacattccatgatacccttgattctcttggctgaggttctcagtattagctctccccttttcaccttgcctctcagacttggttcaagataccccttggcttcccctctaattaaacctattctccactctgtcccatctgccatgttcccaaaacctgcaacttctgcacagccctgtggacaagcatctcacccatttatcaggtgtgaggattaagcaccaactagattctcttagtgggaggcctatcaaaaagcattctttaaactcttcttttaaactgatgatggtacaaagcactatagaaacagacgaggaaatacaaagtatgactctagaaataagcaataatg

SEQ ID NO: 332663 - DNA, 3005 bp, Homo sapiens
  misc_feature (1927)..(1927): n is a, c, g, or t
gggtaaaaggccggtacctcgggcaagatggctatcaagagtatcgcttcccgcctccggggttcccgtcgttttctgagcggcttcgtggctggggctgtagtgggcgctgcgggagctgggctcgcggccctgcagttcttccggagtcagggcgctgagggagcgttgacagggaagcagccggatggatctgcagaaaaggctgtcttggaacaatttggattccctttaactggaacagaggcaaggtgttacactaatcacgctttgtcttatgatcaggcaaagcgggtgcctagatgggttcttgaacatatttccaaaagcaagataatgggtgatgcagacagaaagcattgtaaatttaagcctgatcccaatatccctccaaccttcagtgccttcaatgaagattatgttggaagtgggtggtcacgaggacacatggctccagcaggaaataacaaattttcaagtaaagccatggctgaaaccttttacctttctaacattgtgcctcaggattttgataataattctggatattggaacagaatagaaatgtactgtcgagagctgacagaaaggtttgaagatgtttgggtggtatctgggcctttgaccttacctcagactagaggcgatggaaagaaaatagttagttaccaggtgattggcgaggacaacgtggcagtcccctcacacctttataaggtaatcctggcccgcagaagctcagtatctaccgaaccactggcgctaggggcctttgtggtacccaatgaagccatcggcttccagccccagttaactgaattccaagtgagcctccaggacctagagaagttgtcaggactggtgttttttcctcatttggatagaactagtgatatccggaatatctgctctgtggacacctgtaagctcctggatttccaggagttcaccttgtacttgagtacaagaaagattgaaggagcccgatcagtgctcagactggaaaagatcatggaaaacttgaagaatgcagagattgaaccagatgattactttatgagtcgctatgagaagaagctagaagaactcaaagctaaggagcagtcaggaacccagataagaaagccatcctagtttttatctcaagatgtgtcataccgtctgtaatgaagcaggcatgccctctttaggctaacatattttagtggctttgctttttgctttttaaaaagtttttctctttaagagatgtggtctcgccgtgtcatccaggctggagtgcagtggtggaatcatagctcactatagcctcaaacttctgggcttaagcaatcctcctgcctctgccccctgagcagctgggactacaggcacacaccatcaccctcagctactagtggctttgctttaaagaaacagtggaatcctaaatttatgactaaaaattcccccaaaagatgaaagatctacaatgtttttgtcagtattatatttgactcaggaactaattattaatggagctttgacacctgcagatggagggctgatcttgtgtcaagttaacaggaagactgcccacagatgacactgcatttgtatccctgtggatgtagagtattgggaaggcatttgtttagtttcatgcctccaaaccatgcattgtctgtgatgtatctgcccagccttctcagaactcaatgttgtacatttttccctctaggacctgaattggtcttggaggcagcttttagaaatcctctatgtagttcctgtccacatgcactatatatttgtttcttctttctcctctcatgaatctgctcgtttctctacttctgtctacgtagaagcactcagcaactagtttctgctcattaaatgtgttctatatactaggctcagtgctttacatgtgtttgtcttaccngagtttcacttttccaaagtagtcatccacaaagtatgaggcagacagatctaagagaagaaagacagctgaggtagattcaaatcttttctgacatggatggtggctttttactcagaaatatatacctatttccatgggtatttgtgggcctgaggcatgcttggcaagaagagtctggtttctcgtctgctatgcaagccaaagggactttaatgttctttgaattgaaccctccttagctctgtggaaagagacagtcaggaatatttgggaattagacggcaatactttgtggggtttattagagcccatgcttgcctccagagatacagttcttttagtgaccagatactgccaaattgatgtgttcttgctttccaggtgagctttttgttcttaagattaagaaacctatgaaggatctgcagccaggcatggtggctcaggcctataatctcagcactttgggaaatcgaggtgggtggatcgcttgagcccaggagtttgagaccagcctgggcaacataatgaaaccctatctttacaaaaaaatacaaaaattagctgggcgtggtggtgcacacctgtagtcccagctactcgggaggctgaaatgggaggattgcttgagcctggcaggtcaaggctgcgatgggacatggtcatgccactggacgccagcctgggccacagagggagaccctgtctcaaaaaaagaaaagaaaaaagaaaaaggtctgcccacaaaatcactagcttattatttgcttcctgtgtgcctgcttgtctacctagcatagtaggccaaaggtccaaaggcatttagcattcctaggggaaattgtggctgtttttctgagccagatctcttgatttgggtttacacggagtcctttcatggactatcctgagtattgtcagtaaaacgtcttggggcataagaacttgtctgaatctgtcatacataccactgctgtcttttccgagtggtattacaagaaagatttttgtggtgtgtttgttctaagagaaatgccaaggctttcagataaagataagatgataatgattgaca

SEQ ID NO: 332664 - DNA, 2196 bp, Homo sapiens
gggtaaaaggccggtacctcgggcaagatggctatcaagagtatcgcttcccgcctccggggttcccgtcgttttctgagcggcttcgtggctggggctgtagtgggcgctgcgggagctgggctcgcggccctgcagttcttccggagtcagggcgctgagggagcgttgacagggaagcagccggatggtaagtctgtgggcccgtcctcccttcgctggcccagatttcgggctccgactcctacctggagtgtgaatggcagtccttgacggacagccttcaccgtttgctgggcccctagcctggcccttggtttctgacctttattctcccggctcggcctcccttccccacctcgcgtctcgccagcttccctcatgtccttccttcccccgggcatcttcgttttctgcacagaaccacccccgccgcccgactttcttccccccagttactcatcgcgatatctatgttttaatgtctgtgttctctactaagattgttagctccataagacttgagactatgtctgttttggtctccatcatctaaccagcacagtacctggtacataattggcattcagtaagtatgaatgaaggaataaattaatacataattttagtagattagttaactgcccttctttcgtcattgttcagttgaagaatacctgctatccctccaaagtgtataaaaactcatgttgcaatgggtaccttatatttgacgaaaaaaaaaaaaaaaaattaacacgagctcatttcttgtactttgcggatgtgctaatttaacttgctcctttggatacttggcatctagcaagagaactacccccttggggggttgaggatttgagaaggcatcggggaggattatctcgaaactgactcactgctgaatgtgtgcttggtttctcccactaggaaaaacagtaccagttttactgtcatcttgcaacagcacacatatcagtgcttcagagatgatttggaaatttgatgtgaaagaataataagatcaagtctttattcaaaagttaatgcagtagctgcattttattcactgattataggcaaatcagtactttgcctactgtctgttttcttcatctcataagtaattgcaaaaatgagattttctggttgattagacttctgagccagtcctttgtaaatcacaccgctctccttttccttataatctttcattattaagagccactaattgtgtgtgtgtgttttttttgtctctgccccccccttttttttttttcatttttaggatctgcagaaaaggctgtcttggaacaatttggattccctttaactggaacagaggcaagggactacatggaaggttgtcttggcactgaacggagaaaggtcaaaaggaagataaaaagtttgttccagagaaggtgatgcagacagaaagcattgtaaatttaagcctgatcccaatatccctccaaccttcagtgccttcaatgaagattatgttggaagtgggtggtcacgaggacacatggctccagcaggaaataacaaattttcaagtaaagccatggctgaaaccttttacctttctaacattgtgcctcaggattttgataataattctggatattggaacagaatagaaatgtactgtcgagagctgacagaaaggtttgaagatgtttgggtggtatctgggcctttgaccttacctcagactagaggcgatggaaagaaaatagttagttaccaggtgattggcgaggacaacgtggcagtcccctcacacctttataaggaccatgctggctgctgtgttgagagcccgctggggacaaggaccagtgaggaggccactgcaagaatccaggagagagatgatggcggctcagaccagcgcagtggcctggttgaacttgggatatatttcgaaggtagagccaacaggatttccggccggattggatgtagggtgtgagaaacagagaggaggcaaggatgacgtcaagggttttggcctgagcagctggaaatccagccgggcacccccgtgggggctgttgagtggttttaactgtctcctggggcctgtgggtgaagctgagacagagaccgaagggaggggctgagccctacccctggctctgtggctcagggaataggctgcacatactgattattccattacccttt

SEQ ID NO: 332665 - DNA, 2855 bp, Homo sapiens
  misc_feature (1777)..(1777): n is a, c, g, or t
gggtaaaaggccggtacctcgggcaagatggctatcaagagtatcgcttcccgcctccggggttcccgtcgttttctgagcggcttcgtggctggggctgtagtgggcgctgcgggagctgggctcgcggccctgcagttcttccggagtcagggcgctgagggagcgttgacagggaagcagccggatggtgatgcagacagaaagcattgtaaatttaagcctgatcccaatatccctccaaccttcagtgccttcaatgaagattatgttggaagtgggtggtcacgaggacacatggctccagcaggaaataacaaattttcaagtaaagccatggctgaaaccttttacctttctaacattgtgcctcaggattttgataataattctggatattggaacagaatagaaatgtactgtcgagagctgacagaaaggtttgaagatgtttgggtggtatctgggcctttgaccttacctcagactagaggcgatggaaagaaaatagttagttaccaggtgattggcgaggacaacgtggcagtcccctcacacctttataaggtaatcctggcccgcagaagctcagtatctaccgaaccactggcgctaggggcctttgtggtacccaatgaagccatcggcttccagccccagttaactgaattccaagtgagcctccaggacctagagaagttgtcaggactggtgttttttcctcatttggatagaactagtgatatccggaatatctgctctgtggacacctgtaagctcctggatttccaggagttcaccttgtacttgagtacaagaaagattgaaggagcccgatcagtgctcagactggaaaagatcatggaaaacttgaagaatgcagagattgaaccagatgattactttatgagtcgctatgagaagaagctagaagaactcaaagctaaggagcagtcaggaacccagataagaaagccatcctagtttttatctcaagatgtgtcataccgtctgtaatgaagcaggcatgccctctttaggctaacatattttagtggctttgctttttgctttttaaaaagtttttctctttaagagatgtggtctcgccgtgtcatccaggctggagtgcagtggtggaatcatagctcactatagcctcaaacttctgggcttaagcaatcctcctgcctctgccccctgagcagctgggactacaggcacacaccatcaccctcagctactagtggctttgctttaaagaaacagtggaatcctaaatttatgactaaaaattcccccaaaagatgaaagatctacaatgtttttgtcagtattatatttgactcaggaactaattattaatggagctttgacacctgcagatggagggctgatcttgtgtcaagttaacaggaagactgcccacagatgacactgcatttgtatccctgtggatgtagagtattgggaaggcatttgtttagtttcatgcctccaaaccatgcattgtctgtgatgtatctgcccagccttctcagaactcaatgttgtacatttttccctctaggacctgaattggtcttggaggcagcttttagaaatcctctatgtagttcctgtccacatgcactatatatttgtttcttctttctcctctcatgaatctgctcgtttctctacttctgtctacgtagaagcactcagcaactagtttctgctcattaaatgtgttctatatactaggctcagtgctttacatgtgtttgtcttaccngagtttcacttttccaaagtagtcatccacaaagtatgaggcagacagatctaagagaagaaagacagctgaggtagattcaaatcttttctgacatggatggtggctttttactcagaaatatatacctatttccatgggtatttgtgggcctgaggcatgcttggcaagaagagtctggtttctcgtctgctatgcaagccaaagggactttaatgttctttgaattgaaccctccttagctctgtggaaagagacagtcaggaatatttgggaattagacggcaatactttgtggggtttattagagcccatgcttgcctccagagatacagttcttttagtgaccagatactgccaaattgatgtgttcttgctttccaggtgagctttttgttcttaagattaagaaacctatgaaggatctgcagccaggcatggtggctcaggcctataatctcagcactttgggaaatcgaggtgggtggatcgcttgagcccaggagtttgagaccagcctgggcaacataatgaaaccctatctttacaaaaaaatacaaaaattagctgggcgtggtggtgcacacctgtagtcccagctactcgggaggctgaaatgggaggattgcttgagcctggcaggtcaaggctgcgatgggacatggtcatgccactggacgccagcctgggccacagagggagaccctgtctcaaaaaaagaaaagaaaaaagaaaaaggtctgcccacaaaatcactagcttattatttgcttcctgtgtgcctgcttgtctacctagcatagtaggccaaaggtccaaaggcatttagcattcctaggggaaattgtggctgtttttctgagccagatctcttgatttgggtttacacggagtcctttcatggactatcctgagtattgtcagtaaaacgtcttggggcataagaacttgtctgaatctgtcatacataccactgctgtcttttccgagtggtattacaagaaagatttttgtggtgtgtttgttctaagagaaatgccaaggctttcagataaagataagatgataatgattgaca

SEQ ID NO: 332666 - DNA, 405 bp, Homo sapiens
gaatctctgagtcagtttattatttttggcagttgaatttaaattcattagaacagagtgggatggcttataagtacatttcagcaatgcattaaataagtatttttcagaaaaaatttgcgaactgttagcacaaattggcatcactaatatggctgctttgtttttaggtgattggcgaggacaacgtggcagtcccctcacacctttataaggtaatcctggcccgcagaagctcagtatctaccgaaccactggcgctaggggcctttgtggtacccaatgaagccatcggcttccagccccagttaactgaattccaagtgagcctccaggacctagagaagttgtcaggactggtgttttttcctcatttggatagaactagtgatatccggaatatct

SEQ ID NO: 332667 - DNA, 3081 bp, Homo sapiens
  misc_feature (2003)..(2003): n is a, c, g, or t
gggtaaaaggccggtacctcgggcaagatggctatcaagagtatcgcttcccgcctccggggttcccgtcgttttctgagcggcttcgtggctggggctgtagtgggcgctgcgggagctgggctcgcggccctgcagttcttccggagtcagggcgctgagggagcgttgacagggaagcagccggatggatctgcagaaaaggctgtcttggaacaatttggattccctttaactggaacagaggcaaggtgttacactaatcacgctttgtcttatgatcaggcaaagcgggtgcctagatgggttcttgaacatatttccaaaagcaagataatgggtgatgcagacagaaagcattgtaaatttaagcctgatcccaatatccctccaaccttcagtgccttcaatgaagattatgttggaagtgggtggtcacgaggacacatggctccagcaggaaataacaaattttcaagtaaagccatggctgaaaccttttacctttctaacattgtgcctcaggattttgataataattctggatattggaacagaatagaaatgtactgtcgagagctgacagaaaggtttgaagatgtttgggtggtatctgggcctttgaccttacctcagactagaggcgatggaaagaaaatagttagttaccaggtgattggcgaggacaacgtggcagtcccctcacacctttataaggtaatcctggcccgcagaagctcagtatctaccgaaccactggcgctaggggcctttgtggtacccaatgaagccatcggcttccagccccagttaactgaattccaagtgagcctccaggacctagagaagttgtcaggactggtgttttttcctcatttggatagaactagtgatatccggaatatctgctctgtggacacctgtaagctcctggatttccaggagttcaccttgtacttgagtacaagaaagattgaaggagcccgatcagtgctcagactggaaaagatcatggaaaacttgaagaatgcagagattgaaccagatgattactttatgagtcgctatgagaagaagctagaagaactcaaagctaaggagcagtcaggaacccagataagaaagccatcctagtttttatctcaagatgtgtcataccgtctgtaatgaagcaggcatgccctctttaggctaacatattttagtggctttgctttttgctttttaaaaagtttttctctttaagagatgtggtctcgccgtgtcatccaggctggagtgcagtggtggaatcatagctcactatagcctcaaacttctgggcttaagcaatcctcctgcctctgccccctgagcagctgggactacaggcacacaccatcaccctcagctactagtggctttgctttaaagaaacagtggaatcctaaatttatgactaaaaattcccccaaaagatgaaagatctacaatgtttttgtcagtattatatttgactcaggaactaattattaatggagctttgacacctgcagatggagggctgatcttgtgtcaagttaacaggaagactgcccacagatgacactgcatttgtatccctgtggatgtagagtattgggaaggcatttgtttagtttcatgcctccaaaccatgcattgtctgtgatgtatctgcccagccttctcagaactcaatgttgtacatttttccctctaggacctgaattggtcttggaggcagcttttagaaatcctctatgtagttcctgtccacatgcactatatatttgtttcttctttctcctctcatgaatctgctcgtttctctacttctgtctacgtagaagcactcagcaactagtttctgctcattaaatgtgttctatatactaggctcagtgctttacatgtgttgtctcacaatgactctctgaggtaaatacactatccccattttacctgtgagaaaattgaggcttagagagcttagtgtcttaccngagtttcacttttccaaagtagtcatccacaaagtatgaggcagacagatctaagagaagaaagacagctgaggtagattcaaatcttttctgacatggatggtggctttttactcagaaatatatacctatttccatgggtatttgtgggcctgaggcatgcttggcaagaagagtctggtttctcgtctgctatgcaagccaaagggactttaatgttctttgaattgaaccctccttagctctgtggaaagagacagtcaggaatatttgggaattagacggcaatactttgtggggtttattagagcccatgcttgcctccagagatacagttcttttagtgaccagatactgccaaattgatgtgttcttgctttccaggtgagctttttgttcttaagattaagaaacctatgaaggatctgcagccaggcatggtggctcaggcctataatctcagcactttgggaaatcgaggtgggtggatcgcttgagcccaggagtttgagaccagcctgggcaacataatgaaaccctatctttacaaaaaaatacaaaaattagctgggcgtggtggtgcacacctgtagtcccagctactcgggaggctgaaatgggaggattgcttgagcctggcaggtcaaggctgcgatgggacatggtcatgccactggacgccagcctgggccacagagggagaccctgtctcaaaaaaagaaaagaaaaaagaaaaaggtctgcccacaaaatcactagcttattatttgcttcctgtgtgcctgcttgtctacctagcatagtaggccaaaggtccaaaggcatttagcattcctaggggaaattgtggctgtttttctgagccagatctcttgatttgggtttacacggagtcctttcatggactatcctgagtattgtcagtaaaacgtcttggggcataagaacttgtctgaatctgtcatacataccactgctgtcttttccgagtggtattacaagaaagatttttgtggtgtgtttgttctaagagaaatgccaaggctttcagataaagataagatgataatgattgaca

SEQ ID NO: 332668 - DNA, 3211 bp, Homo sapiens
  misc_feature (2133)..(2133): n is a, c, g, or t
gggtaaaaggccggtacctcgggcaagatggctatcaagagtatcgcttcccgcctccggggttcccgtcgttttctgagcggcttcgtggctggggctgtagtgggcgctgcgggagctgggctcgcggccctgcagttcttccggagtcagggcgctgagggagcgttgacagggaagcagccggatggatctgcagaaaaggctgtcttggaacaatttggattccctttaactggaacagaggcaaggtgttacactaatcacgctttgtcttatgatcaggcaaagcgggtgcctagatgggttcttgaacatatttccaaaagcaagataatgggtagattcttcaagtttacactcctagcatcattgtttcttctctctctcaaccttcacctatggctggtcttgaatttctgggttcaagtgaccctcctgcctcagcctcctgagtagctgggattacagggactacatggaaggttgtcttggcactgaacggagaaaggtcaaaaggaagataaaaagtttgttccagagaaggtgatgcagacagaaagcattgtaaatttaagcctgatcccaatatccctccaaccttcagtgccttcaatgaagattatgttggaagtgggtggtcacgaggacacatggctccagcaggaaataacaaattttcaagtaaagccatggctgaaaccttttacctttctaacattgtgcctcaggattttgataataattctggatattggaacagaatagaaatgtactgtcgagagctgacagaaaggtttgaagatgtttgggtggtatctgggcctttgaccttacctcagactagaggcgatggaaagaaaatagttagttaccaggtgattggcgaggacaacgtggcagtcccctcacacctttataaggtaatcctggcccgcagaagctcagtatctaccgaaccactggcgctaggggcctttgtggtacccaatgaagccatcggcttccagccccagttaactgaattccaagtgagcctccaggacctagagaagttgtcaggactggtgttttttcctcatttggatagaactagtgatatccggaatatctgctctgtggacacctgtaagctcctggatttccaggagttcaccttgtacttgagtacaagaaagattgaaggagcccgatcagtgctcagactggaaaagatcatggaaaacttgaagaatgcagagattgaaccagatgattactttatgagtcgctatgagaagaagctagaagaactcaaagctaaggagcagtcaggaacccagataagaaagccatcctagtttttatctcaagatgtgtcataccgtctgtaatgaagcaggcatgccctctttaggctaacatattttagtggctttgctttttgctttttaaaaagtttttctctttaagagatgtggtctcgccgtgtcatccaggctggagtgcagtggtggaatcatagctcactatagcctcaaacttctgggcttaagcaatcctcctgcctctgccccctgagcagctgggactacaggcacacaccatcaccctcagctactagtggctttgctttaaagaaacagtggaatcctaaatttatgactaaaaattcccccaaaagatgaaagatctacaatgtttttgtcagtattatatttgactcaggaactaattattaatggagctttgacacctgcagatggagggctgatcttgtgtcaagttaacaggaagactgcccacagatgacactgcatttgtatccctgtggatgtagagtattgggaaggcatttgtttagtttcatgcctccaaaccatgcattgtctgtgatgtatctgcccagccttctcagaactcaatgttgtacatttttccctctaggacctgaattggtcttggaggcagcttttagaaatcctctatgtagttcctgtccacatgcactatatatttgtttcttctttctcctctcatgaatctgctcgtttctctacttctgtctacgtagaagcactcagcaactagtttctgctcattaaatgtgttctatatactaggctcagtgctttacatgtgtttgtcttaccngagtttcacttttccaaagtagtcatccacaaagtatgaggcagacagatctaagagaagaaagacagctgaggtagattcaaatcttttctgacatggatggtggctttttactcagaaatatatacctatttccatgggtatttgtgggcctgaggcatgcttggcaagaagagtctggtttctcgtctgctatgcaagccaaagggactttaatgttctttgaattgaaccctccttagctctgtggaaagagacagtcaggaatatttgggaattagacggcaatactttgtggggtttattagagcccatgcttgcctccagagatacagttcttttagtgaccagatactgccaaattgatgtgttcttgctttccaggtgagctttttgttcttaagattaagaaacctatgaaggatctgcagccaggcatggtggctcaggcctataatctcagcactttgggaaatcgaggtgggtggatcgcttgagcccaggagtttgagaccagcctgggcaacataatgaaaccctatctttacaaaaaaatacaaaaattagctgggcgtggtggtgcacacctgtagtcccagctactcgggaggctgaaatgggaggattgcttgagcctggcaggtcaaggctgcgatgggacatggtcatgccactggacgccagcctgggccacagagggagaccctgtctcaaaaaaagaaaagaaaaaagaaaaaggtctgcccacaaaatcactagcttattatttgcttcctgtgtgcctgcttgtctacctagcatagtaggccaaaggtccaaaggcatttagcattcctaggggaaattgtggctgtttttctgagccagatctcttgatttgggtttacacggagtcctttcatggactatcctgagtattgtcagtaaaacgtcttggggcataagaacttgtctgaatctgtcatacataccactgctgtcttttccgagtggtattacaagaaagatttttgtggtgtgtttgttctaagagaaatgccaaggctttcagataaagataagatgataatgattgaca

SEQ ID NO: 332669 - DNA, 1229 bp, Homo sapiens
gggtaaaaggccggtacctcgggcaagatggctatcaagagtatcgcttcccgcctccggggttcccgtcgttttctgagcggcttcgtggctggggctgtagtgggcgctgcgggagctgggctcgcggccctgcagttcttccggagtcagggcgctgagggagcgttgacagggaagcagccggatggatctgcagaaaaggctgtcttggaacaatttggattccctttaactggaacagaggcaaggtgttacactaatcacgctttgtcttatgatcaggcaaagcgggtgcctagatgggttcttgaacatatttccaaaagcaagataatgggtgatgcagacagaaagcattgtaaatttaagcctgatcccaatatccctccaaccttcagtgccttcaatgaagattatgttggaagtgggtggtcacgaggacacatggctccagcaggaaataacaaattttcaagtaaagccatggctgaaaccttttacctttctaacattgtgcctcaggattttgataataattctggatattggaacagaatagaaatgtactgtcgagagctgacagaaaggtttgaagatgtttgggtggtatctgggcctttgaccttacctcagactagaggcgatggaaagaaaatagttagttaccaggtgattggcgaggacaacgtggcagtcccctcacacctttataaggtaatcctggcccgcagaagctcagtatctaccgaaccactggcgctaggggcctttgtggtacccaatgaagccatcggcttccagccccagttaactgaattccaagtgagcctccaggacctagagaagttgtcaggactggtgttttttcctcatttggatagaactagtgatatccggaatatctgctctgtggacacctgtaagctcctggatttccaggagttcaccttgtacttgagtacaagaaagattgaaggagcccgatcagtgctcagactggaaaagatcatggaaaacttgaagaatgcagagattgaaccagatgattactttatgagtcgctatgagaagaagctagaagaactcaaagctaaggagcagtcaggaacccagataagaaagccatcctagtttttatctcaagatgtgtcataccgtctgtaatgaagcaggcatgccctctttaggctattctctggagaaaaataaaatggaaattgtactta

SEQ ID NO: 332670 - DNA, 3027 bp, Homo sapiens
attcccaactgccagtgatctctgaagcggactctgaggctccctctttgctctaacagacagcagcgactttaggctggataatagtcaaattcttacctcgctctttcactgctagtaagatcagattgcgtttctttcagttactcttcaatcgccagtttcttgatctgcttctaaaagaagaagtagagaagataaatcctgtcttcaatacctggaaggaaaaacaaaataacctcaactccgttttgaaaaaaacattccaagaactttcatcagagattttacttgacaggaaaggccatgtgaggacatagggagaaagcagccaccattggcaagccaagagagagccctcaccaggaacgattggaccagcaccttgatcttggattttctagcctccagaactgtgagatacaaatttctgttgtttaagccacacagtctgtgatattttgttacagcaaccctaatagactgagagagctcctgagagcttcactcacagaatcaattgtattcttacctggtgaagatccattctaagacttattggctgtttggaagtgatagcaaataaaagccaccttgaactgggtctgatgcagcattcttaccaaacttcaaacctggactagttcatccttatgcattgaggcttttttattcgtgttcgtttgtttttaccagttaactatcaacataaatttcatttataatattgtatgttcagtgttccaaaaaactggtcctaccaacatagtttggaatgactccattataagatggtgactgcctgtatcaaatctttactgcctttttcaaattcttaccatttttataaaaaggagtcacactactcaatctatacatcagtgttaaatatgatttttactaattttttttttttttaccaacactatcttaaaaaatctgacagcatagagcagtgattaaaggcatttgcttcagggtcaaatatagttacactgctgttttttggacaatttgttattttgaaccattgtttcttacctttataaaatgagcataagataatgttcttttaaggtgagtatgagatacaaatgagaaaagcaataataataaagattcaacaatggaaactgctatttacattatgattgttataattagaaggacaaactgtaatttaacgttcctatagtaataaaatggcatctacagagcaaatctaaacagacttaatcttcatataacaattcatcccagataatttgaattgaccataataacatgtttgaaaggaggctgaaataaaacagggtttgctcttttcaactctttagccaagactttttttaaaaaaaactggtatataaatgctttgtatttcctttcaagtttgaagggaaaataaatataatacttaatagattttcaagtatctctttagacattctcttgtttaggcttgtactaatccattcattcagggtttgactgttgggtgaacttctttgccctattcccagctgtgagaggcaattctccaggtttctaagctttagacctacgcccttctctgatgaggttaattagggtttgggctgaaacccagattcctatatatgtggatagagtgatgtagaagtactttatgataataaatataaatgaaatttagattttaatttagaaatagaaaacatttaggcaactcactgaatcaaaaataaatatagacaaatttaattaatatatttatttattatattttcctgggttgggctttggcctctatttcatatattttgtttatttttcaggatgttctgggataatgtagtccaggttctagttctgcctttgtcacttactagccatctagtcatataatgctgaaaaatatattatgtagctctaagataaattcaacgtacctgcatagcactattcaacatacttgcacagtattattgtcaatatgtagtctaacagataagaaaccactgtgaaaatagtaaaccattataaaaaatgatgttttataatgatacatctttgcacttctaatattattgctttaaataaatgtggtatatattcagcatacagccaaatttacaaaattttatctttttaattttatgtcatatataaagaaccttaatgccaaaataatctttatagtgatgactcgacatcccaaaaatgtgggacccaacagggacattaataaagagataaagcaggctctgtgccgacttgttagaatttggtacgtggcaaatgtgcagtcacacggccttaaacctcccctgggaaactgctcaaacatttgcattcccacaatgtatttattcaggaaatactcttttcctgagaaaaatctggctctcaaacctctccctgagattatgcaagttctccattggggaaatacagttggaaatctagtaaagaatgtttattaacaaaaatccatttgcagatcctagttattctcaatattttgtggatttacaattgagaatactacttgcaaaaagtaaacttcaaaaaaaggaaatagaaagctatcagaattcctgtagagtttgttgttccccttctcctccaacatagttttattctaatgttttctttattcattttctttggtattagtgtgctgtaaactcacccaaaatgaaaaacaatcaaaataaaataaaacaaaatgaaagcacatcagttaaagataaaacaaaacaaaaaacaggctgccaggttttagtggacagaagggtaggccccctggagatcagccaaattgagtggatggaagtaatcaacaacaagaggacaacaacattagccactgctgagcagaaaattagaaagattcttcaatttatttttttttcttttctggttgtcaggttttgtctctcctgtcttccactggtacaccataaatcagcagctaaaatgaaatttccttcttttagacatggcaaagtactcattgagcttagagattaatagtaaaacttt

SEQ ID NO: 332671 - DNA, 1182 bp, Homo sapiens
attcccaactgccagtgatctctgaagcggactctgaggctccctctttgctctaacagacagcagcgactttaggctggataatagtcaaattcttacctcgctctttcactgctagtaagatcagattgcgtttctttcagttactcttcaatcgccagtttcttgatctgcttctaaaagaagaagtagagaagataaatcctgtcttcaatacctggaaggaaaaacaaaataacctcaactccgttttgaaaaaaacattccaagaactttcatcagagattttacttgaacagcagtctcagcggttagcagcacaagagatgatttacacaatgaagaaagtacatgcactttgggcttctgtatgcctgctgcttaatcttgcccctgcccctcttaatgctgattctgaggaagatgaagaacacacaattatcacagatacggagttgccaccactgaaacttatgcattcattttgtgcattcaaggcggatgatggcccatgtaaagcaatcatgaaaagatttttcttcaatattttcactcgacagtgcgaagaatttatatatgggggatgtgaaggaaatcagaatcgatttgaaagtctggaagagtgcaaaaaaatgtgtacaagagataatgcaaacaggattataaagacaacattgcaacaagaaaagccagatttctgctttttggaagaagatcctggaatatgtcgaggttatattaccaggtatttttataacaatcagacaaaacagtgtgaacgtttcaagtatggtggatgcctgggcaatatgaacaattttgagacactggaagaatgcaagaacatttgtgaagatggtccgaatggtttccaggtggataattatggaacccagctcaatgctgtgaataactccctgactccgcaatcaaccaaggttcccagcctttttgttacaaaagaaggaacaaatgatggttggaagaatgcggctcatatttaccaagtctttctgaacgccttctgcattcatgcatccatgttctttctaggattggatagcatttcatgcctatgttaatatttgtgcttttggcatttccttaatatttatatgtatacgtgatgcctttgatagcatactgctaataaagttttaatatttacatgcatagtaaaca

SEQ ID NO: 332672 - DNA, 480 bp, Homo sapiens
  misc_feature (39)..(39): n is a, c, g, or t
aatgacgttcatattgtaaaattgtagttgcacgaaatnctagtcagctacattgaacaaatttcacggtccctcatggtgtctcactccagcagacagaggattgtgtcgtgccaatgagaacagattctactacaattcagtcattgggaaatgccgcccatttaagtacagtggatgtgggggaaatgaaaacaattttacttccaaacaagaatgtctgagggcatgtaaaaaaggtttcatccaaagaatatcaaaaggaggcctaattaaaaccaaaagaaaaagaaagaagcagagagtgaaaatagcatatgaagaaatttttgttaaaaatatgtgaatttgttatagcaatgtaacattaattctactaaatattttatatgaaatgtttcactatgattttctatttttcttctaaaatgcttttaattaatatgttcattaaattttctatgcttattgtacttgtta

SEQ ID NO: 332673 - DNA, 482 bp, Homo sapiens
aatctgccttttcactaccataaggaggccttctttctgtctctctcccctggcttcttactatgattccttcaatacttgtactattagatattgtgtttgctctgcctcactgtctagattacaagatttttttgaagaaaaacataatgtactatacagtttatagacttcccccaccctcagcattgaccacagtgttaaacatataaagatgactcacattttttatttatcaattttgtgatccacagttacaaaagaaggaacaaatgatggttggaagaatgcggctcatatttaccaagtctttctgaacgccttctgcattcatgcatccatgttctttctaggattggatagcatttcatgcctatgttaatatttgtgcttttggcatttccttaatatttatatgtatacgtgatgcctttgatagcatactgctaataaagttttaatatttacatgcatagtaaaca

SEQ ID NO: 332674 - DNA, 3919 bp, Homo sapiens
attcccaactgccagtgatctctgaagcggactctgaggctccctctttgctctaacagacagcagcgactttaggctggataatagtcaaattcttacctcgctctttcactgctagtaagatcagattgcgtttctttcagttactcttcaatcgccagtttcttgatctgcttctaaaagaagaagtagagaagataaatcctgtcttcaatacctggaaggaaaaacaaaataacctcaactccgttttgaaaaaaacattccaagaactttcatcagagattttacttagatgatttacacaatgaagaaagtacatgcactttgggcttctgtatgcctgctgcttaatcttgcccctgcccctcttaatgctgattctgaggaagatgaagaacacacaattatcacagatacggagttgccaccactgaaacttatgcattcattttgtgcattcaaggcggatgatggcccatgtaaagcaatcatgaaaagatttttcttcaatattttcactcgacagtgcgaagaatttatatatgggggatgtgaaggaaatcagaatcgatttgaaagtctggaagagtgcaaaaaaatgtgtacaagagataatgcaaacaggattataaagacaacattgcaacaagaaaagccagatttctgctttttggaagaagatcctggaatatgtcgaggttatattaccaggtatttttataacaatcagacaaaacagtgtgaacgtttcaagtatggtggatgcctgggcaatatgaacaattttgagacactggaagaatgcaagaacatttgtgaagatggtccgaatggtttccaggtggataattatggaacccagctcaatgctgtgaataactccctgactccgcaatcaaccaaggttcccagcctttttgaatttcacggtccctcatggtgtctcactccagcagacagaggattgtgtcgtgccaatgagaacagattctactacaattcagtcattgggaaatgccgcccatttaagtacagtggatgtgggggaaatgaaaacaattttacttccaaacaagaatgtctgagggcatgtaaaaaaggtttcatccaaagaatatcaaaaggaggcctaattaaaaccaaaagaaaaagaaagaagcagagagtgaaaatagcatatgaagaaatttttgttaaaaatatgtgaatttgttatagcaatgtaacattaattctactaaatattttatatgaaatgtttcactatgattttctatttttcttctaaaatgcttttaattaatatgttcattaaattttctatgcttattgtacttgttatcaacacgtttgtatcagagttgcttttctaatcttgttaaattgcttattctaggtctgtaatttattaactggctactgggaaattacttattttctggatctatctgtattttcatttaactacaaattatcatactaccggctacatcaaatcagtcctttgattccatttggtgaccatctgtttgagaatatgatcatgtaaatgattatctcctttatagcctgtaaccagattaaggaatacagctcttaaaaaatcaagaacttcctgagtttcacatataaaatggtgacaaacacctgcttctgataaagtttatccaattttgtatttatagtattctattgtaataatagaattctattatgtgcttccctccttagacatagtttttctccttttgtactaaccagtacttccatctatattgagctaaactgtctttgaacagtcaactctgcatcatgtgcctgcctgatttggattggtttcacttttttttttgtttgaccatagcccattctatcagtcaagatgactgaataattgtgtgttaaatacaactcatgataaggagaacctttatggaaacaagaagttttatggcaatcgagagggaattatttatatgtacttcttaatactatgcttcccaatattttttcttactaaaaataacaaaaatatttaaaccttctgaaatctattcagttatcattaggatttgcacacaatgcaactaataattcatgctttaaaaagtaggttatttctgttgaagagaaaattatcagcagggaagagtctactagaaaattcatgtgctagtcattcttggggatttaatattttgctggagttaattcactatatccagacctgtatctttcatttattgctgagccatgtgcagtctggcatctcaacaacctcaacaacctcaacaacctccaagacatgtcagtttctgtagtgttcacctcaaatctgacactggaattggaactgatttagaaacaaccatttcattcatttggtatgactagcttcatgactagcttcatgaatagcttcatgaatagcttcatgacttctcgctaacaatgatagtataattctgcctgttcttcaggattgaaattttgaactcaatttagatttcctgttttccctcatataccacatctaaacagtctccaaatctttatgcttttttttttttttttcgaaaaagttcacccaatccctaggctttttacttttttctcttttctctttctctttttctctggtttttttttttttccattttgttttgtttgttatgtttttttagacagggtcccactctgtcacccaggctggagtgcagtggtgcaatcacaggtcactgaaacctcccacctagctgggactagaggtgcaggccaccacaccagctaatttatgtaatttttgtagagacgagtttcaccacgttacctaggcttgtcttgaacacctgggctcaagcaatcttccagccccagcctcccaaagtgctgggattacaggtataaaccacaatgcccccgtttttactctttactgcatccttcccatcagtattaattcctcagaaatttagtacattcctccaccatttcaaaatgctcccagaactcacactagttggtacttaactacaaccttcaacctcaccatttaattttgatgtatgtttttggatttaccaacagtactttctttcatgactactttgatttagttaagaatgctcactgtacactgaatgttaattactcagctaattcacactgatttcctgtttaaaaatatgatcccctccaggccattcatgtgaagtcagggtacagctgatgccagctacagaatcactatgtttcaatatggaatatgaaaagtcctaacacataattgcaaatcattttctactatggtatacaaattttatcattacaaaatagtatcagcttttttcacttaaggaaaataatacatcttcattcaaatattcagtgcataaataattgccttaaattgagtctttgctgtggaatttgagagttttggaaatcaaaggcccttgtgaaacatttcctgttgccatttatttatagatagcaatagcttcaaatgagtgggaaagtctacttaggtgaagtggtaaatagtcactaagattgtataaatagcgcattgatgagttgcctaattgttttctccaacaataaccactggtccattggttcactacttactcaagaaagacatatactgagatggcttgaaatgtttaatgcatgtgaacgttatttttaccgtgttttggaaaaagatcttgatgttattgtcttcctttattttccacaattaagtgcatctaactgtgaattgtatatggaattacattattcagcatatacatatatttacctgctttgttcattctctgtattcaaaattaacagatcatgctgaaaaccactcaaacgattatattttttacattataagaagtaaaatatattattctgaataatgaaa

SEQ ID NO: 332675 - DNA, 4295 bp, Homo sapiens
attcccaactgccagtgatctctgaagcggactctgaggctccctctttgctctaacagacagcagcgactttaggctggataatagtcaaattcttacctcgctctttcactgctagtaagatcagattgcgtttctttcagttactcttcaatcgccagtttcttgatctgcttctaaaagaagaagtagagaagataaatcctgtcttcaatacctggaaggaaaaacaaaataacctcaactccgttttgaaaaaaacattccaagaactttcatcagagattttacttagatgatttacacaatgaagaaagtacatgcactttgggcttctgtatgcctgctgcttaatcttgcccctgcccctcttaatgctgattctgaggaagatgaagaacacacaattatcacagatacggagttgccaccactgaaacttatgcattcattttgtgcattcaaggcggatgatggcccatgtaaagcaatcatgaaaagatttttcttcaatattttcactcgacagtgcgaagaatttatatatgggggatgtgaaggaaatcagaatcgatttgaaagtctggaagagtgcaaaaaaatgtgtacaagagataatgcaaacaggattataaagacaacattgcaacaagaaaagccagatttctgctttttggaagaagatcctggaatatgtcgaggttatattaccaggtatttttataacaatcagacaaaacagtgtgaacgtttcaagtatggtggatgcctgggcaatatgaacaattttgagacactggaagaatgcaagaacatttgtgaagatggtccgaatggtttccaggtggataattatggaacccagctcaatgctgtgaataactccctgactccgcaatcaaccaaggttcccagcctttttgaatttcacggtccctcatggtgtctcactccagcagacagaggattgtgtcgtgccaatgagaacagattctactacaattcagtcattgggaaatgccgcccatttaagtacagtggatgtgggggaaatgaaaacaattttacttccaaacaagaatgtctgagggcatgtaaaaaaggtttcatccaaagaatatcaaaaggaggcctaattaaaaccaaaagaaaaagaaagaagcagagagtgaaaatagcatatgaagaaatttttgttaaaaatatgtgaatttgttatagcaatgtaacattaattctactaaatattttatatgaaatgtttcactatgattttctatttttcttctaaaatgcttttaattaatatgttcattaaattttctatgcttattgtacttgttatcaacacgtttgtatcagagttgcttttctaatcttgttaaattgcttattctaggtctgtaatttattaactggctactgggaaattacttattttctggatctatctgtattttcatttaactacaaattatcatactaccggctacatcaaatcagtcctttgattccatttggtgaccatctgtttgagaatatgatcatgtaaatgattatctcctttatagcctgtaaccagattaaggaatacagctcttaaaaaatcaagaacttcctgagtttcacatataaaatggtgacaaacacctgcttctgataaagtttatccaattttgtatttatagtattctattgtaataatagaattctattatgtgcttccctccttagacatagtttttctccttttgtactaaccagtacttccatctatattgagctaaactgtctttgaacagtcaactctgcatcatgtgcctgcctgatttggattggtttcacttttttttttgtttgaccatagcccattctatcagtcaagatgactgaataattgtgtgttaaatacaactcatgataaggagaacctttatggaaacaagaagttttatggcaatcgagagggaattatttatatgtacttcttaatactatgcttcccaatattttttcttactaaaaataacaaaaatatttaaaccttctgaaatctattcagttatcattaggatttgcacacaatgcaactaataattcatgctttaaaaagtaggttatttctgttgaagagaaaattatcagcagggaagagtctactagaaaattcatgtgctagtcattcttggggatttaatattttgctggagttaattcactatatccagacctgtatctttcatttattgctgagccatgtgcagtctggcatctcaacaacctcaacaacctcaacaacctccaagacatgtcagtttctgtagtgttcacctcaaatctgacactggaattggaactgatttagaaacaaccatttcattcatttggtatgactagcttcatgactagcttcatgaatagcttcatgaatagcttcatgacttctcgctaacaatgatagtataattctgcctgttcttcaggattgaaattttgaactcaatttagatttcctgttttccctcatataccacatctaaacagtctccaaatctttatgcttttttttttttttttcgaaaaagttcacccaatccctaggctttttacttttttctcttttctctttctctttttctctggtttttttttttttccattttgttttgtttgttatgtttttttagacagggtcccactctgtcacccaggctggagtgcagtggtgcaatcacaggtcactgaaacctcccacctagctgggactagaggtgcaggccaccacaccagctaatttatgtaatttttgtagagacgagtttcaccacgttacctaggcttgtcttgaacacctgggctcaagcaatcttccagccccagcctcccaaagtgctgggattacaggtataaaccacaatgcccccgtttttactctttactgcatccttcccatcagtattaattcctcagaaatttagtacattcctccaccatttcaaaatgctcccagaactcacactagttggtacttaactacaaccttcaacctcaccatttaattttgatgtatgtttttggatttaccaacagtactttctttcatgactactttgatttagttaagaatgctcactgtacactgaatgttaattactcagctaattcacactgatttcctgtttaaaaatatgatcccctccaggccattcatgtgaagtcagggtacagctgatgccagctacagaatcactatgtttcaatatggaatatgaaaagtcctaacacataattgcaaatcattttctactatggtatacaaattttatcattacaaaatagtatcagcttttttcacttaaggaaaataatacatcttcattcaaatattcagtgcataaataattgccttaaattgagtctttgctgtggaatttgagagttttggaaatcaaaggcccttgtgaaacatttcctgttgccatttatttatagatagcaatagcttcaaatgagtgggaaagtctacttaggtgaagtggtaaatagtcactaagattgtataaatagcgcattgatgagttgcctaattgttttctccaacaataaccactggtccattggttcactacttactcaagaaagacatatactgagatggcttgaaatgtttaatgcatgtgaacgttatttttaccgtgttttggaaaaagatcttgatgttattgtcttcctttattttccacaattaagtgcatctaactgtgaattgtatatggaattacattattcagcatatacatatatttacctgctttgttcattctctgtattcaaaattaacagatcatgctgaaaaccactcaaacgattatattttttacattataagaagtaaaatatattattctgaataatgaaaaaaaaaaaaaaaaaaaaaaaaaagaaaaaaaaaaaaaaaaaaaaaaaaaagaaagaaaaaaaaaaagggggggaaaagaagggggaaaagggggggggggggctgtggcaaaaatactctgctcacgagggacgatctttaaacaaaccatgttttggagaagaaaagttatcaattagttggatttaaaaataataagggggcgtcttgtaaaaaaaatcatgtgtagtagtaaattctgtagttgtcgattagagaaaaaactctggggggggaaattaaggaaacattaagagtataacagcgggtgaaacaatcttatatgtgtgggtacaaaagtagagtgttgacgaatgtggtatttttaatataggca

SEQ ID NO: 332676 - DNA, 1344 bp, Homo sapiens
attcccaactgccagtgatctctgaagcggactctgaggctccctctttgctctaacagacagcagcgactttaggctggataatagtcaaattcttacctcgctctttcactgctagtaagatcagattgcgtttctttcagttactcttcaatcgccagtttcttgatctgcttctaaaagaagaagtagagaagataaatcctgtcttcaatacctggaaggaaaaacaaaataacctcaactccgttttgaaaaaaacattccaagaactttcatcagagattttacttagatgatttacacaatgaagaaagtacatgcactttgggcttctgtatgcctgctgcttaatcttgcccctgcccctcttaatgctgattctgaggaagatgaagaacacacaattatcacagatacggagttgccaccactgaaacttatgcattcattttgtgcattcaaggcggatgatggcccatgtaaagcaatcatgaaaagatttttcttcaatattttcactcgacagtgcgaagaatttatatatgggggatgtgaaggaaatcagaatcgatttgaaagtctggaagagtgcaaaaaaatgtgtacaagagataatgcaaacaggattataaagacaacattgcaacaagaaaagccagatttctgctttttggaagaagatcctggaatatgtcgaggttatattaccaggtatttttataacaatcagacaaaacagtgtgaacgtttcaagtatggtggatgcctgggcaatatgaacaattttgagacactggaagaatgcaagaacatttgtgaagatggtccgaatggtttccaggtggataattatggaacccagctcaatgctgtgaataactccctgactccgcaatcaaccaaggttcccagcctttttgaatttcacggtccctcatggtgtctcactccagcagacagaggattgtgtcgtgccaatgagaacagattctactacaattcagtcattgggaaatgccgcccatttaagtacagtggatgtgggggaaatgaaaacaattttacttccaaacaagaatgtctgagggcatgtaaaaaaggtttcatccaaagaatatcaaaaggaggcctaattaaaaccaaaagaaaaagaaagaagcagagagtgaaaatagcatatgaagaaatttttgttaaaaatatgtgaatttgttatagcaatgtaacattaattctactaaatattttatatgaaatgtttcactatgattttctatttttcttctaaaatgcttttaattaatatgttcattaaattttctatgcttattgtacttgtta

SEQ ID NO: 332677 - DNA, 4159 bp, Homo sapiens
attcccaactgccagtgatctctgaagcggactctgaggctccctctttgctctaacagacagcagcgactttaggctggataatagtcaaattcttacctcgctctttcactgctagtaagatcagattgcgtttctttcagttactcttcaatcgccagtttcttgatctgcttctaaaagaagaagtagagaagataaatcctgtcttcaatacctggaaggaaaaacaaaataacctcaactccgttttgaaaaaaacattccaagaactttcatcagagattttacttatgaagtcttgctctgttgcccaggctggagcgcagtggcacaatctcagctcactgaaaccttcgccccctgggctcaagctagccagtcttttagtaaacatttagtcaacaaatctgcaattataacggtacagtacgggtggctggcaagatggccgaataggaagagctccagtctacagctcccgcagagatcaacgcagaaggaacagcagtctcagcggttagcagcacaagagatgatttacacaatgaagaaagtacatgcactttgggcttctgtatgcctgctgcttaatcttgcccctgcccctcttaatgctgattctgaggaagatgaagaacacacaattatcacagatacggagttgccaccactgaaacttatgcattcattttgtgcattcaaggcggatgatggcccatgtaaagcaatcatgaaaagatttttcttcaatattttcactcgacagtgcgaagaatttatatatgggggatgtgaaggaaatcagaatcgatttgaaagtctggaagagtgcaaaaaaatgtgtacaagagataatgcaaacaggattataaagacaacattgcaacaagaaaagccagatttctgctttttggaagaagatcctggaatatgtcgaggttatattaccaggtatttttataacaatcagacaaaacagtgtgaacgtttcaagtatggtggatgcctgggcaatatgaacaattttgagacactggaagaatgcaagaacatttgtgaagatggtccgaatggtttccaggtggataattatggaacccagctcaatgctgtgaataactccctgactccgcaatcaaccaaggttcccagcctttttgaatttcacggtccctcatggtgtctcactccagcagacagaggattgtgtcgtgccaatgagaacagattctactacaattcagtcattgggaaatgccgcccatttaagtacagtggatgtgggggaaatgaaaacaattttacttccaaacaagaatgtctgagggcatgtaaaaaaggtttcatccaaagaatatcaaaaggaggcctaattaaaaccaaaagaaaaagaaagaagcagagagtgaaaatagcatatgaagaaatttttgttaaaaatatgtgaatttgttatagcaatgtaacattaattctactaaatattttatatgaaatgtttcactatgattttctatttttcttctaaaatgcttttaattaatatgttcattaaattttctatgcttattgtacttgttatcaacacgtttgtatcagagttgcttttctaatcttgttaaattgcttattctaggtctgtaatttattaactggctactgggaaattacttattttctggatctatctgtattttcatttaactacaaattatcatactaccggctacatcaaatcagtcctttgattccatttggtgaccatctgtttgagaatatgatcatgtaaatgattatctcctttatagcctgtaaccagattaaggaatacagctcttaaaaaatcaagaacttcctgagtttcacatataaaatggtgacaaacacctgcttctgataaagtttatccaattttgtatttatagtattctattgtaataatagaattctattatgtgcttccctccttagacatagtttttctccttttgtactaaccagtacttccatctatattgagctaaactgtctttgaacagtcaactctgcatcatgtgcctgcctgatttggattggtttcacttttttttttgtttgaccatagcccattctatcagtcaagatgactgaataattgtgtgttaaatacaactcatgataaggagaacctttatggaaacaagaagttttatggcaatcgagagggaattatttatatgtacttcttaatactatgcttcccaatattttttcttactaaaaataacaaaaatatttaaaccttctgaaatctattcagttatcattaggatttgcacacaatgcaactaataattcatgctttaaaaagtaggttatttctgttgaagagaaaattatcagcagggaagagtctactagaaaattcatgtgctagtcattcttggggatttaatattttgctggagttaattcactatatccagacctgtatctttcatttattgctgagccatgtgcagtctggcatctcaacaacctcaacaacctcaacaacctccaagacatgtcagtttctgtagtgttcacctcaaatctgacactggaattggaactgatttagaaacaaccatttcattcatttggtatgactagcttcatgactagcttcatgaatagcttcatgaatagcttcatgacttctcgctaacaatgatagtataattctgcctgttcttcaggattgaaattttgaactcaatttagatttcctgttttccctcatataccacatctaaacagtctccaaatctttatgcttttttttttttttttcgaaaaagttcacccaatccctaggctttttacttttttctcttttctctttctctttttctctggtttttttttttttccattttgttttgtttgttatgtttttttagacagggtcccactctgtcacccaggctggagtgcagtggtgcaatcacaggtcactgaaacctcccacctagctgggactagaggtgcaggccaccacaccagctaatttatgtaatttttgtagagacgagtttcaccacgttacctaggcttgtcttgaacacctgggctcaagcaatcttccagccccagcctcccaaagtgctgggattacaggtataaaccacaatgcccccgtttttactctttactgcatccttcccatcagtattaattcctcagaaatttagtacattcctccaccatttcaaaatgctcccagaactcacactagttggtacttaactacaaccttcaacctcaccatttaattttgatgtatgtttttggatttaccaacagtactttctttcatgactactttgatttagttaagaatgctcactgtacactgaatgttaattactcagctaattcacactgatttcctgtttaaaaatatgatcccctccaggccattcatgtgaagtcagggtacagctgatgccagctacagaatcactatgtttcaatatggaatatgaaaagtcctaacacataattgcaaatcattttctactatggtatacaaattttatcattacaaaatagtatcagcttttttcacttaaggaaaataatacatcttcattcaaatattcagtgcataaataattgccttaaattgagtctttgctgtggaatttgagagttttggaaatcaaaggcccttgtgaaacatttcctgttgccatttatttatagatagcaatagcttcaaatgagtgggaaagtctacttaggtgaagtggtaaatagtcactaagattgtataaatagcgcattgatgagttgcctaattgttttctccaacaataaccactggtccattggttcactacttactcaagaaagacatatactgagatggcttgaaatgtttaatgcatgtgaacgttatttttaccgtgttttggaaaaagatcttgatgttattgtcttcctttattttccacaattaagtgcatctaactgtgaattgtatatggaattacattattcagcatatacatatatttacctgctttgttcattctctgtattcaaaattaacagatcatgctgaaaaccactcaaacgattatattttttacattataagaagtaaaatatattattctgaataatgaaa

SEQ ID NO: 332678 - DNA, 4041 bp, Homo sapiens
attcccaactgccagtgatctctgaagcggactctgaggctccctctttgctctaacagacagcagcgactttaggctggataatagtcaaattcttacctcgctctttcactgctagtaagatcagattgcgtttctttcagttactcttcaatcgccagtttcttgatctgcttctaaaagaagaagtagagaagataaatcctgtcttcaatacctggaaggaaaaacaaaataacctcaactccgttttgaaaaaaacattccaagaactttcatcagagattttacttgacaggaaaggccatgtgaggacatagggagaaagcagccaccattggcaagccaagagagagccctcaccaggaacgattggaccagcaccttgatcttggattttctagcctccagaactagatgatttacacaatgaagaaagtacatgcactttgggcttctgtatgcctgctgcttaatcttgcccctgcccctcttaatgctgattctgaggaagatgaagaacacacaattatcacagatacggagttgccaccactgaaacttatgcattcattttgtgcattcaaggcggatgatggcccatgtaaagcaatcatgaaaagatttttcttcaatattttcactcgacagtgcgaagaatttatatatgggggatgtgaaggaaatcagaatcgatttgaaagtctggaagagtgcaaaaaaatgtgtacaagagataatgcaaacaggattataaagacaacattgcaacaagaaaagccagatttctgctttttggaagaagatcctggaatatgtcgaggttatattaccaggtatttttataacaatcagacaaaacagtgtgaacgtttcaagtatggtggatgcctgggcaatatgaacaattttgagacactggaagaatgcaagaacatttgtgaagatggtccgaatggtttccaggtggataattatggaacccagctcaatgctgtgaataactccctgactccgcaatcaaccaaggttcccagcctttttgaatttcacggtccctcatggtgtctcactccagcagacagaggattgtgtcgtgccaatgagaacagattctactacaattcagtcattgggaaatgccgcccatttaagtacagtggatgtgggggaaatgaaaacaattttacttccaaacaagaatgtctgagggcatgtaaaaaaggtttcatccaaagaatatcaaaaggaggcctaattaaaaccaaaagaaaaagaaagaagcagagagtgaaaatagcatatgaagaaatttttgttaaaaatatgtgaatttgttatagcaatgtaacattaattctactaaatattttatatgaaatgtttcactatgattttctatttttcttctaaaatgcttttaattaatatgttcattaaattttctatgcttattgtacttgttatcaacacgtttgtatcagagttgcttttctaatcttgttaaattgcttattctaggtctgtaatttattaactggctactgggaaattacttattttctggatctatctgtattttcatttaactacaaattatcatactaccggctacatcaaatcagtcctttgattccatttggtgaccatctgtttgagaatatgatcatgtaaatgattatctcctttatagcctgtaaccagattaaggaatacagctcttaaaaaatcaagaacttcctgagtttcacatataaaatggtgacaaacacctgcttctgataaagtttatccaattttgtatttatagtattctattgtaataatagaattctattatgtgcttccctccttagacatagtttttctccttttgtactaaccagtacttccatctatattgagctaaactgtctttgaacagtcaactctgcatcatgtgcctgcctgatttggattggtttcacttttttttttgtttgaccatagcccattctatcagtcaagatgactgaataattgtgtgttaaatacaactcatgataaggagaacctttatggaaacaagaagttttatggcaatcgagagggaattatttatatgtacttcttaatactatgcttcccaatattttttcttactaaaaataacaaaaatatttaaaccttctgaaatctattcagttatcattaggatttgcacacaatgcaactaataattcatgctttaaaaagtaggttatttctgttgaagagaaaattatcagcagggaagagtctactagaaaattcatgtgctagtcattcttggggatttaatattttgctggagttaattcactatatccagacctgtatctttcatttattgctgagccatgtgcagtctggcatctcaacaacctcaacaacctcaacaacctccaagacatgtcagtttctgtagtgttcacctcaaatctgacactggaattggaactgatttagaaacaaccatttcattcatttggtatgactagcttcatgactagcttcatgaatagcttcatgaatagcttcatgacttctcgctaacaatgatagtataattctgcctgttcttcaggattgaaattttgaactcaatttagatttcctgttttccctcatataccacatctaaacagtctccaaatctttatgcttttttttttttttttcgaaaaagttcacccaatccctaggctttttacttttttctcttttctctttctctttttctctggtttttttttttttccattttgttttgtttgttatgtttttttagacagggtcccactctgtcacccaggctggagtgcagtggtgcaatcacaggtcactgaaacctcccacctagctgggactagaggtgcaggccaccacaccagctaatttatgtaatttttgtagagacgagtttcaccacgttacctaggcttgtcttgaacacctgggctcaagcaatcttccagccccagcctcccaaagtgctgggattacaggtataaaccacaatgcccccgtttttactctttactgcatccttcccatcagtattaattcctcagaaatttagtacattcctccaccatttcaaaatgctcccagaactcacactagttggtacttaactacaaccttcaacctcaccatttaattttgatgtatgtttttggatttaccaacagtactttctttcatgactactttgatttagttaagaatgctcactgtacactgaatgttaattactcagctaattcacactgatttcctgtttaaaaatatgatcccctccaggccattcatgtgaagtcagggtacagctgatgccagctacagaatcactatgtttcaatatggaatatgaaaagtcctaacacataattgcaaatcattttctactatggtatacaaattttatcattacaaaatagtatcagcttttttcacttaaggaaaataatacatcttcattcaaatattcagtgcataaataattgccttaaattgagtctttgctgtggaatttgagagttttggaaatcaaaggcccttgtgaaacatttcctgttgccatttatttatagatagcaatagcttcaaatgagtgggaaagtctacttaggtgaagtggtaaatagtcactaagattgtataaatagcgcattgatgagttgcctaattgttttctccaacaataaccactggtccattggttcactacttactcaagaaagacatatactgagatggcttgaaatgtttaatgcatgtgaacgttatttttaccgtgttttggaaaaagatcttgatgttattgtcttcctttattttccacaattaagtgcatctaactgtgaattgtatatggaattacattattcagcatatacatatatttacctgctttgttcattctctgtattcaaaattaacagatcatgctgaaaaccactcaaacgattatattttttacattataagaagtaaaatatattattctgaataatgaaa

SEQ ID NO: 332679 - DNA, 4072 bp, Homo sapiens
attcccaactgccagtgatctctgaagcggactctgaggctccctctttgctctaacagacagcagcgactttaggctggataatagtcaaattcttacctcgctctttcactgctagtaagatcagattgcgtttctttcagttactcttcaatcgccagtttcttgatctgcttctaaaagaagaagtagagaagataaatcctgtcttcaatacctggaaggaaaaacaaaataacctcaactccgttttgaaaaaaacattccaagaactttcatcagagattttacttgacaggaaaggccatgtgaggacatagggagaaagcagccaccattggcaagccaagagagagccctcaccaggaacgattggaccagcaccttgatcttggattttctagcctccagaactgaacagcagtctcagcggttagcagcacaagagatgatttacacaatgaagaaagtacatgcactttgggcttctgtatgcctgctgcttaatcttgcccctgcccctcttaatgctgattctgaggaagatgaagaacacacaattatcacagatacggagttgccaccactgaaacttatgcattcattttgtgcattcaaggcggatgatggcccatgtaaagcaatcatgaaaagatttttcttcaatattttcactcgacagtgcgaagaatttatatatgggggatgtgaaggaaatcagaatcgatttgaaagtctggaagagtgcaaaaaaatgtgtacaagagataatgcaaacaggattataaagacaacattgcaacaagaaaagccagatttctgctttttggaagaagatcctggaatatgtcgaggttatattaccaggtatttttataacaatcagacaaaacagtgtgaacgtttcaagtatggtggatgcctgggcaatatgaacaattttgagacactggaagaatgcaagaacatttgtgaagatggtccgaatggtttccaggtggataattatggaacccagctcaatgctgtgaataactccctgactccgcaatcaaccaaggttcccagcctttttgaatttcacggtccctcatggtgtctcactccagcagacagaggattgtgtcgtgccaatgagaacagattctactacaattcagtcattgggaaatgccgcccatttaagtacagtggatgtgggggaaatgaaaacaattttacttccaaacaagaatgtctgagggcatgtaaaaaaggtttcatccaaagaatatcaaaaggaggcctaattaaaaccaaaagaaaaagaaagaagcagagagtgaaaatagcatatgaagaaatttttgttaaaaatatgtgaatttgttatagcaatgtaacattaattctactaaatattttatatgaaatgtttcactatgattttctatttttcttctaaaatgcttttaattaatatgttcattaaattttctatgcttattgtacttgttatcaacacgtttgtatcagagttgcttttctaatcttgttaaattgcttattctaggtctgtaatttattaactggctactgggaaattacttattttctggatctatctgtattttcatttaactacaaattatcatactaccggctacatcaaatcagtcctttgattccatttggtgaccatctgtttgagaatatgatcatgtaaatgattatctcctttatagcctgtaaccagattaaggaatacagctcttaaaaaatcaagaacttcctgagtttcacatataaaatggtgacaaacacctgcttctgataaagtttatccaattttgtatttatagtattctattgtaataatagaattctattatgtgcttccctccttagacatagtttttctccttttgtactaaccagtacttccatctatattgagctaaactgtctttgaacagtcaactctgcatcatgtgcctgcctgatttggattggtttcacttttttttttgtttgaccatagcccattctatcagtcaagatgactgaataattgtgtgttaaatacaactcatgataaggagaacctttatggaaacaagaagttttatggcaatcgagagggaattatttatatgtacttcttaatactatgcttcccaatattttttcttactaaaaataacaaaaatatttaaaccttctgaaatctattcagttatcattaggatttgcacacaatgcaactaataattcatgctttaaaaagtaggttatttctgttgaagagaaaattatcagcagggaagagtctactagaaaattcatgtgctagtcattcttggggatttaatattttgctggagttaattcactatatccagacctgtatctttcatttattgctgagccatgtgcagtctggcatctcaacaacctcaacaacctcaacaacctccaagacatgtcagtttctgtagtgttcacctcaaatctgacactggaattggaactgatttagaaacaaccatttcattcatttggtatgactagcttcatgactagcttcatgaatagcttcatgaatagcttcatgacttctcgctaacaatgatagtataattctgcctgttcttcaggattgaaattttgaactcaatttagatttcctgttttccctcatataccacatctaaacagtctccaaatctttatgcttttttttttttttttcgaaaaagttcacccaatccctaggctttttacttttttctcttttctctttctctttttctctggtttttttttttttccattttgttttgtttgttatgtttttttagacagggtcccactctgtcacccaggctggagtgcagtggtgcaatcacaggtcactgaaacctcccacctagctgggactagaggtgcaggccaccacaccagctaatttatgtaatttttgtagagacgagtttcaccacgttacctaggcttgtcttgaacacctgggctcaagcaatcttccagccccagcctcccaaagtgctgggattacaggtataaaccacaatgcccccgtttttactctttactgcatccttcccatcagtattaattcctcagaaatttagtacattcctccaccatttcaaaatgctcccagaactcacactagttggtacttaactacaaccttcaacctcaccatttaattttgatgtatgtttttggatttaccaacagtactttctttcatgactactttgatttagttaagaatgctcactgtacactgaatgttaattactcagctaattcacactgatttcctgtttaaaaatatgatcccctccaggccattcatgtgaagtcagggtacagctgatgccagctacagaatcactatgtttcaatatggaatatgaaaagtcctaacacataattgcaaatcattttctactatggtatacaaattttatcattacaaaatagtatcagcttttttcacttaaggaaaataatacatcttcattcaaatattcagtgcataaataattgccttaaattgagtctttgctgtggaatttgagagttttggaaatcaaaggcccttgtgaaacatttcctgttgccatttatttatagatagcaatagcttcaaatgagtgggaaagtctacttaggtgaagtggtaaatagtcactaagattgtataaatagcgcattgatgagttgcctaattgttttctccaacaataaccactggtccattggttcactacttactcaagaaagacatatactgagatggcttgaaatgtttaatgcatgtgaacgttatttttaccgtgttttggaaaaagatcttgatgttattgtcttcctttattttccacaattaagtgcatctaactgtgaattgtatatggaattacattattcagcatatacatatatttacctgctttgttcattctctgtattcaaaattaacagatcatgctgaaaaccactcaaacgattatattttttacattataagaagtaaaatatattattctgaataatgaaa

SEQ ID NO: 332680 - DNA, 4120 bp, Homo sapiens
attcccaactgccagtgatctctgaagcggactctgaggctccctctttgctctaacagacagcagcgactttaggctggataatagtcaaattcttacctcgctctttcactgctagtaagatcagattgcgtttctttcagttactcttcaatcgccagtttcttgatctgcttctaaaagaagaagtagagaagataaatcctgtcttcaatacctggaaggaaaaacaaaataacctcaactccgttttgaaaaaaacattccaagaactttcatcagagattttacttatgaagtcttgctctgttgcccaggctggagcgcagtggcacaatctcagctcactgaaaccttcgccccctgggctcaagctagccagtcttttagtaaacatttagtcaacaaatctgcaattataacggtacagtacgggtggctggcaagatggccgaataggaagagctccagtctacagctcccgcagagatcaacgcagaaggaacagcagtctcagcggttagcagcacaagagatgatttacacaatgaagaaagtacatgcactttgggcttctgtatgcctgctgcttaatcttgcccctgcccctcttaatgctgattctgaggaagatgaagaacacacaattatcacagatacggagttgccaccactgaaacttatgcattcattttgtgcattcaaggcggatgatggcccatgtaaagcaatcatgaaaagatttttcttcaatattttcactcgacagtgcgaagaatttatatatgggggatgtgaaggaaatcagaatcgatttgaaagtctggaagagtgcaaaaaaatgtgtacaagagaaaagccagatttctgctttttggaagaagatcctggaatatgtcgaggttatattaccaggtatttttataacaatcagacaaaacagtgtgaacgtttcaagtatggtggatgcctgggcaatatgaacaattttgagacactggaagaatgcaagaacatttgtgaagatggtccgaatggtttccaggtggataattatggaacccagctcaatgctgtgaataactccctgactccgcaatcaaccaaggttcccagcctttttgaatttcacggtccctcatggtgtctcactccagcagacagaggattgtgtcgtgccaatgagaacagattctactacaattcagtcattgggaaatgccgcccatttaagtacagtggatgtgggggaaatgaaaacaattttacttccaaacaagaatgtctgagggcatgtaaaaaaggtttcatccaaagaatatcaaaaggaggcctaattaaaaccaaaagaaaaagaaagaagcagagagtgaaaatagcatatgaagaaatttttgttaaaaatatgtgaatttgttatagcaatgtaacattaattctactaaatattttatatgaaatgtttcactatgattttctatttttcttctaaaatgcttttaattaatatgttcattaaattttctatgcttattgtacttgttatcaacacgtttgtatcagagttgcttttctaatcttgttaaattgcttattctaggtctgtaatttattaactggctactgggaaattacttattttctggatctatctgtattttcatttaactacaaattatcatactaccggctacatcaaatcagtcctttgattccatttggtgaccatctgtttgagaatatgatcatgtaaatgattatctcctttatagcctgtaaccagattaaggaatacagctcttaaaaaatcaagaacttcctgagtttcacatataaaatggtgacaaacacctgcttctgataaagtttatccaattttgtatttatagtattctattgtaataatagaattctattatgtgcttccctccttagacatagtttttctccttttgtactaaccagtacttccatctatattgagctaaactgtctttgaacagtcaactctgcatcatgtgcctgcctgatttggattggtttcacttttttttttgtttgaccatagcccattctatcagtcaagatgactgaataattgtgtgttaaatacaactcatgataaggagaacctttatggaaacaagaagttttatggcaatcgagagggaattatttatatgtacttcttaatactatgcttcccaatattttttcttactaaaaataacaaaaatatttaaaccttctgaaatctattcagttatcattaggatttgcacacaatgcaactaataattcatgctttaaaaagtaggttatttctgttgaagagaaaattatcagcagggaagagtctactagaaaattcatgtgctagtcattcttggggatttaatattttgctggagttaattcactatatccagacctgtatctttcatttattgctgagccatgtgcagtctggcatctcaacaacctcaacaacctcaacaacctccaagacatgtcagtttctgtagtgttcacctcaaatctgacactggaattggaactgatttagaaacaaccatttcattcatttggtatgactagcttcatgactagcttcatgaatagcttcatgaatagcttcatgacttctcgctaacaatgatagtataattctgcctgttcttcaggattgaaattttgaactcaatttagatttcctgttttccctcatataccacatctaaacagtctccaaatctttatgcttttttttttttttttcgaaaaagttcacccaatccctaggctttttacttttttctcttttctctttctctttttctctggtttttttttttttccattttgttttgtttgttatgtttttttagacagggtcccactctgtcacccaggctggagtgcagtggtgcaatcacaggtcactgaaacctcccacctagctgggactagaggtgcaggccaccacaccagctaatttatgtaatttttgtagagacgagtttcaccacgttacctaggcttgtcttgaacacctgggctcaagcaatcttccagccccagcctcccaaagtgctgggattacaggtataaaccacaatgcccccgtttttactctttactgcatccttcccatcagtattaattcctcagaaatttagtacattcctccaccatttcaaaatgctcccagaactcacactagttggtacttaactacaaccttcaacctcaccatttaattttgatgtatgtttttggatttaccaacagtactttctttcatgactactttgatttagttaagaatgctcactgtacactgaatgttaattactcagctaattcacactgatttcctgtttaaaaatatgatcccctccaggccattcatgtgaagtcagggtacagctgatgccagctacagaatcactatgtttcaatatggaatatgaaaagtcctaacacataattgcaaatcattttctactatggtatacaaattttatcattacaaaatagtatcagcttttttcacttaaggaaaataatacatcttcattcaaatattcagtgcataaataattgccttaaattgagtctttgctgtggaatttgagagttttggaaatcaaaggcccttgtgaaacatttcctgttgccatttatttatagatagcaatagcttcaaatgagtgggaaagtctacttaggtgaagtggtaaatagtcactaagattgtataaatagcgcattgatgagttgcctaattgttttctccaacaataaccactggtccattggttcactacttactcaagaaagacatatactgagatggcttgaaatgtttaatgcatgtgaacgttatttttaccgtgttttggaaaaagatcttgatgttattgtcttcctttattttccacaattaagtgcatctaactgtgaattgtatatggaattacattattcagcatatacatatatttacctgctttgttcattctctgtattcaaaattaacagatcatgctgaaaaccactcaaacgattatattttttacattataagaagtaaaatatattattctgaataatgaaa

SEQ ID NO: 332681 - DNA, 1117 bp, Homo sapiens
attcccaactgccagtgatctctgaagcggactctgaggctccctctttgctctaacagacagcagcgactttaggctggataatagtcaaattcttacctcgctctttcactgctagtaagatcagattgcgtttctttcagttactcttcaatcgccagtttcttgatctgcttctaaaagaagaagtagagaagataaatcctgtcttcaatacctggaaggaaaaacaaaataacctcaactccgttttgaaaaaaacattccaagaactttcatcagagattttacttagatgatttacacaatgaagaaagtacatgcactttgggcttctgtatgcctgctgcttaatcttgcccctgcccctcttaatgctgattctgaggaagatgaagaacacacaattatcacagatacggagttgccaccactgaaacttatgcattcattttgtgcattcaaggcggatgatggcccatgtaaagcaatcatgaaaagatttttcttcaatattttcactcgacagtgcgaagaatttatatatgggggatgtgaaggaaatcagaatcgatttgaaagtctggaagagtgcaaaaaaatgtgtacaagagataatgcaaacaggattataaagacaacattgcaacaagaaaagccagatttctgctttttggaagaagatcctggaatatgtcgaggttatattaccaggtatttttataacaatcagacaaaacagtgtgaacgtttcaagtatggtggatgcctgggcaatatgaacaattttgagacactggaagaatgcaagaacatttgtgaagatggtccgaatggtttccaggtggataattatggaacccagctcaatgctgtgaataactccctgactccgcaatcaaccaaggttcccagcctttttggtaagaatcttgtggattttattgcttccaggaaactattatcatgctaacaatgaagtggattgtgtattagaagtatgtctttaaatatatatatatacctgcgttgttgcttaataatgtgtttgttgaaatactgagattcaaattgtttaagacatttaatctcataaaagcaacaattttcctaatct

SEQ ID NO: 332682 - DNA, 331 bp, Homo sapiens
ggtatataaatgctttgtatttcctttcaagtttgaagggaaaataaatataatacttaatagattttcaagtatctctttagacattctcttgtttaggcttgtactaatccattcattcagggtttgactgttgggtgaacttctttgccctattcccagctgtgagaggcaattctccaggtttctaagctttagacctacgcccttctctgatgaggttaattagggtttgggctgaaacccagattcctatatatgtggatagagtgatgtagaagtactttatgataataaatataaatgaaatttagattttaatttagaaata

SEQ ID NO: 332683 - DNA, 318 bp, Homo sapiens
cccaatgtgactgcatttgaaggtaaggttttagggggtaattaacataaatgagataataaatgttcaatcctaattcagtaggattgatggccttaaagaaggccttagagaaaagatatctttctttctctccatgtgcacacaggacaggaaaggccatgtgaggacatagggagaaagcagccaccattggcaagccaagagagagccctcaccaggaacgattggaccagcaccttgatcttggattttctagcctccagaactgtgagatacaaatttctgttgtttaagccacacagtctgtgatatttt

SEQ ID NO: 332684 - DNA, 1151 bp, Homo sapiens
attcccaactgccagtgatctctgaagcggactctgaggctccctctttgctctaacagacagcagcgactttaggctggataatagtcaaattcttacctcgctctttcactgctagtaagatcagattgcgtttctttcagttactcttcaatcgccagtttcttgatctgcttctaaaagaagaagtagagaagataaatcctgtcttcaatacctggaaggaaaaacaaaataacctcaactccgttttgaaaaaaacattccaagaactttcatcagagattttacttagatgatttacacaatgaagaaagtacatgcactttgggcttctgtatgcctgctgcttaatcttgcccctgcccctcttaatgctgattctgaggaagatgaagaacacacaattatcacagatacggagttgccaccactgaaacttatgcattcattttgtgcattcaaggcggatgatggcccatgtaaagcaatcatgaaaagatttttcttcaatattttcactcgacagtgcgaagaatttatatatgggggatgtgaaggaaatcagaatcgatttgaaagtctggaagagtgcaaaaaaatgtgtacaagagataatgcaaacaggattataaagacaacattgcaacaagaaaagccagatttctgctttttggaagaagatcctggaatatgtcgaggttatattaccaggtatttttataacaatcagacaaaacagtgtgaacgtttcaagtatggtggatgcctgggcaatatgaacaattttgagacactggaagaatgcaagaacatttgtgaagatggtccgaatggtttccaggtggataattatggaacccagctcaatgctgtgaataactccctgactccgcaatcaaccaaggttcccagcctttttgttacaaaagaaggaacaaatgatggttggaagaatgcggctcatatttaccaagtctttctgaacgccttctgcattcatgcatccatgttctttctaggattggatagcatttcatgcctatgttaatatttgtgcttttggcatttccttaatatttatatgtatacgtgatgcctttgatagcatactgctaataaagttttaatatttacatgcatagtaaaca

SEQ ID NO: 332685 - DNA, 1949 bp, Homo sapiens
  misc_feature (654)..(654): n is a, c, g, or t
  misc_feature (1665)..(1665): n is a, c, g, or t
atcgcttctcggccttttggctaagatcaagtgtagtatctgttcttatcagtttaatatctgatacgtcctctatccgaggacaatatattaaatggatttttggaaataggagatggaataggagcttgctccgtccactccacgcatcgacctggtattgcagtacttccaggaacggtgcacctacagtacgggtggctggcaagatggccgaataggaagagctccagtctacagctcccgcagagatcaacgcagaaggtgggtgatttctgcatttccagctgaggtatctggctcatctcatcgggactggttagacagggggtgcagcccatagagggcaagccaaggcagggtggggcattgtttcaccagggaagtgccagggattggggaactccctcccctagccaggggaagccaagaggaactgtgccctgaggaatggtgcactctagcctagatacgatgcttttcccatggtcttcacaacccacagacccggagatttcctcaggtgcctaccccaccagggccctgggtttcaagcacaaaacaggaagccatttgtgcagacaccaagttagctgcaggagtttttttcataccccagtggtgcctggaatgccagtggacagatctgttcantcccctggaaagggggctgaagccagggagccaagtggtctagctcaacggatcccaccacctacagagcccagtaagctaacattcattggcttgaaattcttgctgctagcatagcagtctgaagtcgccctgggacgcactagcttggtagggggaggggcgtccaccattactgaggcttgagtagctggttttcccctcacagtgtaaacaaagccccagggaagttccaactgggcgaagcccacaacagctcagcaaagcctctgtaaacagactgcctccctagattcctcctctctaggcagggcatctctggaaaaaaaggcagcagccccagtcaggggcttatagatcaaactcccatctccctgggacagaacacctggggaaaggggaggctgtgggctcagcttcagcagacttaaatgtacctgcctgccagctctgaagagagcagaggatctctcagcacaccactcgagctctggtaagagacagactgcctcctcaagtggatccctgacacctgtgtctcctgactgggagacaactcccagcaggggcggatggacacctcatacaggacaattccagctggcatctgccaggtgccctctgggacaaagcttccagaggaagtaacaggcagcaaactttgctgttctgcagcctctgctggtgatacccaggcaaacagggtctggagtggacctcaggcaaactccagcagacctgcactgcagcagaggagcctgactttcagaaggaaaactaacgaacagaaaggaatagcatcaacatcaacgaaaaggacatccagacagaaaccccatctgaaggtcaccaacatcaaagaccaaaggtaggtaaatccatgcagatgaggaaaaaccagcgcaaaaaggctgaaaattcccaaaaccagaacacttctcctccaacagatcacactccttgccagcaagggaacagaactggacggagaatgagtttgatgaattgacngaagtaggcttcagaaggtggataataaactcctccaagctaagggagcatgttctaacccaatgcaaggaagctaaaaatcttaaaaaaaagattatagaaattgctaactagaataaccagtttagagaagaacataaatgacctgatggagctaaaaaacacagcatgagaacttcgtgaagcatacacaagtatcaatagctgaatcaatctagcagaaaaaaggatatcagaggtagaagattgacttaatgaaatgaagtgtcaagacaagattagag

SEQ ID NO: 332686 - DNA, 3862 bp, Homo sapiens
attcccaactgccagtgatctctgaagcggactctgaggctccctctttgctctaacagacagcagcgactttaggctggataatagtcaaattcttacctcgctctttcactgctagtaagatcagattgcgtttctttcagttactcttcaatcgccagtttcttgatctgcttctaaaagaagaagtagagaagataaatcctgtcttcaatacctggaaggaaaaacaaaataacctcaactccgttttgaaaaaaacattccaagaactttcatcagagattttacttagatgatttacacaatgaagaaagtacatgcactttgggcttctgtatgcctgctgcttaatcttgcccctgcccctcttaatgctgattctgaggaagatgaagaacacacaattatcacagatacggagttgccaccactgaaacttatgcattcattttgtgcattcaaggcggatgatggcccatgtaaagcaatcatgaaaagatttttcttcaatattttcactcgacagtgcgaagaatttatatatgggggatgtgaaggaaatcagaatcgatttgaaagtctggaagagtgcaaaaaaatgtgtacaagagataatgcaaacaggattataaagacaacattgcaacaagaaaagccagatttctgctttttggaagaagatcctggaatatgtcgaggttatattaccaggtatttttataacaatcagacaaaacagtgtgaacgtttcaagtatggtggatgcctgggcaatatgaacaattttgagacactggaagaatgcaagaacatttgtgaagatggtccgaatggtttccaggtggataattatggaacccagctcaatgctgtgaataactccctgactccgcaatcaaccaaggttcccagcctttttgaatttcacggtccctcatggtgtctcactccagcagacagaggattgtgtcgtgccaatgagaacagattctactacaattcagtcattgggaaatgccgcccatttaagtacagtggatgtgggggaaatgaaaacaattttacttccaaacaagaatgtctgagggcatgtaaaaaaggtttcatccaaagaatatcaaaaggaggcctaattaaaaccaaaagaaaaagaaagaagcagagagtgaaaatagcatatgaagaaatttttgttaaaaatatgtgaatttgttatagcaatgtaacattaattctactaaatattttatatgaaatgtttcactatgattttctatttttcttctaaaatgcttttaattaatatgttcattaaattttctatgcttattgtacttgttatcaacacgtttgtatcagagttgcttttctaatcttgttaaattgcttattctaggtctgtaatttattaactggctactgggaaattacttattttctggatctatctgtattttcatttaactacaaattatcatactaccggctacatcaaatcagtcctttgattccatttggtgaccatctgtttgagaatatgatcatgtaaatgattatctcctttatagcctgtaaccagattaaggaatacagctcttaaaaaatcaagaacttcctgagtttcacatataaaatggtgacaaacacctgcttctgataaagtttatccaattttgtatttatagtattctattgtaataatagaattctattatgtgcttccctccttagacatagtttttctccttttgtactaaccagtacttccatctatattgagctaaactgtctttgaacagtcaactctgcatcatgtgcctgcctgatttggattggtttcacttttttttttgtttgaccatagcccattctatcagtcaagatgactgaataattgtgtgttaaatacaactcatgataaggagaacctttatggaaacaagaagttttatggcaatcgagagggaattatttatatgtacttcttaatactatgcttcccaatattttttcttactaaaaataacaaaaatatttaaaccttctgaaatctattcagttatcattaggatttgcacacaatgcaactaataattcatgctttaaaaagtaggttatttctgttgaagagaaaattatcagcagggaagagtctactagaaaattcatgtgctagtcattcttggggatttaatattttgctggagttaattcactatatccagacctgtatctttcatttattgctgagccatgtgcagtctggcatctcaacaacctcaacaacctcaacaacctccaagacatgtcagtttctgtagtgttcacctcaaatctgacactggaattggaactgatttagaaacaaccatttcattcatttggtatgactagcttcatgactagcttcatgaatagcttcatgaatagcttcatgacttctcgctaacaatgatagtataattctgcctgttcttcaggattgaaattttgaactcaatttagatttcctgttttccctcatataccacatctaaacagtctccaaatctttatgcttttttttttttttttcgactctggtttttttttttttccattttgttttgtttgttatgtttttttagacagggtcccactctgtcacccaggctggagtgcagtggtgcaatcacaggtcactgaaacctcccacctagctgggactagaggtgcaggccaccacaccagctaatttatgtaatttttgtagagacgagtttcaccacgttacctaggcttgtcttgaacacctgggctcaagcaatcttccagccccagcctcccaaagtgctgggattacaggtataaaccacaatgcccccgtttttactctttactgcatccttcccatcagtattaattcctcagaaatttagtacattcctccaccatttcaaaatgctcccagaactcacactagttggtacttaactacaaccttcaacctcaccatttaattttgatgtatgtttttggatttaccaacagtactttctttcatgactactttgatttagttaagaatgctcactgtacactgaatgttaattactcagctaattcacactgatttcctgtttaaaaatatgatcccctccaggccattcatgtgaagtcagggtacagctgatgccagctacagaatcactatgtttcaatatggaatatgaaaagtcctaacacataattgcaaatcattttctactatggtatacaaattttatcattacaaaatagtatcagcttttttcacttaaggaaaataatacatcttcattcaaatattcagtgcataaataattgccttaaattgagtctttgctgtggaatttgagagttttggaaatcaaaggcccttgtgaaacatttcctgttgccatttatttatagatagcaatagcttcaaatgagtgggaaagtctacttaggtgaagtggtaaatagtcactaagattgtataaatagcgcattgatgagttgcctaattgttttctccaacaataaccactggtccattggttcactacttactcaagaaagacatatactgagatggcttgaaatgtttaatgcatgtgaacgttatttttaccgtgttttggaaaaagatcttgatgttattgtcttcctttattttccacaattaagtgcatctaactgtgaattgtatatggaattacattattcagcatatacatatatttacctgctttgttcattctctgtattcaaaattaacagatcatgctgaaaaccactcaaacgattatattttttacattataagaagtaaaatatattattctgaataatgaaa

SEQ ID NO: 332687 - DNA, 3865 bp, Homo sapiens
attcccaactgccagtgatctctgaagcggactctgaggctccctctttgctctaacagacagcagcgactttaggctggataatagtcaaattcttacctcgctctttcactgctagtaagatcagattgcgtttctttcagttactcttcaatcgccagtttcttgatctgcttctaaaagaagaagtagagaagataaatcctgtcttcaatacctggaaggaaaaacaaaataacctcaactccgttttgaaaaaaacattccaagaactttcatcagagattttacttagatgatttacacaatgaagaaagtacatgcactttgggcttctgtatgcctgctgcttaatcttgcccctgcccctcttaatgctgattctgaggaagatgaagaacacacaattatcacagatacggagttgccaccactgaaacttatgcattcattttgtgcattcaaggcggatgatggcccatgtaaagcaatcatgaaaagatttttcttcaatattttcactcgacagtgcgaagaatttatatatgggggatgtgaaggaaatcagaatcgatttgaaagtctggaagagtgcaaaaaaatgtgtacaagagataatgcaaacaggattataaagacaacattgcaacaagaaaagccagatttctgctttttggaagaagatcctggaatatgtcgaggttatattaccaggtatttttataacaatcagacaaaacagtgtgaacgtttcaagtatggtggatgcctgggcaatatgaacaattttgagacactggaagaatgcaagaacatttgtgaagatggtccgaatggtttccaggtggataattatggaacccagctcaatgctgtgaataactccctgactccgcaatcaaccaaggttcccagcctttttgaatttcacggtccctcatggtgtctcactccagcagacagaggattgtgtcgtgccaatgagaacagattctactacaattcagtcattgggaaatgccgcccatttaagtacagtggatgtgggggaaatgaaaacaattttacttccaaacaagaatgtctgagggcatgtaaaaaaggtttcatccaaagaatatcaaaaggaggcctaattaaaaccaaaagaaaaagaaagaagcagagagtgaaaatagcatatgaagaaatttttgttaaaaatatgtgaatttgttatagcaatgtaacattaattctactaaatattttatatgaaatgtttcactatgattttctatttttcttctaaaatgcttttaattaatatgttcattaaattttctatgcttattgtacttgttatcaacacgtttgtatcagagttgcttttctaatcttgttaaattgcttattctaggtctgtaatttattaactggctactgggaaattacttattttctggatctatctgtattttcatttaactacaaattatcatactaccggctacatcaaatcagtcctttgattccatttggtgaccatctgtttgagaatatgatcatgtaaatgattatctcctttatagcctgtaaccagattaaggaatacagctcttaaaaaatcaagaacttcctgagtttcacatataaaatggtgacaaacacctgcttctgataaagtttatccaattttgtatttatagtattctattgtaataatagaattctattatgtgcttccctccttagacatagtttttctccttttgtactaaccagtacttccatctatattgagctaaactgtctttgaacagtcaactctgcatcatgtgcctgcctgatttggattggtttcacttttttttttgtttgaccatagcccattctatcagtcaagatgactgaataattgtgtgttaaatacaactcatgataaggagaacctttatggaaacaagaagttttatggcaatcgagagggaattatttatatgtacttcttaatactatgcttcccaatattttttcttactaaaaataacaaaaatatttaaaccttctgaaatctattcagttatcattaggatttgcacacaatgcaactaataattcatgctttaaaaagtaggttatttctgttgaagagaaaattatcagcagggaagagtctactagaaaattcatgtgctagtcattcttggggatttaatattttgctggagttaattcactatatccagacctgtatctttcatttattgctgagccatgtgcagtctggcatctcaacaacctcaacaacctcaacaacctccaagacatgtcagtttctgtagtgttcacctcaaatctgacactggaattggaactgatttagaaacaaccatttcattcatttggtatgactagcttcatgactagcttcatgaatagcttcatgaatagcttcatgacttctcgctaacaatgatagtataattctgcctgttcttcaggattgaaattttgaactcaatttagatttcctgttttccctcatataccacatctaaacagtctccaaatctttatgcttttttttttttttttcgaaaaagttcacccaatccctaggctttttacttttttctcttttctctttctctttttctctggtttttttttttttccattttgttttgtttgttatgtttttttagacagggtcccactctgtcacccaggctggagtgcagtggtgcaatcacaggtcactgaaacctcccacctagctgggactagaggtgcaggccaccacaccagctaatttatgtaatttttgtagagacgagtttcaccacgttacctaggcttgtcttgaacacctgggctcaagcaatcttccagccccagcctcccaaagtgctgggattacaggtataaaccacaatgcccccgtttttactctttactgcatccttcccatcagtattaattcctcagaaatttagtacattcctccaccatttcaaaatgctcccagaactcacactagttggtacttaactacaaccttcaacctcaccatttaattttgatgtatgtttttggatttaccaacagtactttctttcatgactactttgatttagttaagaatgctcactgtacactgaatgttaattactcagctaattcacactgatttcctgtttaaaaatatgatcccctccaggccattcatgtgaagtcagggtacagctgatgccagctacagaatcactatgtttcaatatggaatatgaaaagtcctaacacataattgcaaatcattttctactatggtatacaaattttatcattacaaaatagtatcagcttttttcacttaaggaatctttgctgtggaatttgagagttttggaaatcaaaggcccttgtgaaacatttcctgttgccatttatttatagatagcaatagcttcaaatgagtgggaaagtctacttaggtgaagtggtaaatagtcactaagattgtataaatagcgcattgatgagttgcctaattgttttctccaacaataaccactggtccattggttcactacttactcaagaaagacatatactgagatggcttgaaatgtttaatgcatgtgaacgttatttttaccgtgttttggaaaaagatcttgatgttattgtcttcctttattttccacaattaagtgcatctaactgtgaattgtatatggaattacattattcagcatatacatatatttacctgctttgttcattctctgtattcaaaattaacagatcatgctgaaaaccactcaaacgattatattttttacattataagaagtaaaatatattattctgaataatgaaa

SEQ ID NO: 332688 - DNA, 4027 bp, Homo sapiens
attcccaactgccagtgatctctgaagcggactctgaggctccctctttgctctaacagacagcagcgactttaggctggataatagtcaaattcttacctcgctctttcactgctagtaagatcagattgcgtttctttcagttactcttcaatcgccagtttcttgatctgcttctaaaagaagaagtagagaagataaatcctgtcttcaatacctggaaggaaaaacaaaataacctcaactccgttttgaaaaaaacattccaagaactttcatcagagattttactttacagtacgggtggctggcaagatggccgaataggaagagctccagtctacagctcccgcagagatcaacgcagaaggaacagcagtctcagcggttagcagcacaagagatgatttacacaatgaagaaagtacatgcactttgggcttctgtatgcctgctgcttaatcttgcccctgcccctcttaatgctgattctgaggaagatgaagaacacacaattatcacagatacggagttgccaccactgaaacttatgcattcattttgtgcattcaaggcggatgatggcccatgtaaagcaatcatgaaaagatttttcttcaatattttcactcgacagtgcgaagaatttatatatgggggatgtgaaggaaatcagaatcgatttgaaagtctggaagagtgcaaaaaaatgtgtacaagagataatgcaaacaggattataaagacaacattgcaacaagaaaagccagatttctgctttttggaagaagatcctggaatatgtcgaggttatattaccaggtatttttataacaatcagacaaaacagtgtgaacgtttcaagtatggtggatgcctgggcaatatgaacaattttgagacactggaagaatgcaagaacatttgtgaagatggtccgaatggtttccaggtggataattatggaacccagctcaatgctgtgaataactccctgactccgcaatcaaccaaggttcccagcctttttgaatttcacggtccctcatggtgtctcactccagcagacagaggattgtgtcgtgccaatgagaacagattctactacaattcagtcattgggaaatgccgcccatttaagtacagtggatgtgggggaaatgaaaacaattttacttccaaacaagaatgtctgagggcatgtaaaaaaggtttcatccaaagaatatcaaaaggaggcctaattaaaaccaaaagaaaaagaaagaagcagagagtgaaaatagcatatgaagaaatttttgttaaaaatatgtgaatttgttatagcaatgtaacattaattctactaaatattttatatgaaatgtttcactatgattttctatttttcttctaaaatgcttttaattaatatgttcattaaattttctatgcttattgtacttgttatcaacacgtttgtatcagagttgcttttctaatcttgttaaattgcttattctaggtctgtaatttattaactggctactgggaaattacttattttctggatctatctgtattttcatttaactacaaattatcatactaccggctacatcaaatcagtcctttgattccatttggtgaccatctgtttgagaatatgatcatgtaaatgattatctcctttatagcctgtaaccagattaaggaatacagctcttaaaaaatcaagaacttcctgagtttcacatataaaatggtgacaaacacctgcttctgataaagtttatccaattttgtatttatagtattctattgtaataatagaattctattatgtgcttccctccttagacatagtttttctccttttgtactaaccagtacttccatctatattgagctaaactgtctttgaacagtcaactctgcatcatgtgcctgcctgatttggattggtttcacttttttttttgtttgaccatagcccattctatcagtcaagatgactgaataattgtgtgttaaatacaactcatgataaggagaacctttatggaaacaagaagttttatggcaatcgagagggaattatttatatgtacttcttaatactatgcttcccaatattttttcttactaaaaataacaaaaatatttaaaccttctgaaatctattcagttatcattaggatttgcacacaatgcaactaataattcatgctttaaaaagtaggttatttctgttgaagagaaaattatcagcagggaagagtctactagaaaattcatgtgctagtcattcttggggatttaatattttgctggagttaattcactatatccagacctgtatctttcatttattgctgagccatgtgcagtctggcatctcaacaacctcaacaacctcaacaacctccaagacatgtcagtttctgtagtgttcacctcaaatctgacactggaattggaactgatttagaaacaaccatttcattcatttggtatgactagcttcatgactagcttcatgaatagcttcatgaatagcttcatgacttctcgctaacaatgatagtataattctgcctgttcttcaggattgaaattttgaactcaatttagatttcctgttttccctcatataccacatctaaacagtctccaaatctttatgcttttttttttttttttcgaaaaagttcacccaatccctaggctttttacttttttctcttttctctttctctttttctctggtttttttttttttccattttgttttgtttgttatgtttttttagacagggtcccactctgtcacccaggctggagtgcagtggtgcaatcacaggtcactgaaacctcccacctagctgggactagaggtgcaggccaccacaccagctaatttatgtaatttttgtagagacgagtttcaccacgttacctaggcttgtcttgaacacctgggctcaagcaatcttccagccccagcctcccaaagtgctgggattacaggtataaaccacaatgcccccgtttttactctttactgcatccttcccatcagtattaattcctcagaaatttagtacattcctccaccatttcaaaatgctcccagaactcacactagttggtacttaactacaaccttcaacctcaccatttaattttgatgtatgtttttggatttaccaacagtactttctttcatgactactttgatttagttaagaatgctcactgtacactgaatgttaattactcagctaattcacactgatttcctgtttaaaaatatgatcccctccaggccattcatgtgaagtcagggtacagctgatgccagctacagaatcactatgtttcaatatggaatatgaaaagtcctaacacataattgcaaatcattttctactatggtatacaaattttatcattacaaaatagtatcagcttttttcacttaaggaaaataatacatcttcattcaaatattcagtgcataaataattgccttaaattgagtctttgctgtggaatttgagagttttggaaatcaaaggcccttgtgaaacatttcctgttgccatttatttatagatagcaatagcttcaaatgagtgggaaagtctacttaggtgaagtggtaaatagtcactaagattgtataaatagcgcattgatgagttgcctaattgttttctccaacaataaccactggtccattggttcactacttactcaagaaagacatatactgagatggcttgaaatgtttaatgcatgtgaacgttatttttaccgtgttttggaaaaagatcttgatgttattgtcttcctttattttccacaattaagtgcatctaactgtgaattgtatatggaattacattattcagcatatacatatatttacctgctttgttcattctctgtattcaaaattaacagatcatgctgaaaaccactcaaacgattatattttttacattataagaagtaaaatatattattctgaataatgaaa

SEQ ID NO: 332689 - DNA, 3950 bp, Homo sapiens
attcccaactgccagtgatctctgaagcggactctgaggctccctctttgctctaacagacagcagcgactttaggctggataatagtcaaattcttacctcgctctttcactgctagtaagatcagattgcgtttctttcagttactcttcaatcgccagtttcttgatctgcttctaaaagaagaagtagagaagataaatcctgtcttcaatacctggaaggaaaaacaaaataacctcaactccgttttgaaaaaaacattccaagaactttcatcagagattttacttgaacagcagtctcagcggttagcagcacaagagatgatttacacaatgaagaaagtacatgcactttgggcttctgtatgcctgctgcttaatcttgcccctgcccctcttaatgctgattctgaggaagatgaagaacacacaattatcacagatacggagttgccaccactgaaacttatgcattcattttgtgcattcaaggcggatgatggcccatgtaaagcaatcatgaaaagatttttcttcaatattttcactcgacagtgcgaagaatttatatatgggggatgtgaaggaaatcagaatcgatttgaaagtctggaagagtgcaaaaaaatgtgtacaagagataatgcaaacaggattataaagacaacattgcaacaagaaaagccagatttctgctttttggaagaagatcctggaatatgtcgaggttatattaccaggtatttttataacaatcagacaaaacagtgtgaacgtttcaagtatggtggatgcctgggcaatatgaacaattttgagacactggaagaatgcaagaacatttgtgaagatggtccgaatggtttccaggtggataattatggaacccagctcaatgctgtgaataactccctgactccgcaatcaaccaaggttcccagcctttttgaatttcacggtccctcatggtgtctcactccagcagacagaggattgtgtcgtgccaatgagaacagattctactacaattcagtcattgggaaatgccgcccatttaagtacagtggatgtgggggaaatgaaaacaattttacttccaaacaagaatgtctgagggcatgtaaaaaaggtttcatccaaagaatatcaaaaggaggcctaattaaaaccaaaagaaaaagaaagaagcagagagtgaaaatagcatatgaagaaatttttgttaaaaatatgtgaatttgttatagcaatgtaacattaattctactaaatattttatatgaaatgtttcactatgattttctatttttcttctaaaatgcttttaattaatatgttcattaaattttctatgcttattgtacttgttatcaacacgtttgtatcagagttgcttttctaatcttgttaaattgcttattctaggtctgtaatttattaactggctactgggaaattacttattttctggatctatctgtattttcatttaactacaaattatcatactaccggctacatcaaatcagtcctttgattccatttggtgaccatctgtttgagaatatgatcatgtaaatgattatctcctttatagcctgtaaccagattaaggaatacagctcttaaaaaatcaagaacttcctgagtttcacatataaaatggtgacaaacacctgcttctgataaagtttatccaattttgtatttatagtattctattgtaataatagaattctattatgtgcttccctccttagacatagtttttctccttttgtactaaccagtacttccatctatattgagctaaactgtctttgaacagtcaactctgcatcatgtgcctgcctgatttggattggtttcacttttttttttgtttgaccatagcccattctatcagtcaagatgactgaataattgtgtgttaaatacaactcatgataaggagaacctttatggaaacaagaagttttatggcaatcgagagggaattatttatatgtacttcttaatactatgcttcccaatattttttcttactaaaaataacaaaaatatttaaaccttctgaaatctattcagttatcattaggatttgcacacaatgcaactaataattcatgctttaaaaagtaggttatttctgttgaagagaaaattatcagcagggaagagtctactagaaaattcatgtgctagtcattcttggggatttaatattttgctggagttaattcactatatccagacctgtatctttcatttattgctgagccatgtgcagtctggcatctcaacaacctcaacaacctcaacaacctccaagacatgtcagtttctgtagtgttcacctcaaatctgacactggaattggaactgatttagaaacaaccatttcattcatttggtatgactagcttcatgactagcttcatgaatagcttcatgaatagcttcatgacttctcgctaacaatgatagtataattctgcctgttcttcaggattgaaattttgaactcaatttagatttcctgttttccctcatataccacatctaaacagtctccaaatctttatgcttttttttttttttttcgaaaaagttcacccaatccctaggctttttacttttttctcttttctctttctctttttctctggtttttttttttttccattttgttttgtttgttatgtttttttagacagggtcccactctgtcacccaggctggagtgcagtggtgcaatcacaggtcactgaaacctcccacctagctgggactagaggtgcaggccaccacaccagctaatttatgtaatttttgtagagacgagtttcaccacgttacctaggcttgtcttgaacacctgggctcaagcaatcttccagccccagcctcccaaagtgctgggattacaggtataaaccacaatgcccccgtttttactctttactgcatccttcccatcagtattaattcctcagaaatttagtacattcctccaccatttcaaaatgctcccagaactcacactagttggtacttaactacaaccttcaacctcaccatttaattttgatgtatgtttttggatttaccaacagtactttctttcatgactactttgatttagttaagaatgctcactgtacactgaatgttaattactcagctaattcacactgatttcctgtttaaaaatatgatcccctccaggccattcatgtgaagtcagggtacagctgatgccagctacagaatcactatgtttcaatatggaatatgaaaagtcctaacacataattgcaaatcattttctactatggtatacaaattttatcattacaaaatagtatcagcttttttcacttaaggaaaataatacatcttcattcaaatattcagtgcataaataattgccttaaattgagtctttgctgtggaatttgagagttttggaaatcaaaggcccttgtgaaacatttcctgttgccatttatttatagatagcaatagcttcaaatgagtgggaaagtctacttaggtgaagtggtaaatagtcactaagattgtataaatagcgcattgatgagttgcctaattgttttctccaacaataaccactggtccattggttcactacttactcaagaaagacatatactgagatggcttgaaatgtttaatgcatgtgaacgttatttttaccgtgttttggaaaaagatcttgatgttattgtcttcctttattttccacaattaagtgcatctaactgtgaattgtatatggaattacattattcagcatatacatatatttacctgctttgttcattctctgtattcaaaattaacagatcatgctgaaaaccactcaaacgattatattttttacattataagaagtaaaatatattattctgaataatgaaa

SEQ ID NO: 332690 - DNA, 3880 bp, Homo sapiens
attcccaactgccagtgatctctgaagcggactctgaggctccctctttgctctaacagacagcagcgactttaggctggataatagtcaaattcttacctcgctctttcactgctagtaagatcagattgcgtttctttcagttactcttcaatcgccagtttcttgatctgcttctaaaagaagaagtagagaagataaatcctgtcttcaatacctggaaggaaaaacaaaataacctcaactccgttttgaaaaaaacattccaagaactttcatcagagattttacttagatgatttacacaatgaagaaagtacatgcactttgggcttctgtatgcctgctgcttaatcttgcccctgcccctcttaatgctgattctgaggaagatgaagaacacacaattatcacagatacggagttgccaccactgaaacttatgcattcattttgtgcattcaaggcggatgatggcccatgtaaagcaatcatgaaaagatttttcttcaatattttcactcgacagtgcgaagaatttatatatgggggatgtgaaggaaatcagaatcgatttgaaagtctggaagagtgcaaaaaaatgtgtacaagagaaaagccagatttctgctttttggaagaagatcctggaatatgtcgaggttatattaccaggtatttttataacaatcagacaaaacagtgtgaacgtttcaagtatggtggatgcctgggcaatatgaacaattttgagacactggaagaatgcaagaacatttgtgaagatggtccgaatggtttccaggtggataattatggaacccagctcaatgctgtgaataactccctgactccgcaatcaaccaaggttcccagcctttttgaatttcacggtccctcatggtgtctcactccagcagacagaggattgtgtcgtgccaatgagaacagattctactacaattcagtcattgggaaatgccgcccatttaagtacagtggatgtgggggaaatgaaaacaattttacttccaaacaagaatgtctgagggcatgtaaaaaaggtttcatccaaagaatatcaaaaggaggcctaattaaaaccaaaagaaaaagaaagaagcagagagtgaaaatagcatatgaagaaatttttgttaaaaatatgtgaatttgttatagcaatgtaacattaattctactaaatattttatatgaaatgtttcactatgattttctatttttcttctaaaatgcttttaattaatatgttcattaaattttctatgcttattgtacttgttatcaacacgtttgtatcagagttgcttttctaatcttgttaaattgcttattctaggtctgtaatttattaactggctactgggaaattacttattttctggatctatctgtattttcatttaactacaaattatcatactaccggctacatcaaatcagtcctttgattccatttggtgaccatctgtttgagaatatgatcatgtaaatgattatctcctttatagcctgtaaccagattaaggaatacagctcttaaaaaatcaagaacttcctgagtttcacatataaaatggtgacaaacacctgcttctgataaagtttatccaattttgtatttatagtattctattgtaataatagaattctattatgtgcttccctccttagacatagtttttctccttttgtactaaccagtacttccatctatattgagctaaactgtctttgaacagtcaactctgcatcatgtgcctgcctgatttggattggtttcacttttttttttgtttgaccatagcccattctatcagtcaagatgactgaataattgtgtgttaaatacaactcatgataaggagaacctttatggaaacaagaagttttatggcaatcgagagggaattatttatatgtacttcttaatactatgcttcccaatattttttcttactaaaaataacaaaaatatttaaaccttctgaaatctattcagttatcattaggatttgcacacaatgcaactaataattcatgctttaaaaagtaggttatttctgttgaagagaaaattatcagcagggaagagtctactagaaaattcatgtgctagtcattcttggggatttaatattttgctggagttaattcactatatccagacctgtatctttcatttattgctgagccatgtgcagtctggcatctcaacaacctcaacaacctcaacaacctccaagacatgtcagtttctgtagtgttcacctcaaatctgacactggaattggaactgatttagaaacaaccatttcattcatttggtatgactagcttcatgactagcttcatgaatagcttcatgaatagcttcatgacttctcgctaacaatgatagtataattctgcctgttcttcaggattgaaattttgaactcaatttagatttcctgttttccctcatataccacatctaaacagtctccaaatctttatgcttttttttttttttttcgaaaaagttcacccaatccctaggctttttacttttttctcttttctctttctctttttctctggtttttttttttttccattttgttttgtttgttatgtttttttagacagggtcccactctgtcacccaggctggagtgcagtggtgcaatcacaggtcactgaaacctcccacctagctgggactagaggtgcaggccaccacaccagctaatttatgtaatttttgtagagacgagtttcaccacgttacctaggcttgtcttgaacacctgggctcaagcaatcttccagccccagcctcccaaagtgctgggattacaggtataaaccacaatgcccccgtttttactctttactgcatccttcccatcagtattaattcctcagaaatttagtacattcctccaccatttcaaaatgctcccagaactcacactagttggtacttaactacaaccttcaacctcaccatttaattttgatgtatgtttttggatttaccaacagtactttctttcatgactactttgatttagttaagaatgctcactgtacactgaatgttaattactcagctaattcacactgatttcctgtttaaaaatatgatcccctccaggccattcatgtgaagtcagggtacagctgatgccagctacagaatcactatgtttcaatatggaatatgaaaagtcctaacacataattgcaaatcattttctactatggtatacaaattttatcattacaaaatagtatcagcttttttcacttaaggaaaataatacatcttcattcaaatattcagtgcataaataattgccttaaattgagtctttgctgtggaatttgagagttttggaaatcaaaggcccttgtgaaacatttcctgttgccatttatttatagatagcaatagcttcaaatgagtgggaaagtctacttaggtgaagtggtaaatagtcactaagattgtataaatagcgcattgatgagttgcctaattgttttctccaacaataaccactggtccattggttcactacttactcaagaaagacatatactgagatggcttgaaatgtttaatgcatgtgaacgttatttttaccgtgttttggaaaaagatcttgatgttattgtcttcctttattttccacaattaagtgcatctaactgtgaattgtatatggaattacattattcagcatatacatatatttacctgctttgttcattctctgtattcaaaattaacagatcatgctgaaaaccactcaaacgattatattttttacattataagaagtaaaatatattattctgaataatgaaa

SEQ ID NO: 332691 - DNA, 3297 bp, Homo sapiens
ctgctacgcttttttgaccaagaactacagttactcatggaaatattaccttacaattatatttaaagattcactgtttgctaatttaacatagcaatgtgaatgaaattgccagaagtctgcttttttaactgttgtacgcttcatgagtccaaatatgagattgtgacaatgtttatctattttaattggctgtatttttttccagcgaatggtttccaggtggataattatggaacccagctcaatgctgtgaataactccctgactccgcaatcaaccaaggttcccagcctttttgaatttcacggtccctcatggtgtctcactccagcagacagaggattgtgtcgtgccaatgagaacagattctactacaattcagtcattgggaaatgccgcccatttaagtacagtggatgtgggggaaatgaaaacaattttacttccaaacaagaatgtctgagggcatgtaaaaaaggtttcatccaaagaatatcaaaaggaggcctaattaaaaccaaaagaaaaagaaagaagcagagagtgaaaatagcatatgaagaaatttttgttaaaaatatgtgaatttgttatagcaatgtaacattaattctactaaatattttatatgaaatgtttcactatgattttctatttttcttctaaaatgcttttaattaatatgttcattaaattttctatgcttattgtacttgttatcaacacgtttgtatcagagttgcttttctaatcttgttaaattgcttattctaggtctgtaatttattaactggctactgggaaattacttattttctggatctatctgtattttcatttaactacaaattatcatactaccggctacatcaaatcagtcctttgattccatttggtgaccatctgtttgagaatatgatcatgtaaatgattatctcctttatagcctgtaaccagattaaggaatacagctcttaaaaaatcaagaacttcctgagtttcacatataaaatggtgacaaacacctgcttctgataaagtttatccaattttgtatttatagtattctattgtaataatagaattctattatgtgcttccctccttagacatagtttttctccttttgtactaaccagtacttccatctatattgagctaaactgtctttgaacagtcaactctgcatcatgtgcctgcctgatttggattggtttcacttttttttttgtttgaccatagcccattctatcagtcaagatgactgaataattgtgtgttaaatacaactcatgataaggagaacctttatggaaacaagaagttttatggcaatcgagagggaattatttatatgtacttcttaatactatgcttcccaatattttttcttactaaaaataacaaaaatatttaaaccttctgaaatctattcagttatcattaggatttgcacacaatgcaactaataattcatgctttaaaaagtaggttatttctgttgaagagaaaattatcagcagggaagagtctactagaaaattcatgtgctagtcattcttggggatttaatattttgctggagttaattcactatatccagacctgtatctttcatttattgctgagccatgtgcagtctggcatctcaacaacctcaacaacctcaacaacctccaagacatgtcagtttctgtagtgttcacctcaaatctgacactggaattggaactgatttagaaacaaccatttcattcatttggtatgactagcttcatgactagcttcatgaatagcttcatgaatagcttcatgacttctcgctaacaatgatagtataattctgcctgttcttcaggattgaaattttgaactcaatttagatttcctgttttccctcatataccacatctaaacagtctccaaatctttatgcttttttttttttttttcgaaaaagttcacccaatccctaggctttttacttttttctcttttctctttctctttttctctggtttttttttttttccattttgttttgtttgttatgtttttttagacagggtcccactctgtcacccaggctggagtgcagtggtgcaatcacaggtcactgaaacctcccacctagctgggactagaggtgcaggccaccacaccagctaatttatgtaatttttgtagagacgagtttcaccacgttacctaggcttgtcttgaacacctgggctcaagcaatcttccagccccagcctcccaaagtgctgggattacaggtataaaccacaatgcccccgtttttactctttactgcatccttcccatcagtattaattcctcagaaatttagtacattcctccaccatttcaaaatgctcccagaactcacactagttggtacttaactacaaccttcaacctcaccatttaattttgatgtatgtttttggatttaccaacagtactttctttcatgactactttgatttagttaagaatgctcactgtacactgaatgttaattactcagctaattcacactgatttcctgtttaaaaatatgatcccctccaggccattcatgtgaagtcagggtacagctgatgccagctacagaatcactatgtttcaatatggaatatgaaaagtcctaacacataattgcaaatcattttctactatggtatacaaattttatcattacaaaatagtatcagcttttttcacttaaggaaaataatacatcttcattcaaatattcagtgcataaataattgccttaaattgagtctttgctgtggaatttgagagttttggaaatcaaaggcccttgtgaaacatttcctgttgccatttatttatagatagcaatagcttcaaatgagtgggaaagtctacttaggtgaagtggtaaatagtcactaagattgtataaatagcgcattgatgagttgcctaattgttttctccaacaataaccactggtccattggttcactacttactcaagaaagacatatactgagatggcttgaaatgtttaatgcatgtgaacgttatttttaccgtgttttggaaaaagatcttgatgttattgtcttcctttattttccacaattaagtgcatctaactgtgaattgtatatggaattacattattcagcatatacatatatttacctgctttgttcattctctgtattcaaaattaacagatcatgctgaaaaccactcaaacgattatattttttacattataagaagtaaaatatattattctgaataatgaaa

SEQ ID NO: 332692 - DNA, 846 bp, Homo sapiens
ctagaaacatacgtaccgtgactacatcgataaagttacatcatgctcacaggacagcatgtatgtggttgactcagctaatcaacacgggtgacttgtgggagcattatgatactgctcgaggctactgcgtgttacgcttcagagtcagagctgtagagccatgcaagacgggtactgtgcgccgtttgagaaatgaaaagtcctaacacataattgcaaatcattttctactatggtatacaaattttatcattacaaaatagtatcagcttttttcacttaaggaaaataatacatcttcattcaaatattcagtgcataaataattgccttaaattgagtctttgctgtggaatttgagagttttggaaatcaaaggcccttgtgaaacatttcctgttgccatttatttatagatagcaatagcttcaaatgagtgggaaagtctacttaggtgaagtggtaaatagtcactaagattgtataaatagcgcattgatgagttgcctaattgttttctccaacaataaccactggtccattggttcactacttactcaagaaagacatatactgagatggcttgaaatgtttaatgcatgtgaacgttatttttaccgtgttttggaaaaagatcttgatgttattgtcttcctttattttccacaattaagtgcatctaactgtgaattgtatatggaattacattattcagcatatacatatatttacctgctttgttcattctctgtattcaaaattaacagatcatgctgaaaaccactcaaacgattatattttttacattataagaagtaaaatatattattctgaataatgaaa

SEQ ID NO: 332693 - DNA, 225 bp, Homo sapiens
ctactggagctgtgagaagggggccactgccctccagaagtgagaatgacagaaccactagcagtttgcatcctgaacctggaaaagccacaggcactcaactctattctttttttttttcctttgagacagagtctcaccgtgtagcccaggccagagtgcaatggcacgatctcagctcactgaaacctctgcctcccaggttcaagcaattctcctgcctca

SEQ ID NO: 332694 - DNA, 546 bp, Homo sapiens
caaagcaactcactctagcttatatggtgagtaagcggtgcagctgggattcatgcctgggtccgtccacccctgaggccccagcttgtgactcctgtgctgtgctgtccgccagccacagcacggctcacggcacaccgtgagtgccacggcatggctcatggcacatggtgagtggccccttcattcctagaaggcagtcttgtgtggtagagcactgagccgggagtcaagagacatgggttccaaatccagcggtcattcccattgttctgtgattgtgggcaagtttcttactatcttgggttcccctcgaagcctcattttccccattacatgaagggttagattctataaactgtagttctcttccagctgtaagattcagggaattgaatgtacctcgtaatgcattggtgagggtgctgccagagagtggaagatggtgggaatggcctagaccagagcaggttcatagccaatggtggttatgcagattaagggcctagtagcaggggccatagccctgctactcacagatacgct

SEQ ID NO: 332695 - DNA, 3270 bp, Homo sapiens
ggggcctctggccgcctggctccaacatcaagcaccgggctccgagtggccgggatcagcgccccgaggcagaggccggagggcgcgcgcactgctaggaagtgctggtcccccgcgccgctctgccagcttggtcccccggcagacgcccctgtacgatcgccgctcgccccgcgggcgaggctgcggtggacagcgcggggctccggctggctcgccttcccgcctgccgtgtcctgctgagcgaccctggagtacacatccagatgccagcccagctaccacaggggatccctctgggagactgaaagtacaggttctggggcccaggttgaagccgaccaaccctgagcctcaggccaggggaatggcagcccccttggaggcccaggaccaggcccctggggagggagaagggcttctgattgtgaaagtggaagattcctcctgggaacaggaatctgcccagcatgaggatggcagggattccgaagcctgccgccagcgcttccggcaattctgctacggggatgtgcatgggcctcatgaggccttcagccagctctgggagctctgctgccgctggctgcggcccgagctgcgtaccaaggagcagatcctggagctgctggtgctggagcagttcctgacagtgctgccaggggagatccagggctgggtgcgtgagcagcacccgggaagcggtgaggaggctgtcgccttggtggaggacctacagaagcagccagtgaaagcctggcgacagggagtaaactctgtctcccccggtctggtctcgggctgatgagcatgttgtggttcctgcacaggatgtgccctcggaggaggcggaacccgaggctgcaggccggggatcccaggccacggggcctcccccgacggtgggggcacggaggcggccgtctgttccccaggagcagcacagccatagcgcccagcctcctgctcttcttaaagagggtcgtcccggagagacgacggacacctgctttgtctctggggtccatggacctgtggcattgggagacatcccattctatttctcccgggaagaatggggcaccctggaccctgctcagcgggatctcttctgggacataaagcgggagaactcccggaacaccaccctgggttttgggctcaaaggccaaagtgagaagtccctgctgcaggagatggtgccggtggtgccaggccagacaggcagcgacgtgactgtgtcctggagccccgaggaggctgaggcctgggagagcgagaaccggccgagggcggccctgggcccagtggtgggcgcgcgacgggggcggccacccactcgccggcgccagttccgggacctggcagccgagaagccgcacagctgcgggcagtgtggaaagcgcttccgctggggctcggacctggcgcggcaccagcgcacgcacacgggcgagaagccacacaagtgccctgagtgcgacaagagcttccgcagctcctcggacctggtgcgccaccaaggcgtgcacacgggcgagaagcccttctcctgttccgagtgcggcaagagcttcagccgcagcgcctacctggccgaccaccagcgcatacacacgggcgagaagcctttcggctgcagcgactgcggcaagagcttctcgctgcgctcctacctgctggaccatcggcgtgtgcacaccggtgagcggcccttcggctgcggagagtgcgacaagagcttcaagcagcgcgcgcacctcatcgcgcatcagagcctgcacgccaagatggcccagcccgtggggtgagcagctggcttggccggaaacccgggggaggcccagccacggcacatcctgctttgttcaccactgggactctccttccatctgtggccacctcccgggctgtccgagggaccccagggtacctcacactcggagctcgcctgccctgcttggctctgaggacctgcccagcgctcaaagggaacggaagccttcccctcccgcccccgatcttgtcctctttcccccttctgcgcctagcgttcctcttcccctctagtttcctggagccccaacacattcctggcagggacagcagggtggcaaggactcaggtctaggtcccttcccagaagcccccgagcctcatttgactgtgtggctctttggcccccaccctgtggggtgggtccatgggtcaggcctctgccctaccaacctgtgcctttcagtgggcgtggaggactggccttggccccccagggggctgctggactttgggagagacagcccacacctgtgggaccgcgggtcttagtcacggcggcaggggctttctggccccctcccactcccgtttccaggccatgaccactctgccctgtcctggccatacggactcggcctgcctttgccctcggcctacttgccctagcatgaggctctgagagccacctgcccaccaatctggtgaggataatggtggctccagcgacaggaggccaaccctggagaccaagaacagggcgcctggctgccatcttttcctccagaggtggggctgcaccagactcagcactagcactccatcagcactagcacctcactccatcagcactagcacctcactccatcggccccggcaccctgctccatcggcactggcgccctgctccatcggcactaatgctccactcggcgccccactccatcggccccgctccatcggcactaatgccccactcggcgccccactccatcagcactaatgctccactccattggcactaacgccccaactccagcggcactaatgacccgctcctttgacattggtgccccactccatcagcactaacgccctgctccatcggcactggtgtcccactccattgtcactaacgtccggctccatcggcactaccaccccgctccatcatcactatgtccagctccgtcggcactaccaccctgctccatcatcactacgtccagctccaacggcactggtgccccattccatcggcactaacgccccgctccaccggcaccagtgcctcgctccattggcaccaacgcccagctccaccggtactggctccctgctccatcggcactaacgccctgcttcattggcactttgctgctgcctcctgagcactgccttccatgaacagggacagaccagaggccctgcaaggactccccctcagacctccaaagggcaacagaagagtattaataaacgtgaaaacttaaa

SEQ ID NO: 332696 - DNA, 3226 bp, Homo sapiens
ggggcctctggccgcctggctccaacatcaagcaccgggctccgagtggccgggatcagcgccccgaggcagaggccggagggcgcgcgcactgctaggaagtgctggtcccccgcgccgctctgccagcttggtcccccggcagacgcccctgtacgatcgccgctcgccccgcgggcgaggctgcggtggacagcgcggggctccggctggctcgccttcccgcctgccgtgtcctgctgagcgaccctggagtacacatccagatgccagcccagctaccacaggggatccctctgggagactgaaagtacaggttctggggcccaggttgaagccgaccaaccctgagcctcaggccaggggaatggcagcccccttggaggcccaggaccaggcccctggggagggagaagggcttctgattgtgaaagtggaagattcctcctgggaacaggaatctgcccagcatgaggatggcagggattccgaagcctgccgccagcgcttccggcaattctgctacggggatgtgcatgggcctcatgaggccttcagccagctctgggagctctgctgccgctggctgcggcccgagctgcgtaccaaggagcagatcctggagctgctggtgctggagcagttcctgacagtgctgccaggggagatccagggctgggtgcgtgagcagcacccgggaagcggtgaggaggctgtcgccttggtggaggacctacagaagcagccagtgaaagcctggcgacagggagtaaactctgtctcccccggtctggtctcgggctgatgagcatgttgtggttcctgcacaggatgtgccctcggaggaggcggaacccgaggctgcaggccggggatcccaggccacggggcctcccccgacggtgggggcacggaggcggccgtctgttccccaggagcagcacagccatagcgcccagcctcctgctcttcttaaagagggtcgtcccggagagacgacggacacctgctttgtctctggggtccatggacctgtggcattgggagacatcccattctatttctcccgggaagaatggggcaccctggaccctgctcagcgggatctcttctgggacataaagcgggagaactcccggaacaccaccctgggttttgggctcaaaggccaaagtgagaagtccctgctgcaggagatggtgccggtggtgccaggccagacaggcagcgacgtgactgtgtcctggagccccgaggaggctgaggcctgggagagcgagaaccggccgagggcggccctgggcccagtggtgggcgcgcgacgggggcggccacccactcgccggcgccagttccgggacctggcagccgagaagccgcacagctgcgggcagtgtggaaagcgcttccgctggggctcggacctggcgcggcaccagcgcacgcacacgggcgagaagccacacaagtgccctgagtgcgacaagagcttccgcagctcctcggacctggtgcgccaccaaggcgtgcacacgggcgagaagcccttctcctgttccgagtgcggcaagagcttcagccgcagcgcctacctggccgaccaccagcgcatacacacgggcgagaagcctttcggctgcagcgactgcggcaagagcttctcgctgcgctcctacctgctggaccatcggcgtgtgcacaccggtgagcggcccttcggctgcggagagtgcgacaagagcttcaagcagcgcgcgcacctcatcgcgcatcagagcctgcacgccaagatggcccagcccgtggggtgagcagctggcttggccggaaacccgggggaggcccagccacggcacatcctgctttgttcaccactgggactctccttccatctgtggccacctcccgggctgtccgagggaccccagggtacctcacactcggagctcgcctgccctgcttggctctgaggacctgcccagcgctcaaagggaacggaagccttcccctcccgcccccgatcttgtcctctttcccccttctgcgcctagcgttcctcttcccctctagtttcctggagccccaacacattcctggcagggacagcagggtggcaaggactcaggtctaggtcccttcccagaagcccccgagcctcatttgactgtgtggctctttggcccccaccctgtggggtgggtccatgggtcaggcctctgccctaccaacctgtgcctttcagtgggcgtggaggactggccttggccccccagggggctgctggactttgggagagacagcccacacctgtgggaccgcgggtcttagtcacggcggcaggggctttctggccccctcccactcccgtttccaggccatgaccactctgccctgtcctggccatacggactcggcctgcctttgccctcggcctacttgccctagcatgaggctctgagagccacctgcccaccaatctggtgaggataatggtggctccagcgacaggaggccaaccctggagaccaagaacagggcgcctggctgccatcttttcctccagaggtggggctgcaccagactcagcactagcactccatcagcactagcacctcactccatcagcactagcacctcactccatcggccccggcaccctgctccatcggcactggcgccctgctccatcggcactaatgctccactcggcgccccactccatcggccccgctccatcggcactaatgccccactcggcgccccactccatcagcactaatgctccactccattggcactaacgccccaactccagcggcactaatgacccgctcctttgacattggtgccccactccatcagcactaacgccctgctccatcggcactggtgtcccactccattgtcactaacgtccgctccgtcggcactaccaccctgctccatcatcactacgtccagctccaacggcactggtgccccattccatcggcactaacgccccgctccaccggcaccagtgcctcgctccattggcaccaacgcccagctccaccggtactggctccctgctccatcggcactaacgccctgcttcattggcactttgctgctgcctcctgagcactgccttccatgaacagggacagaccagaggccctgcaaggactccccctcagacctccaaagggcaacagaagagtattaataaacgtgaaaacttaaa

SEQ ID NO: 332697 - DNA, 1055 bp, Homo sapiens
ttggcaggacactagtgcttggcaggacactagtgcttggcgggacactagtgcttggcaggacactagtgtttgggagagacagcccacacctgtgggaccgcgggtcttagtcacggcggcaggggctttctggccccctcccactcccgtttccaggccatgaccactctgccctgtcctggccatacggactcggcctgcctttgccctcggcctacttgccctagcatgaggctctgagagccacctgcccaccaatctggtgaggataatggtggctccagcgacaggaggccaaccctggagaccaagaacagggcgcctggctgccatcttttcctccagaggtggggctgcaccagactcagcactagcactccatcagcactagcacctcactccatcagcactagcacctcactccatcggccccggcaccctgctccatcggcactggcgccctgctccatcggcactaatgctccactcggcgccccactccatcggccccgctccatcggcactaatgccccactcggcgccccactccatcagcactaatgctccactccattggcactaacgccccaactccagcggcactaatgacccgctcctttgacattggtgccccactccatcagcactaacgccctgctccatcggcactggtgtcccactccattgtcactaacgtccggctccatcggcactaccaccccgctccatcatcactatgtccagctccgtcggcactaccaccctgctccatcatcactacgtccagctccaacggcactggtgccccattccatcggcactaacgccccgctccaccggcaccagtgcctcgctccattggcaccaacgcccagctccaccggtactggctccctgctccatcggcactaacgccctgcttcattggcactttgctgctgcctcctgagcactgccttccatgaacagggacagaccagaggccctgcaaggactccccctcagacctccaaagggcaacagaagagtattaataaacgtgaaaacttaaa

SEQ ID NO: 332698 - DNA, 464 bp, Homo sapiens
gcctctttcatctgacccatcctgtccccgccagtgctgctgggaggcctgagccgggtcttctcaccccattccagggacctgtggcattgggagacatcccattctatttctcccgggaagaatggggcaccctggaccctgctcagcgggatctcttctgggacataaagcgggagaactcccggaacaccaccctgggtaagcacccagggcctttgggtccaggctggccgcccccgattctgctggaacttcagtcttgtttcccaccccatccttagctggttccaaagcaggctctccctaggtcttgccaggagcctgagtaactcctttcttggctgatgatcagtttttgtgcgtttccacatgcagcatgggacggcgccggcgctgcccagccctgcagttgctctaagggcaacttctcctttgagtctcacaacctagtgcatggaagt

SEQ ID NO: 332699 - DNA, 3209 bp, Homo sapiens
ttcctgttcattggccatcggtcatggagaaggcgggctcagtggacgaacggctttctgggagctggggaatgcttgcgtacgtagtttcccagcgagccccgcgaggacttccggcgccgggagctcgcggcggaagtgggatctcctgggccgtagtgggcgttgtgtgtttcgggggcgaggctgcggtggacagcgcggggctccggctggctcgccttcccgcctgccgtgtcctgctgagcgaccctggagtacacatccagatgccagcccagctaccacaggggatccctctgggagactgaaagtacaggttctggggcccaggttgaagccgaccaaccctgagcctcaggccaggggaatggcagcccccttggaggcccaggaccaggcccctggggagggagaagggcttctgattgtgaaagtggaagattcctcctgggaacaggaatctgcccagcatgaggatggcagggattccgaagcctgccgccagcgcttccggcaattctgctacggggatgtgcatgggcctcatgaggccttcagccagctctgggagctctgctgccgctggctgcggcccgagctgcgtaccaaggagcagatcctggagctgctggtgctggagcagttcctgacagtgctgccaggggagatccagggctgggtgcgtgagcagcacccgggaagcggtgaggaggctgtcgccttggtggaggacctacagaagcagccagtgaaagcctggcgacaggatgtgccctcggaggaggcggaacccgaggctgcaggccggggatcccaggccacggggcctcccccgacggtgggggcacggaggcggccgtctgttccccaggagcagcacagccatagcgcccagcctcctgctcttcttaaagagggtcgtcccggagagacgacggacacctgctttgtctctggggtccatggacctgtggcattgggagacatcccattctatttctcccgggaagaatggggcaccctggaccctgctcagcgggatctcttctgggacataaagcgggagaactcccggaacaccaccctgggttttgggctcaaaggccaaagtgagaagtccctgctgcaggagatggtgccggtggtgccaggccagacaggcagcgacgtgactgtgtcctggagccccgaggaggctgaggcctgggagagcgagaaccggccgagggcggccctgggcccagtggtgggcgcgcgacgggggcggccacccactcgccggcgccagttccgggacctggcagccgagaagccgcacagctgcgggcagtgtggaaagcgcttccgctggggctcggacctggcgcggcaccagcgcacgcacacgggcgagaagccacacaagtgccctgagtgcgacaagagcttccgcagctcctcggacctggtgcgccaccaaggcgtgcacacgggcgagaagcccttctcctgttccgagtgcggcaagagcttcagccgcagcgcctacctggccgaccaccagcgcatacacacgggcgagaagcctttcggctgcagcgactgcggcaagagcttctcgctgcgctcctacctgctggaccatcggcgtgtgcacaccggtgagcggcccttcggctgcggagagtgcgacaagagcttcaagcagcgcgcgcacctcatcgcgcatcagagcctgcacgccaagatggcccagcccgtggggtgagcagctggcttggccggaaacccgggggaggcccagccacggcacatcctgctttgttcaccactgggactctccttccatctgtggccacctcccgggctgtccgagggaccccagggtacctcacactcggagctcgcctgccctgcttggctctgaggacctgcccagcgctcaaagggaacggaagccttcccctcccgcccccgatcttgtcctctttcccccttctgcgcctagcgttcctcttcccctctagtttcctggagccccaacacattcctggcagggacagcagggtggcaaggactcaggtctaggtcccttcccagaagcccccgagcctcatttgactgtgtggctctttggcccccaccctgtggggtgggtccatgggtcaggcctctgccctaccaacctgtgcctttcagtgggcgtggaggactggccttggccccccagggggctgctggactttgggagagacagcccacacctgtgggaccgcgggtcttagtcacggcggcaggggctttctggccccctcccactcccgtttccaggccatgaccactctgccctgtcctggccatacggactcggcctgcctttgccctcggcctacttgccctagcatgaggctctgagagccacctgcccaccaatctggtgaggataatggtggctccagcgacaggaggccaaccctggagaccaagaacagggcgcctggctgccatcttttcctccagaggtggggctgcaccagactcagcactagcactccatcagcactagcacctcactccatcagcactagcacctcactccatcggccccggcaccctgctccatcggcactggcgccctgctccatcggcactaatgctccactcggcgccccactccatcggccccgctccatcggcactaatgccccactcggcgccccactccatcagcactaatgctccactccattggcactaacgccccaactccagcggcactaatgacccgctcctttgacattggtgccccactccatcagcactaacgccctgctccatcggcactggtgtcccactccattgtcactaacgtccggctccatcggcactaccaccccgctccatcatcactatgtccagctccgtcggcactaccaccctgctccatcatcactacgtccagctccaacggcactggtgccccattccatcggcactaacgccccgctccaccggcaccagtgcctcgctccattggcaccaacgcccagctccaccggtactggctccctgctccatcggcactaacgccctgcttcattggcactttgctgctgcctcctgagcactgccttccatgaacagggacagaccagaggccctgcaaggactccccctcagacctccaaagggcaacagaagagtattaataaacgtgaaaacttaaa

SEQ ID NO: 332700 - DNA, 3318 bp, Homo sapiens
cccgaatagtaggagtgcgtcaccggtgttatttcagtcacgagggcgtcgcgttgtccgtttagttacattgtcagtggcccgacacttcgaatggccgggatcagcgccccgaggcagaggccggagggcgcgcgcactgctaggaagtgctggtcccccgcgccgctctgccagcttggtcccccggcagacgcccctgtacgatcgccgctcgccccgcgggcgaggctgcggtggacagcgcggggctccggctggctcgccttcccgcctgccgtgtcctgctgagcgaccctggagtacacatccagatgccagcccagctaccacaggggatccctctgggagactgaaagtacaggttctggggcccaggttgaagccgaccaaccctgagcctcaggccaggggaatggcagcccccttggaggcccaggaccaggcccctggggagggagaagggcttctgattgtgaaagtggaagattcctcctgggaacaggaatctgcccagcatgaggatggcagggattccgaagcctgccgccagcgcttccggcaattctgctacggggatgtgcatgggcctcatgaggccttcagccagctctgggagctctgctgccgctggctgcggcccgagctgcgtaccaaggagcagatcctggagctgctggtgctggagcagttcctgacagtgctgccaggggagatccagggctgggtgcgtgagcagcacccgggaagcggtgaggaggctgtcgccttggtggaggacctacagaagcagccagtgaaagcctggcgacagggagtaaactctgtctcccccggtctggtctcgggctgatgagcatgttgtggttcctgcacaggatgtgccctcggaggaggcggaacccgaggctgcaggccggggatcccaggccacggggcctcccccgacggtgggggcacggaggcggccgtctgttccccaggagcagcacagccatagcgcccagcctcctgctcttcttaaagagggtcgtcccggagagacgacggacacctgctttgtctctggggtccatggacctgtggcattgggagacatcccattctatttctcccgggaagaatggggcaccctggaccctgctcagcgggatctcttctgggacataaagcgggagaactcccggaacaccaccctgggttttgggctcaaaggccaaagtgagaagtccctgctgcaggagatggtgccggtggtgccaggccagacaggcagcgacgtgactgtgtcctggagccccgaggaggctgaggcctgggagagcgagaaccggccgagggcggccctgggcccagtggtgggcgcgcgacgggggcggccacccactcgccggcgccagttccgggacctggcagccgagaagccgcacagctgcgggcagtgtggaaagcgcttccgctggggctcggacctggcgcggcaccagcgcacgcacacgggcgagaagccacacaagtgccctgagtgcgacaagagcttccgcagctcctcggacctggtgcgccaccaaggcgtgcacacgggcgagaagcccttctcctgttccgagtgcggcaagagcttcagccgcagcgcctacctggccgaccaccagcgcatacacacgggcgagaagcctttcggctgcagcgactgcggcaagagcttctcgctgcgctcctacctgctggaccatcggcgtgtgcacaccggtgagcggcccttcggctgcggagagtgcgacaagagcttcaagcagcgcgcgcacctcatcgcgcatcagagcctgcacgccaagatggcccagcccgtggggtgagcagctggcttggccggaaacccgggggaggcccagccacggcacatcctgctttgttcaccactgggactctccttccatctgtggccacctcccgggctgtccgagggaccccagggtacctcacactcggagctcgcctgccctgcttggctctgaggacctgcccagcgctcaaagggaacggaagccttcccctcccgcccccgatcttgtcctctttcccccttctgcgcctagcgttcctcttcccctctagtttcctggagccccaacacattcctggcagggacagcagggtggcaaggactcaggtctaggtcccttcccagaagcccccgagcctcatttgactgtgtggctctttggcccccaccctgtggggtgggtccatgggtcaggcctctgccctaccaacctgtgcctttcagtgggcgtggaggactggccttggccccccagggggctgctggactttgggagagacagcccacacctgtgggaccgcgggtcttagtcacggcggcaggggctttctggccccctcccactcccgtttccaggccatgaccactctgccctgtcctggccatacggactcggcctgcctttgccctcggcctacttgccctagcatgaggctctgagagccacctgcccaccaatctggtgaggataatggtggctccagcgacaggaggccaaccctggagaccaagaacagggcgcctggctgccatcttttcctccagaggtggggctgcaccagactcagcactagcactccatcagcactagcacctcactccatcagcactagcacctcactccatcggccccggcaccctgctccatcggcactggcgccctgctccatcggcactaatgctccactcggcgccccactccatcggccccgctccatcggcactaatgccccactcggcgccccactccatcagcactaatgctccactccattggcactaacgccccaactccagcggcactaatgacccgctcctttgacattggtgccccactccatcagcactaacgccctgctccatcggcactggtgtcccactccattgtcactaacgtccggctccatcggcactaccaccccgctccatcatcactatgtccagctccgtcggcactaccaccctgctccatcatcactacgtccagctccaacggcactggtgccccattccatcggcactaacgccccgctccaccggcaccagtgcctcgctccattggcaccaacgcccagctccaccggtactggctccctgctccatcggcactaacgccctgcttcattggcactttgctgctgcctcctgagcactgccttccatgaacagggacagaccagaggccctgcaaggactccccctcagacctccaaagggcaacagaagagtattaataaacgtgaaaacttaaa

SEQ ID NO: 332701 - DNA, 2048 bp, Homo sapiens
ctgatacaggaaaccagtcttcttcaaaggtgatgagaatgccttgacaagatgatagggaccagcactgtacatttgttcccaagggaatactgcaacatgcaggcacagcccttggtcacctaatacatgtatttgtgaaattccatgggttcccttaagttgggagctaaaagggttagctttgggttagctgtggttttcactagtttctgcttgacaggatcagaagactgccgagacagatactgctatgctgaatttttcatgttcatctcagggactcactgcatactattttttaactacatgtgctattcagagttaggagatcttggatgggactccaaaataaatgatttaagaaattccataccttacattaggaccagagcttgtagtaaaggatgttgtgatatggttttgacccagaaggatgcttttgggtatcatcctcaagaatgtctgcaaaaggttttcagtgaagacaacaaagaatacctgtgctttcactgggaggaggaatgagcctgatggtagtagtgccttttgcttgtggtacatgtagccaaaagagctctgtgatgccaacaaacattgagaaaggtaatctttggtcactgccagctggattggccagtgcaccttgtattcagtactctatattgaagtatctgtcctttgactgtatgcggtgcttattgtacttagtttttagggccctgaaagctttctttgcacttactggttcaaatcccaacatcaactacatgttaaaagcagtcaggaaaagaatgatttggcttattttaagctttaagcataacatactgacagagcttatgaatatatatacaataaaatttatataataatataaatatataactagcttacacatcttaaaatttagatccagcacacaaaataacattttaaagctaaatactttggattttatgcatgagggaactacaaactgcacactttccacaagggagggaataaatacttttttctgtgtccttggagtgtgggtgggattcgtggatacatttctctggttcactatttcaatgatatgaaggagcctcatgttgcagcacagaagatttttcatcgttggaagttaaggttagttcaccttcattgattcctccctacactggactaaagcatttaatctagaaacacttaggtctctatatagcttgtcataatctctatgcatagaaaggggctttctagaacctgtcagcatattgtgaaatatctcctatatcaactgataataagaaatcagaattgcttaattgtggcattaataaagtatcacctagattgaactaagcaggaaaattttagatgagagtttaccatcacaagcaataaacacacaacagtccctgaatcctaaaaaggtggagttcttgatggtattagtgcgtatcttcaaattatttgctctctggaaagatgctgataaaattttgtccactaccatagtatccctgctggatgggaaccatatctttacaatagactctccacccattggcaaggtgatagctgtaaggacagtcaccttgcaagtgggcatgaagctgttaattttttttttttttttgtcaactgaggtttttctgctatggttctgaacccatttacctgatagactgggttatatattccccagttaacccactactgggttaagtgaccctaatgatattagtagccacttaattattttcaagcattctgcctaggacatcgtttcataaaattaaggtttaacagactgaatcccaacattagtagtataactaaattctctcaggagctttttatgaatgccttagtagtactttggcttcttgaagaggagctaatgccataaccctttttaaatcatccatctgcagctgggcatggtggctcacacctgtaatcccaacactttgggatgctgaggtcggcggatcacagggtcagcagttcaagaccagcctggccagcatagtgaaaccctgtcttcactaaataca

SEQ ID NO: 332702 - DNA, 393 bp, Homo sapiens
ctttctctgtgggggcccaggctagaccctcctgagactggctgaggcctgacctcaaaggacagcaaatgctggccctcagattccaggggccgccccttcaggtcattgccaccaggaagagctcacacatgcgcactttccctgctgagcttcagccttctttgtttcctaataatttcctctgattctacttcataggtaattttaacaactgctggggtgaactggaagagttccagttgctaaatttaagagccatggtaatttctcaatgtgtaataggaactgcaatgatataaaaacatatataggtaatttaccacacagggtttagctgtgccagggagattctcttattgttgcactttacagaggcacagagaggggagt

SEQ ID NO: 332703 - DNA, 2875 bp, Homo sapiens
  misc_feature (1030)..(1030): n is a, c, g, or t
caagggttgtgcttgggaaaagttggacctgttaattaaaagtaaaatatttccaaatcaatttggaaatgacttgaagtgtgagggaaagggattcataaaatttaggtataggaggccctggaaaaggacatttatcctagagggcacagggggtgtctctctggtaggggaagggtggggaggtggctttataagagtggtctgccttctccctttctcacttttcctcaccccttttctctcttcccccgcaaagctgcttccctgccctgccaccacctttagtgctttgtcttttttcccctttgcccatgctcagctgttaacccataaagacttcgttgattttgtgtgcatagtggatggtatggctgcattaatcccttcactgcctgtataccctagaatttgtccctgacactgacttcagagcatggtttgagttcatctcccatcattccccattgttgtgcttcccgtaaaaactgccagctttatcatttcccctggctctgcccacactgcatgtgtaggggctgaactatgggcaagtgtctgaccacccaggcaggtgagtgtgtgtcttctaatgcaagtctgtttctgtttttgttgtctttttaaactcatagaattgattgttgaaaataaggccatcaactgctaaaacaactactaaaataattctttttaatataaaaataactttgtcaaattcactttcagaagatttttcagatgtccctgttgagagcattgttctagataggttatatttgaaactgtgagcagaagcatgtgagcccatctgctatgatgagtaatagtcattgaggcctgaaacatacagtgctttaagcatgactgttattacaaagcatgcttctcccaccccacccaccccctcaaagaaggtagccattgaaacataaggatgatagatagaatgtattacttcaaatctaactcttagctggtggaggatttagtaatttagttgctttaggtcttgtaaaagctcctgccnctaactttaggagatgagaagtttgacccttaatgttcttgatatttttttagatcaactccacaatttactgtgatccaatccatctgctttctatctgttgtgctctatgattggttctcatttaccttcatttctgtattctactttccttaaactttaaggaaatctaatcacaactcctgaagacttacctttcttagatctgaaacttaagatcagtgtattataaaatggaatctcttagcagtcacagctacataaattgggattttaatagttgtctgtgctttgaattcttttcctttaaatgtctgtttcttttatgtaaagtttttcagtttggggaacgtgtagtcttcccctcccttttaatttctcaccaggatctaaaccccccttctctgtgaagcttaaatctgcattgtactctccctcctccccccccatcagtatccagcaggttacccttcagataaagaagggaagaagcctaaaggacagtcaaagaagcagcccagtggaaccacaaaaaggccaatttcagatgatgactgtccaagtgcctccaaagtgtacaaagcatcagattcagcagaagcaattgaggcttttcaactaactcctcaacagcaacatctcatcagagaagattgtcaaaaccagaagctgtgggatgaagtgctttcacatcttgtggaaggaccaaattttctgaaaaaattggaacaatcttttatgtgcgtttgctgtcaggagctagtttaccagcctgtgacaactgagtgcttccacaatgtctgtaaagattgcctacagcgctcctttaaggcacaggttttctcctgccctgcttgccggcatgatcttggccagaattacatcatgattcccaatgagattctgcagactctacttgaccttttcttccctggctacagcaaaggacgatgatctgcctgctttcactgtgttgttcatggtggctttttggacaataaagaatctaaaatgggtggggagggtggaagaaatggtggactgtatctctcacgttctgaagcagctaatcctctttcccacatagccatcatcttgtgtgtgtagtaagaggcccatttctcaactgtcttttaaatatctaaaggtagttcctgtaacaactagttttaatgagtaaaaagtcaaagcctcagctctagttgatatccaagttatgatttattttgcaactacctcaggacagaaaagatttatggggattttaaaaatcattgaataactagttaaatgaaattttagctacacactgcctcccaaatattagttgtgcctggttcttgtaatttgattttacagaaaaggaaatgacacttgagatccttggaatgaacacagcttctaaagtgtgcatatacttttttaacgtctcttcttccattacaatgtgtgttttgcaaggacaggttcattttttttagcccactttgtgaactccattgtgcttttttctggtgttttatgcaagttgactactaatgactaatgagaacaataatgaatgcattgttgctgcattagtgtaatgtggtgtggttttgcacttaaaagaggtattcatatgctctagttgtaaatgttcatgaaaatccacttctctactagtcgaactgcttttagtgtctcaccagtggttttacatctgcagagttttgagggctgtgctgacctttgagaggatttgaaattgcttcatattgtgatcctaaattttatattcactatattccctaaagtataccttaataaatattttatgatcagaaaaacactcaaaaaacttta

SEQ ID NO: 332704 - DNA, 555 bp, Homo sapiens
cataatcctattatctggaataatatggaaagaatcatagaatcttaaccatcaggtaaggtataattcaccttttaattgagctaatgactcgattgtgtacttgaagaaaaattacatggtataaagacttctttgttgttttttagggcattggccctaaactgtgatgctccattggaagtcagagtgatacgcagttttaaagggaggaagatcagcaaatatgctcctgaagaaggcaacagatatgatggcatttataaggtgctctatctggcatgacatcttgtttgtcattcttcctgggctttcaaggcagggttgttgcaaggaactactgtgggtgggctcgaggaaacagtagccatcttatattgctactttttctggaaattgaacagatgcataaagcaaactcttaacttcagcactttacttttaaggcttatttcgagttcctaggggcagagttgggttaaggtttttttttttaaaatgtaagtgtatgttctctataataaagccatttaagtaactggctgttgtataact

SEQ ID NO: 332705 - DNA, 207 bp, Homo sapiens
tgtcagaggaccccaaaagccatttctctacggttcgctttgtagctgtgctttggttttacatctgcagagttttgagggctgtgctgacctttgagaggatttgaaattgcttcatattgtgatcctaaattttatattcactatattccctaaagtataccttaataaatattttatgatcagaaaaacactcaaaaaacttta

SEQ ID NO: 332706 - DNA, 3385 bp, Homo sapiens
agctggcgagatccggcttggcgccgtgacctccatgtgggagctccagctctataagtaaacactctgcgcggcgcagacatggcctcttcctatctttgaggcggtgtctgcggcagcgcctcagagtggttccggtcgtctctcctcaagtcggctagtcgggcgcgcgcgctgagagtcgtcgccgcctgtcgggcccggcgtccggtcggtccggtgggcgcgctcgcccgcctgccgctgagggcccgagccgcagggaaagcggcgcgggccgggcggggcgcggcgcccagagctcagggggagacaaaggggaccggttcctctctaggcgccaagatgtggatacaggttcgcaccattgatggctccaagacgtgcaccattgaggacgtgtctcgcaaagccacgattgaggagctgcgcgagcgggtgtgggcgctgttcgacgtgcggcccgaatgccagcgcctcttctaccggggcaagcagttggaaaatggatataccttatttgattatgatgttggactgaatgatataattcagctgctagttcgcccagaccctgatcatcttcctggcacatctacacagattgaggctaaaccctgttctaatagtccacctaaagtaaagaaagctccgagggtaggaccttccaatcagccatctacatcagctcgtgcccgtcttattgatcctggctttggaatatataagatacccagaaagcggtactctagaaatgaatgtcaaggatcttagaccacgagctagaaccattttgaaatggaatgaactaaatgttggtgatgtggtaatggttaattataatgtagaaagtcctggacaaagaggattctggtttgatgcagaaattaccacattgaagacaatctcaaggaccaaaaaagaacttcgtgtgaaaattttcctggggggttctgaaggaacattaaatgactgcaagataatatctgtagatgaaatcttcaagattgagagacctggagcccatcccctttcatttgcagatggaaagtttttaaggcgaaatgaccctgaatgtgacctgtgtggtggagacccagaaaagaaatgtcattcttgctcctgtcgtgtatgtggtgggaaacatgaacccaacatgcagcttctgtgtgatgaatgtaatgtggcttatcatatttactgtctgaatccacctttggataaagtcccagaagaggaatactggtattgtccttcttgtaaaactgattccagtgaagttgtaaaggctggtgaaagactcaagatgagtaaaaagaaagcaaagatgccgtcagctagtactgaaagccgaagagactggggcaggggaatggcttgtgttggtcgtacgagagaatgtactattgtcccttctaatcattatggacccattcctggtattcctgttggatcaacttggagatttagagttcaggtgagcgaagcaggtgttcacagaccccatgttggtggaattcatggtcgaagtaatgatggggcttattctcttgtactggctggtggatttgcggatgaagtcgaccgaggtgatgagttcacatacactggaagcggtggtaaaaatcttgctggtaacaaaagaattggtgcaccttcagctgatcaaacattaacaaacatgaacagggcattggccctaaactgtgatgctccattggatgataaaattggagcagagtctcggaattggagagctggtaagccagtcagagtgatacgcagttttaaagggaggaagatcagcaaatatgctcctgaagaaggcaacagatatgatggcatttataaggtggtgaaatactggccagagatttcatcaagccatggattcttggtttggcgctatcttttaagaagagatgatgttgaacctgctccttggacctctgaaggaatagaacggtcaaggagattatgtctacgtttacagtatccagcaggttacccttcagataaagaagggaagaagcctaaaggacagtcaaagaagcagcccagtggaaccacaaaaaggccaatttcagatgatgactgtccaagtgcctccaaagtgtacaaagcatcagattcagcagaagcaattgaggcttttcaactaactcctcaacagcaacatctcatcagagaagattgtcaaaaccagaagctgtgggatgaagtgctttcacatcttgtggaaggaccaaattttctgaaaaaattggaacaatcttttatgtgcgtttgctgtcaggagctagtttaccagcctgtgacaactgagtgcttccacaatgtctgtaaagattgcctacagcgctcctttaaggcacaggttttctcctgccctgcttgccggcatgatcttggccagaattacatcatgattcccaatgagattctgcagactctacttgaccttttcttccctggctacagcaaaggacgatgatctgcctgctttcactgtgttgttcatggtggctttttggacaataaagaatctaaaatgggtggggagggtggaagaaatggtggactgtatctctcacgttctgaagcagctaatcctctttcccacatagccatcatcttgtgtgtgtagtaagaggcccatttctcaactgtcttttaaatatctaaaggtagttcctgtaacaactagttttaatgagtaaaaagtcaaagcctcagctctagttgatatccaagttatgatttattttgcaactacctcaggacagaaaagatttatggggattttaaaaatcattgaataactagttaaatgaaattttagctacacactgcctcccaaatattagttgtgcctggttcttgtaatttgattttacagaaaaggaaatgacacttgagatccttggaatgaacacagcttctaaagtgtgcatatacttttttaacgtctcttcttccattacaatgtgtgttttgcaaggacaggttcattttttttagcccactttgtgaactccattgtgcttttttctggtgttttatgcaagttgactactaatgactaatgagaacaataatgaatgcattgttgctgcattagtgtaatgtggtgtggttttgcacttaaaagaggtattcatatgctctagttgtaaatgttcatgaaaatccacttctctactagtcgaactgcttttagtgtctcaccagtggttttacatctgcagagttttgagggctgtgctgacctttgagaggatttgaaattgcttcatattgtgatcctaaattttatattcactatattccctaaagtataccttaataaatattttatgatcagaaaaacactcaaaaaacttta

SEQ ID NO: 332707 - DNA, 1666 bp, Homo sapiens
cataatcctattatctggaataatatggaaagaatcatagaatcttaaccatcagggcattggccctaaactgtgatgctccattggatgataaaattggagcagagtctcggaattggagagctggtaagccgtggtgaaatactggccagagatttcatcaagccatggattcttggtttggcgctatcttttaagaagagatgatgttgaacctgctccttggacctctgaaggaatagaacggtcaaggagattatgtctacgtttacagtatccagcaggttacccttcagataaagaagggaagaagcctaaaggacagtcaaagaagcagcccagtggaaccacaaaaaggccaatttcagatgatgactgtccaagtgcctccaaagtgtacaaagcatcagattcagcagaagcaattgaggcttttcaactaactcctcaacagcaacatctcatcagagaagattgtcaaaaccagaagctgtgggatgaagtgctttcacatcttgtggaaggaccaaattttctgaaaaaattggaacaatcttttatgtgcgtttgctgtcaggagctagtttaccagcctgtgacaactgagtgcttccacaatgtctgtaaagattgcctacagcgctcctttaaggcacaggttttctcctgccctgcttgccggcatgatcttggccagaattacatcatgattcccaatgagattctgcagactctacttgaccttttcttccctggctacagcaaaggacgatgatctgcctgctttcactgtgttgttcatggtggctttttggacaataaagaatctaaaatgggtggggagggtggaagaaatggtggactgtatctctcacgttctgaagcagctaatcctctttcccacatagccatcatcttgtgtgtgtagtaagaggcccatttctcaactgtcttttaaatatctaaaggtagttcctgtaacaactagttttaatgagtaaaaagtcaaagcctcagctctagttgatatccaagttatgatttattttgcaactacctcaggacagaaaagatttatggggattttaaaaatcattgaataactagttaaatgaaattttagctacacactgcctcccaaatattagttgtgcctggttcttgtaatttgattttacagaaaaggaaatgacacttgagatccttggaatgaacacagcttctaaagtgtgcatatacttttttaacgtctcttcttccattacaatgtgtgttttgcaaggacaggttcattttttttagcccactttgtgaactccattgtgcttttttctggtgttttatgcaagttgactactaatgactaatgagaacaataatgaatgcattgttgctgcattagtgtaatgtggtgtggttttgcacttaaaagaggtattcatatgctctagttgtaaatgttcatgaaaatccacttctctactagtcgaactgcttttagtgtctcaccagtggttttacatctgcagagttttgagggctgtgctgacctttgagaggatttgaaattgcttcatattgtgatcctaaattttatattcactatattccctaaagtataccttaataaatattttatgatcagaaaaacactcaaaaaacttta

SEQ ID NO: 332708 - DNA, 2646 bp, Homo sapiens
  misc_feature (801)..(801): n is a, c, g, or t
atcccggggaggtggctttataagagtggtctgcttccctgccctgccaccacctttagtgctttgtcttttttcccctttgcccatgctcagctgttaacccataaagacttcgttgattttgtgtgcatagtggatggtatggctgcattaatcccttcactgcctgtataccctagaatttgtccctgacactgacttcagagcatggtttgagttcatctcccatcattccccattgttgtgcttcccgtaaaaactgccagctttatcatttcccctggctctgcccacactgcatgtgtaggggctgaactatgggcaagtgtctgaccacccaggcaggtgagtgtgtgtcttctaatgcaagtctgtttctgtttttgttgtctttttaaactcatagaattgattgttgaaaataaggccatcaactgctaaaacaactactaaaataattctttttaatataaaaataactttgtcaaattcactttcagaagatttttcagatgtccctgttgagagcattgttctagataggttatatttgaaactgtgagcagaagcatgtgagcccatctgctatgatgagtaatagtcattgaggcctgaaacatacagtgctttaagcatgactgttattacaaagcatgcttctcccaccccacccaccccctcaaagaaggtagccattgaaacataaggatgatagatagaatgtattacttcaaatctaactcttagctggtggaggatttagtaatttagttgctttaggtcttgtaaaagctcctgccnctaactttaggagatgagaagtttgacccttaatgttcttgatatttttttagatcaactccacaatttactgtgatccaatccatctgctttctatctgttgtgctctatgattggttctcatttaccttcatttctgtattctactttccttaaactttaaggaaatctaatcacaactcctgaagacttacctttcttagatctgaaacttaagatcagtgtattataaaatggaatctcttagcagtcacagctacataaattgggattttaatagttgtctgtgctttgaattcttttcctttaaatgtctgtttcttttatgtaaagtttttcagtttggggaacgtgtagtcttcccctcccttttaatttctcaccaggatctaaaccccccttctctgtgaagcttaaatctgcattgtactctccctcctccccccccatcagtatccagcaggttacccttcagataaagaagggaagaagcctaaaggacagtcaaagaagcagcccagtggaaccacaaaaaggccaatttcagatgatgactgtccaagtgcctccaaagtgtacaaagcatcagattcagcagaagcaattgaggcttttcaactaactcctcaacagcaacatctcatcagagaagattgtcaaaaccagaagctgtgggatgaagtgctttcacatcttgtggaaggaccaaattttctgaaaaaattggaacaatcttttatgtgcgtttgctgtcaggagctagtttaccagcctgtgacaactgagtgcttccacaatgtctgtaaagattgcctacagcgctcctttaaggcacaggttttctcctgccctgcttgccggcatgatcttggccagaattacatcatgattcccaatgagattctgcagactctacttgaccttttcttccctggctacagcaaaggacgatgatctgcctgctttcactgtgttgttcatggtggctttttggacaataaagaatctaaaatgggtggggagggtggaagaaatggtggactgtatctctcacgttctgaagcagctaatcctctttcccacatagccatcatcttgtgtgtgtagtaagaggcccatttctcaactgtcttttaaatatctaaaggtagttcctgtaacaactagttttaatgagtaaaaagtcaaagcctcagctctagttgatatccaagttatgatttattttgcaactacctcaggacagaaaagatttatggggattttaaaaatcattgaataactagttaaatgaaattttagctacacactgcctcccaaatattagttgtgcctggttcttgtaatttgattttacagaaaaggaaatgacacttgagatccttggaatgaacacagcttctaaagtgtgcatatacttttttaacgtctcttcttccattacaatgtgtgttttgcaaggacaggttcattttttttagcccactttgtgaactccattgtgcttttttctggtgttttatgcaagttgactactaatgactaatgagaacaataatgaatgcattgttgctgcattagtgtaatgtggtgtggttttgcacttaaaagaggtattcatatgctctagttgtaaatgttcatgaaaatccacttctctactagtcgaactgcttttagtgtctcaccagtggttttacatctgcagagttttgagggctgtgctgacctttgagaggatttgaaattgcttcatattgtgatcctaaattttatattcactatattccctaaagtataccttaataaatattttatgatcagaaaaacactcaaaaaacttta

SEQ ID NO: 332709 - DNA, 1621 bp, Homo sapiens
cacccaggctggagtgcagtggcgtgatctcagctcactgcaagctccgccttcttggttcactccattctcctgcctcagcctccccagcagctgggactacaggcacacgccgccacgcccagataattttttgtatttttagtagcgatggggtttcactgtgttagccaggatggtgtcgatctcctgaccttgtgatccgcctgcccggcctctaaatagaagacattaaatgtgactgaaacatttttattgctaaataatagatggatatattttgggatacatgtgaaattttgatatgttcatataacatataataaatcagggtaattggaatgttcatcactataaacatcttttatgctgggaacatttgaattattctctactagctgttttgaaatacacagtagatgaattttattagcatattatgaactgctaacttttctttccttatccttggatactgttctagaattttctgaaaaaattggaacaatcttttatgtgcgtttgctgtcaggagctagtttaccagcctgtgacaactgagtgcttccacaatgtctgtaaagattgcctacagcgctcctttaaggcacaggttttctcctgccctgcttgccggcatgatcttggccagaattacatcatgattcccaatgagattctgcagactctacttgaccttttcttccctggctacagcaaaggacgatgatctgcctgctttcactgtgttgttcatggtggctttttggacaataaagaatctaaaatgggtggggagggtggaagaaatggtggactgtatctctcacgttctgaagcagctaatcctctttcccacatagccatcatcttgtgtgtgtagtaagaggcccatttctcaactgtcttttaaatatctaaaggtagttcctgtaacaactagttttaatgagtaaaaagtcaaagcctcagctctagttgatatccaagttatgatttattttgcaactacctcaggacagaaaagatttatggggattttaaaaatcattgaataactagttaaatgaaattttagctacacactgcctcccaaatattagttgtgcctggttcttgtaatttgattttacagaaaaggaaatgacacttgagatccttggaatgaacacagcttctaaagtgtgcatatacttttttaacgtctcttcttccattacaatgtgtgttttgcaaggacaggttcattttttttagcccactttgtgaactccattgtgcttttttctggtgttttatgcaagttgactactaatgactaatgagaacaataatgaatgcattgttgctgcattagtgtaatgtggtgtggttttgcacttaaaagaggtattcatatgctctagttgtaaatgttcatgaaaatccacttctctactagtcgaactgcttttagtgtctcaccagtggttttacatctgcagagttttgagggctgtgctgacctttgagaggatttgaaattgcttcatattgtgatcctaaattttatattcactatattccctaaagtataccttaataaatattttatgatcagaaaaacactcaaaaaacttta

SEQ ID NO: 332710 - DNA, 3257 bp, Homo sapiens
agctggcgagatccggcttggcgccgtgacctccatgtgggagctccagctctataagtaaacactctgcgcggcgcagacatggcctcttcctatctttgaggcggtgtctgcggcagcgcctcagagtggttccggtcgtctctcctcaagtcggctagtcgggcgcgcgcgctgagagtcgtcgccgcctgtcgggcccggcgtccggtcggtccggtgggcgcgctcgcccgcctgccgctgagggcccgagccgcagggaaagcggcgcgggccgggcggggcgcggcgcccagagctcagggggagacaaaggggaccggttcctctctaggcgccaagatgtggatacaggttcgcaccattgatggctccaagacgtgcaccattgaggacgtgtctcgcaaagccacgattgaggagctgcgcgagcgggtgtgggcgctgttcgacgtgcggcccgaatgccagcgcctcttctaccggggcaagcagttggaaaatggatataccttatttgattatgatgttggactgaatgatataattcagctgctagttcgcccagaccctgatcatcttcctggcacatctacacagattgaggctaaaccctgttctaatagtccacctaaagtaaagaaagctccgagggtaggaccttccaatcagccatctacatcagctcgtgcccgtcttattgatcctggctttggaatatataaggtaaatgaattggtggatgccagagatgtcggccttggtgcttggtttgaagcacacatacatagtgttactagagcttctgatggacagtcacgtggcaaaactccactgaagaatggcagttcttgtaaaaggactaatggaaatataaagcataaatccaaagagaacacaaataaattggacagtgtaccctctacgtctaattcagactgtgttgctgctgatgaagacgttatttaccatatccagtatgatgaatacccagaaagcggtactctagaaatgaatgtcaaggatcttagaccacgagctagaaccattttgaaatggaatgaactaaatgttggtgatgtggtaatggttaattataatgtagaaagtcctggacaaagaggattctggtttgatgcagaaattaccacattgaagacaatctcaaggaccaaaaaagaacttcgtgtgaaaattttcctggggggttctgaaggaacattaaatgactgcaagataatatctgtagatgaaatcttcaagattgagagacctggagcccatcccctttcatttgcagatggaaagtttttaaggcgaaatgaccctgaatgtgacctgtgtggtggagacccagaaaagaaatgtcattcttgctcctgtcgtgtatgtggtgggaaacatgaacccaacatgcagcttctgtgtgatgaatgtaatgtggcttatcatatttactgtctgaatccacctttggataaagtcccagaagaggaatactggtattgtccttcttgtaaaactgattccagtgaagttgtaaaggctggtgaaagactcaagatgagtaaaaagaaagcaaagatgccgtcagctagtactgaaagccgaagagactggggcaggggaatggcttgtgttggtcgtacgagagaatgtactattgtcccttctaatcattatggacccattcctggtattcctgttggatcaacttggagatttagagttcaggtgagcgaagcaggtgttcacagaccccatgttggtggaattcatggtcgaagtaatgatggggcttattctcttgtactggctggtggatttgcggatgaagtcgaccgaggtgatgagttcacatacactggaagcggtggtaaaaatcttgctggtaacaaaagaattggtgcaccttcagctgatcaaacattaacaaacatgaacagggcattggccctaaactgtgatgctccattggatgataaaattggagcagagtctcggaattggagagctggtaagccagtcagagtgatacgcagttttaaagggaggaagatcagcaaatatgctcctgaagaaggcaacagatatgatggcatttataaggtggtgaaatactggccagagatttcatcaagccatggattcttggtttggcgctatcttttaagaagagatgatgttgaacctgctccttggacctctgaaggaatagaacggtcaaggagattatgtctacgtttacagtatccagcaggttacccttcagataaagaagggaagaagcctaaaggacagtcaaagaagcagcccagtggaaccacaaaaaggccaatttcagatgatgactgtccaagtgcctccaaagtgtacaaagcatcagattcagcagaagcaattgaggcttttcaactaactcctcaacagcaacatctcatcagagaagattgtcaaaaccagaagctgtgggatgaagtgctttcacatcttgtggaaggaccaaattttctgaaaaaattggaacaatcttttatgtgcgtttgctgtcaggagctagtttaccagcctgtgacaactgagtgcttccacaatgtctgtaaagattgcctacagcgctcctttaaggcacaggttttctcctgccctgcttgccggcatgatcttggccagaattacatcatgattcccaatgagattctgcagactctacttgaccttttcttccctggctacagcaaaggacgatgatctgcctgctttcactgtgttgttcatggtggctttttggacaataaagaatctaaaatgggtggggagggtggaagaaatggtggactgtatctctcacgttctgaagcagctaatcctctttcccacatagccatcatcttgtgtgtgtagtaagaggcccatttctcaactgtcttttaaatatctaaaggtagttcctgtaacaactagttttaatgagtaaaaagtcaaagcctcagctctagttgatatccaagttatgatttattttgcaactacctcaggacagaaaagatttatggggattttaaaaatcattgaataactagttaaatgaaattttagctacacactgcctcccaaatattagttgtgcctggttcttgtaatttgattttacagaaaaggaaatgacacttgagatccttggaatgaacaacagtgcaggtatgaacaacagtgcaggtatgaacaacagtgcaggtatgaacaacagtgca

SEQ ID NO: 332711 - DNA, 2473 bp, Homo sapiens
agctggcgagatccggcttggcgccgtgacctccatgtgggagctccagctctataagtaaacactctgcgcggcgcagacatggcctcttcctatctttgaggcggtgtctgcggcagcgcctcagagtggttccggtcgtctctcctcaagtcggctagtcgggcgcgcgcgctgagagtcgtcgccgcctgtcgggcccggcgtccggtcggtccggtgggcgcgctcgcccgcctgccgctgagggcccgagccgcagggaaagcggcgcgggccgggcggggcgcggcgcccagagctcagggggagacaaaggggaccggttcctctctaggcgccaagatgtggatacaggttcgcaccattgatggctccaagacgtgcaccattgaggacgtgtctcgcaaagccacgattgaggagctgcgcgagcgggtgtgggcgctgttcgacgtgcggcccgaatgccagcgcctcttctaccggggcaagcagttggaaaatggatataccttatttgattatgatgttggactgaatgatataattcagctgctagttcgcccagaccctgatcatcttcctggcacatctacacagattgaggctaaaccctgttctaatagtccacctaaagtaaagaaagctccgagggtaggaccttccaatcagccatctacatcagctcgtgcccgtcttattgatcctggctttggaatatataaggtaaatgaattggtggatgccagagatgtcggccttggtgcttggtttgaagcacacatacatagtgttactagagcttctgatggacagtcacgtggcaaaactccactgaagaatggcagttcttgtaaaaggactaatggaaatataaagcataaatccaaagagaacacaaataaattggacagtgtaccctctacgtctaattcagactgtgttgctgctgatgaagacgttatttaccatatccagtatgatgaatacccagaaagcggtactctagaaatgaatgtcaaggatcttagaccacgagctagaaccattttgaaatggaatgaactaaatgttggtgatgtggtaatggttaattataatgtagaaagtcctggacaaagaggattctggtttgatgcagaaattaccacattgaagacaatctcaaggaccaaaaaagaacttcgtgtgaaaattttcctggggggttctgaaggaacattaaatgactgcaagataatatctgtagatgaaatcttcaagattgagagacctggagcccatcccctttcatttgcagatggaaagtttttaaggcgaaatgaccctgaatgtgacctgtgtggtggagacccagaaaagaaatgtcattcttgctcctgtcgtgtatgtggtgggaaacatgaacccaacatgcagcttctgtgtgatgaatgtaatgtggcttatcatatttactgtctgaatccacctttggataaagtcccagaagaggaatactggtattgtccttcttgtaaaactgattccagtgaagttgtaaaggctggtgaaagactcaagatgagtaaaaagaaagcaaagatgccgtcagctagtactgaaagccgaagagactggggcaggggaatggcttgtgttggtcgtacgagagaatgtactattgtcccttctaatcattatggacccattcctggtattcctgttggatcaacttggagatttagagttcagagtctgggtttcaccatattgcccagactgatcttgaatccctggggtcaatttctcctgccttagtttcccaaagtactgggattacaggtgagcgaagcaggtgttcacagaccccatgttggtggaattcatggtcgaagtaatgatggggcttattctcttgtactggctggtggatttgcggatgaagtcttgacagagttatgaatatgaatattgtggagtctgtccagataccgggtggaagactggttttgatcagtttaagaagtattctaaactgttctagatgtacgtatttattagaattccttctcatagaatacatactaaagattaagtttcgtaataccttgtttaaaaaatatgtagaccttaatattggattaacaaaaggtgaaagtaaatttaagggttttggaccaataacactttaagaccatgagatgtttatttgtggcttttaatccaagggaaaaacaaagtataaataattgacttctataatacgaatttagtagacacaaaacatcattgtctaagttgtctaaactaattaaaatgatcttgcattaaagaatcactattttgctagtgttagtaggattaattgtgcactgatagttacttttcttaatttgtttcaagtactgaatcagatagagacaataatatccatataaatttgtagctgctatagaagtaattggagagcttttggcttttttttttt

SEQ ID NO: 332712 - DNA, 1077 bp, Homo sapiens
agctggcgagatccggcttggcgccgtgacctccatgtgggagctccagctctataagtaaacactctgcgcggcgcagacatggcctcttcctatctttgaggcggtgtctgcggcagcgcctcagagtggttccggtcgtctctcctcaagtcggctagtcgggcgcgcgcgctgagagtcgtcgccgcctgtcgggcccggcgtccggtcggtccggtgggcgcgctcgcccgcctgccgctgagggcccgagccgcagggaaagcggcgcgggccgggcggggcgcggcgcccagagctcagggggagacaaaggggaccggttcctctctaggcgccaagatgtggatacaggttcgcaccattgatggctccaagacgtgcaccattgaggacgtgtctcgcaaagccacgattgaggagctgcgcgagcgggtgtgggcgctgttcgacgtgcggcccgaatgccagcgcctcttctaccggggcaagcagttggaaaatggatataccttatttgattatgatgttggactgaatgatataattcagctgctagttcgcccagaccctgatcatcttcctggcacatctacacagattgaggctaaaccctgttctaatagtccacctaaagtaaagaaagctccgagggtaggaccttccaatcagccatctacatcagctcgtgcccgtcttattgatcctggctttggaatatataagggtctggctctgtcacccaggctgtagtgcagtgacgtgaacacggctcgctgtagccttgacctgctggggtcaagtgatcttcctgctcggcctcccaaagtgctgggatacaggcgtgagccaccatgcccggctaacttagatctttgatatcttgattagttctttctttacatatttaatattttgctttatttatggtagctttgtttttgatgcaattattatatatggttatcttctaaaatagtaatctgtttgctgatatagagaaatgaaattgatttatttggcttttgtaaccagcaaccttttcaaatctaataaattgtgtagaaataaaaa

SEQ ID NO: 332713 - DNA, 422 bp, Homo sapiens
ttaacataactgatttctcaacgtttgttttgcgtcttgtagggaatggcttgtgttggtcgtacgagagaatgtactattgtcccttctaatcattatggacccattcctggtattcctgttggatcaacttggagatttagagttcaggtatgttttaacttgggcttagttgaaaggggagaattggctatcagattatagcaatgttaatgtctgttgattgtaagtgaacctaacacatgacattcacttgttagaatgaaatatattttttaggatgggtgtactcttcctggaggttaacaaaggaacatacatcacagaattgggcattagctatgcattttcatcactttgtttttactgttctgttatagttgtggtagtaaccattattgttaagctttctaaacagcctt

SEQ ID NO: 332714 - DNA, 3645 bp, Homo sapiens
agctggcgagatccggcttggcgccgtgacctccatgtgggagctccagctctataagtaaacactctgcgcggcgcagacatggcctcttcctatctttgaggcggtgtctgcggcagcgcctcagagtggttccggtcgtctctcctcaagtcggctagtcgggcgcgcgcgctgagagtcgtcgccgcctgtcgggcccggcgtccggtcggtccggtgggcgcgctcgcccgcctgccgctgagggcccgagccgcagggaaagcggcgcgggccgggcggggcgcggcgcccagagctcagggggagacaaaggggaccggttcctctctaggcgccaagatgtggatacaggttcgcaccattgatggctccaagacgtgcaccattgaggacgtgtctcgcaaagccacgattgaggagctgcgcgagcgggtgtgggcgctgttcgacgtgcggcccgaatgccagcgcctcttctaccggggcaagcagttggaaaatggatataccttatttgattatgatgttggactgaatgatataattcagctgctagttcgcccagaccctgatcatcttcctggcacatctacacagattgaggctaaaccctgttctaatagtccacctaaagtaaagaaagctccgagggtaggaccttccaatcagccatctacatcagctcgtgcccgtcttattgatcctggctttggaatatataaggtaaatgaattggtggatgccagagatgtcggccttggtgcttggtttgaagcacacatacatagtgttactagagcttctgatggacagtcacgtggcaaaactccactgaagaatggcagttcttgtaaaaggactaatggaaatataaagcataaatccaaagagaacacaaataaattggacagtgtaccctctacgtctaattcagactgtgttgctgctgatgaagacgttatttaccatatccagtatgatgaatacccagaaagcggtactctagaaatgaatgtcaaggatcttagaccacgagctagaaccattttgaaatggaatgaactaaatgttggtgatgtggtaatggttaattataatgtagaaagtcctggacaaagaggattctggtttgatgcagaaattaccacattgaagacaatctcaaggaccaaaaaagaacttcgtgtgaaaattttcctggggggttctgaaggaacattaaatgactgcaagataatatctgtagatgaaatcttcaagattgagagacctggagcccatcccctttcatttgcagatggaaagtttttaaggcgaaatgaccctgaatgtgacctgtgtggtggagacccagaaaagaaatgtcattcttgctcctgtcgtgtatgtggtgggaaacatgaacccaacatgcagcttctgtgtgatgaatgtaatgtggcttatcatatttactgtctgaatccacctttggataaagtcccagaagaggaatactggtattgtccttcttgtaaaactgattccagtgaagttgtaaaggctggtgaaagactcaagatgagtaaaaagaaagcaaagatgccgtcagctagtactgaaagccgaagagactggggcaggggaatggcttgtgttggtcgtacgagagaatgtactattgtcccttctaatcattatggacccattcctggtattcctgttggatcaacttggagatttagagttcaggtgagcgaagcaggtgttcacagaccccatgttggtggaattcatggtcgaagtaatgatggggcttattctcttgtactggctggtggatttgcggatgaagtcgaccgaggtgatgagttcacatacactggaagcggtggtaaaaatcttgctggtaacaaaagaattggtgcaccttcagctgatcaaacattaacaaacatgaacagggcattggccctaaactgtgatgctccattggatgataaaattggagcagagtctcggaattggagagctggtaagccagtcagagtgatacgcagttttaaagggaggaagatcagcaaatatgctcctgaagaaggcaacagatatgatggcatttataaggtggtgaaatactggccagagatttcatcaagccatggattcttggtttggcgctatcttttaagaagagatgatgttgaacctgctccttggacctctgaaggaatagaacggtcaaggagattatgtctacgtttacagtatccagcaggttacccttcagataaagaagggaagaagcctaaaggacagtcaaagaagcagcccagtggaaccacaaaaaggccaatttcagatgatgactgtccaagtgcctccaaagtgtacaaagcatcagattcagcagaagcaattgaggcttttcaactaactcctcaacagcaacatctcatcagagaagattgtcaaaaccagaagctgtgggatgaagtgctttcacatcttgtggaaggaccaaattttctgaaaaaattggaacaatcttttatgtgcgtttgctgtcaggagctagtttaccagcctgtgacaactgagtgcttccacaatgtctgtaaagattgcctacagcgctcctttaaggcacaggttttctcctgccctgcttgccggcatgatcttggccagaattacatcatgattcccaatgagattctgcagactctacttgaccttttcttccctggctacagcaaaggacgatgatctgcctgctttcactgtgttgttcatggtggctttttggacaataaagaatctaaaatgggtggggagggtggaagaaatggtggactgtatctctcacgttctgaagcagctaatcctctttcccacatagccatcatcttgtgtgtgtagtaagaggcccatttctcaactgtcttttaaatatctaaaggtagttcctgtaacaactagttttaatgagtaaaaagtcaaagcctcagctctagttgatatccaagttatgatttattttgcaactacctcaggacagaaaagatttatggggattttaaaaatcattgaataactagttaaatgaaattttagctacacactgcctcccaaatattagttgtgcctggttcttgtaatttgattttacagaaaaggaaatgacacttgagatccttggaatgaacacagcttctaaagtgtgcatatacttttttaacgtctcttcttccattacaatgtgtgttttgcaaggacaggttcattttttttagcccactttgtgaactccattgtgcttttttctggtgttttatgcaagttgactactaatgactaatgagaacaataatgaatgcattgttgctgcattagtgtaatgtggtgtggttttgcacttaaaagaggtattcatatgctctagttgtaaatgttcatgaaaatccacttctctactagtcgaactgcttttagtgtctcaccagtggttttacatctgcagagttttgagggctgtgctgacctttgagaggatttgaaattgcttcatattgtgatcctaaattttatattcactatattccctaaagtataccttaataaatattttatgatcagaaaaacactcaaaaaacttta

SEQ ID NO: 332715 - DNA, 3285 bp, Homo sapiens
ccccgcgaggcgcggggtgcggggcccagtcccgccgaatggtggggagtgggtccctgccagccccaactggaggtgcgccgcgcggggtcagaagtgagggcgtccggagcgcaaatatctcgccgtttgtatttgttggaaaatggatataccttatttgattatgatgttggactgaatgatataattcagctgctagttcgcccagaccctgatcatcttcctggcacatctacacagattgaggctaaaccctgttctaatagtccacctaaagtaaagaaagctccgagggtaggaccttccaatcagccatctacatcagctcgtgcccgtcttattgatcctggctttggaatatataaggtaaatgaattggtggatgccagagatgtcggccttggtgcttggtttgaagcacacatacatagtgttactagagcttctgatggacagtcacgtggcaaaactccactgaagaatggcagttcttgtaaaaggactaatggaaatataaagcataaatccaaagagaacacaaataaattggacagtgtaccctctacgtctaattcagactgtgttgctgctgatgaagacgttatttaccatatccagtatgatgaatacccagaaagcggtactctagaaatgaatgtcaaggatcttagaccacgagctagaaccattttgaaatggaatgaactaaatgttggtgatgtggtaatggttaattataatgtagaaagtcctggacaaagaggattctggtttgatgcagaaattaccacattgaagacaatctcaaggaccaaaaaagaacttcgtgtgaaaattttcctggggggttctgaaggaacattaaatgactgcaagataatatctgtagatgaaatcttcaagattgagagacctggagcccatcccctttcatttgcagatggaaagtttttaaggcgaaatgaccctgaatgtgacctgtgtggtggagacccagaaaagaaatgtcattcttgctcctgtcgtgtatgtggtgggaaacatgaacccaacatgcagcttctgtgtgatgaatgtaatgtggcttatcatatttactgtctgaatccacctttggataaagtcccagaagaggaatactggtattgtccttcttgtaaaactgattccagtgaagttgtaaaggctggtgaaagactcaagatgagtaaaaagaaagcaaagatgccgtcagctagtactgaaagccgaagagactggggcaggggaatggcttgtgttggtcgtacgagagaatgtactattgtcccttctaatcattatggacccattcctggtattcctgttggatcaacttggagatttagagttcaggtgagcgaagcaggtgttcacagaccccatgttggtggaattcatggtcgaagtaatgatggggcttattctcttgtactggctggtggatttgcggatgaagtcgaccgaggtgatgagttcacatacactggaagcggtggtaaaaatcttgctggtaacaaaagaattggtgcaccttcagctgatcaaacattaacaaacatgaacagggcattggccctaaactgtgatgctccattggatgataaaattggagcagagtctcggaattggagagctggtaagccagtcagagtgatacgcagttttaaagggaggaagatcagcaaatatgctcctgaagaaggcaacagatatgatggcatttataaggtggtgaaatactggccagagatttcatcaagccatggattcttggtttggcgctatcttttaagaagagatgatgttgaacctgctccttggacctctgaaggaatagaacggtcaaggagattatgtctacgtttacagtatccagcaggttacccttcagataaagaagggaagaagcctaaaggacagtcaaagaagcagcccagtggaaccacaaaaaggccaatttcagatgatgactgtccaagtgcctccaaagtgtacaaagcatcagattcagcagaagcaattgaggcttttcaactaactcctcaacagcaacatctcatcagagaagattgtcaaaaccagaagctgtgggatgaagtgctttcacatcttgtggaaggaccaaattttctgaaaaaattggaacaatcttttatgtgcgtttgctgtcaggagctagtttaccagcctgtgacaactgagtgcttccacaatgtctgtaaagattgcctacagcgctcctttaaggcacaggttttctcctgccctgcttgccggcatgatcttggccagaattacatcatgattcccaatgagattctgcagactctacttgaccttttcttccctggctacagcaaaggacgatgatctgcctgctttcactgtgttgttcatggtggctttttggacaataaagaatctaaaatgggtggggagggtggaagaaatggtggactgtatctctcacgttctgaagcagctaatcctctttcccacatagccatcatcttgtgtgtgtagtaagaggcccatttctcaactgtcttttaaatatctaaaggtagttcctgtaacaactagttttaatgagtaaaaagtcaaagcctcagctctagttgatatccaagttatgatttattttgcaactacctcaggacagaaaagatttatggggattttaaaaatcattgaataactagttaaatgaaattttagctacacactgcctcccaaatattagttgtgcctggttcttgtaatttgattttacagaaaaggaaatgacacttgagatccttggaatgaacacagcttctaaagtgtgcatatacttttttaacgtctcttcttccattacaatgtgtgttttgcaaggacaggttcattttttttagcccactttgtgaactccattgtgcttttttctggtgttttatgcaagttgactactaatgactaatgagaacaataatgaatgcattgttgctgcattagtgtaatgtggtgtggttttgcacttaaaagaggtattcatatgctctagttgtaaatgttcatgaaaatccacttctctactagtcgaactgcttttagtgtctcaccagtggttttacatctgcagagttttgagggctgtgctgacctttgagaggatttgaaattgcttcatattgtgatcctaaattttatattcactatattccctaaagtataccttaataaatattttatgatcagaaaaacactcaaaaaacttta

SEQ ID NO: 332716 - DNA, 2400 bp, Homo sapiens
agctggcgagatccggcttggcgccgtgacctccatgtgggagctccagctctataagtaaacactctgcgcggcgcagacatggcctcttcctatctttgaggcggtgtctgcggcagcgcctcagagtggttccggtcgtctctcctcaagtcggctagtcgggcgcgcgcgctgagagtcgtcgccgcctgtcgggcccggcgtccggtcggtccggtgggcgcgctcgcccgcctgccgctgagggcccgagccgcagggaaagcggcgcgggccgggcggggcgcggcgcccagagctcagggggagacaaaggggaccggttcctctctaggcgccaagatgtggatacaggttcgcaccattgatggctccaagacgtgcaccattgaggacgtgtctcgcaaagccacgattgaggagctgcgcgagcgggtgtgggcgctgttcgacgtgcggcccgaatgccagcgcctcttctaccggggcaagcagttggaaaatggatataccttatttgattatgatgttggactgaatgatataattcagctgctagttcgcccagaccctgatcatcttcctggcacatctacacagattgaggctaaaccctgttctaatagtccacctaaagtaaagaaagctccgagggtaggaccttccaatcagccatctacatcagctcgtgcccgtcttattgatcctggctttggaatatataaggtaaatgaattggtggatgccagagatgtcggccttggtgcttggtttgaagcacacatacatagtgttactagagcttctgatggacagtcacgtggcaaaactccactgaagaatggcagttcttgtaaaaggactaatggaaatataaagcataaatccaaagagaacacaaataaattggacagtgtaccctctacgtctaattcagactgtgttgctgctgatgaagacgttatttaccatatccagtatgatgaatacccagaaagcggtactctagaaatgaatgtcaaggatcttagaccacgagctagaaccattttgaaatggaatgaactaaatgttggtgatgtggtaatggttaattataatgtagaaagtcctggacaaagaggattctggtttgatgcagaaattaccacattgaagacaatctcaaggaccaaaaaagaacttcgtgtgaaaattttcctggggggttctgaaggaacattaaatgactgcaagataatatctgtagatgaaatcttcaagattgagagacctggagcccatcccctttcatttgcagatggaaagtttttaaggcgaaatgaccctgaatgtgacctgtgtggtggagacccagaaaagaaatgtcattcttgctcctgtcgtgtatgtggtgggaaacatgaacccaacatgcagcttctgtgtgatgaatgtaatgtggcttatcatatttactgtctgaatccacctttggataaagtcccagaagaggaatactggtattgtccttcttgtaaaactgattccagtgaagttgtaaaggctggtgaaagactcaagatgagtaaaaagaaagcaaagatgccgtcagctagtactgaaagccgaagagactggggcaggggaatggcttgtgttggtcgtacgagagaatgtactattgtcccttctaatcattatggacccattcctggtattcctgttggatcaacttggagatttagagttcaggtgagcgaagcaggtgttcacagaccccatgttggtggaattcatggtcgaagtaatgatggggcttattctcttgtactggctggtggatttgcggatgaagtcgaccgaggtgatgagttcacatacactggaagcggtggtaaaaatcttgctggtaacaaaagaattggtgcaccttcagctgatcaaacattaacaaacatgaacagggcattggccctaaactgtgatgctccattggatgataaaattggagcagagtctcggaattggagagctggtaagccagtcagagtgatacgcagttttaaagggaggaagatcagcaaatatgctcctgaagaaggcaacagatatgatggcatttataaggtgctctatctggcatgacatcttgtttgtcattcttcctgggctttcaaggcagggttgttgcaaggaactactgtgggtgggctcgaggaaacagtagccatcttatattgctactttttctggaaattgaacagatgcataaagcaaactcttaacttcagcactttacttttaaggcttatttcgagttcctaggggcagagttgggttaaggtttttttttttaaaatgtaagtgtatgttctctataataaagccatttaagtaactggctgttgtataact

SEQ ID NO: 332717 - DNA, 1698 bp, Homo sapiens
agctggcgagatccggcttggcgccgtgacctccatgtgggagctccagctctataagtaaacactctgcgcggcgcagacatggcctcttcctatctttgaggcggtgtctgcggcagcgcctcagagtggttccggtcgtctctcctcaagtcggctagtcgggcgcgcgcgctgagagtcgtcgccgcctgtcgggcccggcgtccggtcggtccggtgggcgcgctcgcccgcctgccgctgagggcccgagccgcagggaaagcggcgcgggccgggcggggcgcggcgcccagagctcagggggagacaaaggggaccggttcctctctaggcgccaagatgtggatacaggttcgcaccattgatggctccaagacgtgcaccattgaggacgtgtctcgcaaagccacgattgaggagctgcgcgagcgggtgtgggcgctgttcgacgtgcggcccgaatgccagcgcctcttctaccggggcaagcagttggaaaatggatataccttatttgattatgatgttggactgaatgatataattcagctgctagttcgcccagaccctgatcatcttcctggcacatctacacagattgaggctaaaccctgttctaatagtccacctaaagtaaagaaagctccgagggtaggaccttccaatcagccatctacatcagctcgtgcccgtcttattgatcctggctttggaatatataaggtaaatgaattggtggatgccagagatgtcggccttggtgcttggtttgaagcacacatacatagtgttactagagcttctgatggacagtcacgtggcaaaactccactgaagaatggcagttcttgtaaaaggactaatggaaatataaagcataaatccaaagagaacacaaataaattggacagtgtaccctctacgtctaattcagactgtgttgctgctgatgaagacgttatttaccatatccagtatgatgaatacccagaaagcggtactctagaaatgaatgtcaaggatcttagaccacgagctagaaccattttgaaatggaatgaactaaatgttggtgatgtggtaatggttaattataatgtagaaagtcctggacaaagaggattctggtttgatgcagaaattaccacattgaagacaatctcaaggaccaaaaaagaacttcgtgtgaaaattttcctggggggttctgaaggaacattaaatgactgcaagataatatctgtagatgaaatcttcaagattgagagacctggagcccatcccctttcatttgcagatggaaagtttttaaggcgaaatgaccctgaatgtgacctgtgtggtggagacccagaaaagaaatgtcattcttgctcctgtcgtgtatgtggtgggaaacatgaacccaacatgcagcttctgtgtgatgaatgtaatgtggcttatcatatttactgtctgaatccacctttggataaagtcccagaagaggaatactggtattgtccttcttgtaaaactgattccagtgaagttgtaaaggctggtgaaagactcaagatgagtaaaaagaaagcaaagatgccgtcagctagtactgaaagccgaagagactggggcaggggaggggaggggagggaatgaggcagctctaggatctatactgtagctaataaaatgtaaaaacacctg

SEQ ID NO: 332718 - DNA, 5350 bp, Homo sapiens
gacccgccccctacatccggggcctgggcggcagcagggccgccgcggggaggtcacgtggctccttcctttccgtctctggccggctgggcgcgggcgactgctggcgaggcgcgtgggaccttacgctggttccccttcgtctcctctcccggcccgggccactagagagttcgctgacgccgggtgagctgagcctgccgccaagatgccggcctattttcagaggccggaaaatgccctcaaacgcgccaacgaatttcttgaggttggcaaaaagcagcctgctctggatgttctttatgatgttatgaaaagtaaaaaacatagaacatggcaaaagatacacgaaccaattatgttgaaatacttggaactttgcgtggatcttcgcaagagccacttggcaaaggaggggttataccagtataagaacatttgtcaacaggtgaacataaaatctctggaggatgttgttagggcatatttgaaaatggcagaggaaaaaactgaagctgctaaagaagaatctcagcagatggtcttagatatagaggatctagataatattcaaactcctgagagtgttctcctaagtgctgtaagtggtgaagacactcaggatcgtactgacagattacttttaactccatgggttaaattcctgtgggagtcttacaggcagtgtttggaccttcttagaaacaattctagagtagagcgcctgtaccatgatattgcccagcaagctttcaaattctgcctccaatacacgcgtaaggctgaattccgtaaactgtgtgacaatttgagaatgcacttatcgcagattcagcgccaccataaccaaagtacggcaatcaatcttaataatccagagagccagtccatgcatttggaaaccagacttgttcagctggacagtgctatcagcatggaattgtggcaggaagcattcaaagctgtggaagatattcacgggctattctccttgtctaaaaaaccacctaaacctcagttgatggcaaattactataacaaagtctcaactgtgttttggaaatctggaaatgctctttttcatgcatctacactccatcgtctttaccatctctctagagaaatgagaaagaatctcacacaagacgagatgcaaagaatgtctactagagtccttttagccactctttccatccctattactcctgagcgtacggatattgctcgacttctggatatggatggcattatagttgaaaaacagcgtcgccttgcaacactactaggtcttcaagccccaccgacacgaattggccttattaatgatatggtcagatttaatgtactacaatatgttgtcccagaagtgaaagacctttacaattggcttgaagtagaatttaacccattaaaactctgtgagcgagtcacaaaggttctaaattgggttagggaacaacctgaaaaggaaccggaattgcagcagtatgtgccacaactgcaaaacaacaccatcctccgccttctgcagcaggtgtcacagatttatcagagcattgagttttctcgtttgacttctttggttccttttgttgatgctttccaactggaacgggccatagtagatgcagccaggcattgcgacttgcaggttcgtattgatcacacttctcggaccctgagttttggatctgatttgaattatgctactcgagaagatgctccgattggtcctcatttgcaaagcatgccttcagagcagataagaaaccagctgacagccatgtcctcagtacttgcaaaagcacttgaagtcattaaaccagctcatatactgcaagagaaagaagaacagcatcagttggctgtcactgcataccttaaaaattcacgaaaagagcaccagcggatcctggctcgccgccagacaattgaggagagaaaagagcgccttgagagtctgaatattcagcgtgagaaagaagaattggaacagagggaagctgaactccagaaagtgcggaaggctgaggaagagaggctgcgccaggaagcaaaggagagagagaaggagcgtatcttacaggaacatgaacaaatcaaaaagaaaactgtccgagagcgtttggagcagatcaagaaaacagaactgggtgccaaagcattcaaagatattgatattgaagaccttgaggaattggatccagattttatcatggctaaacaggttgaacaactggagaaagaaaagaaagaacttcaagaacgcctaaagaatcaagaaaagaagattgactattttgaaagagccaaacgtttggaagaaattcctttgataaagagcgcttacgaggaacagagaattaaagacatggatctgtgggagcaacaagaggaagaaagaattactacaatgcagctagaacgtgaaaaggctcttgaacataagaatcgaatgtcacgaatgcttgaagacagagatttattcgtaatgcgactcaaagctgcacggcagtctgtttatgaggaaaaacttaaacagtttgaagagcgattagcagaagaaaggcataatcgattggaagaacggaaaaggcagcgtaaagaagaacgcaggataacatactatagagaaaaagaagaggaggagcagagaagggcagaagaacaaatgctaaaagagcgggaagagagagagcgcgccgaacgagcaaaacgcgaggaagagctacgagagtatcaggagcgggtgaagaaattagaagaagtggaaaggaaaaaacgccaaagggagttggaaattgaagaacgagaacggcgtagagaggaagagagaagacttggcgatagttccctttctagaaaggactctcgttggggagatagagattcagaaggcacctggagaaaaggacctgaagcagattctgagtggagaagaggcccgccagagaaggagtggagacgtggagaagggcgagatgaggacaggtctcatagaagagatgaagagcggccccggcgtctgggggatgatgaagatagagagccctctcttagaccagacgatgatcgggttccccggcgtggcatggatgatgacagaggccctagacgtggtcctgaggaagataggttctctcgtcgtggggcagacgatgaccggccttcctggcgtaacacagatgatgacaggcctcccagacgaattgccgatgaagacaggggaaactggcgtcatgcggatgatgacagaccacctagacgaggactggatgaggacagaggaagctggcgaacagctgatgaggacagaggaccaagacgtgggatggatgatgaccgggggccgaggcgaggaggcgctgatgatgagcgatcatcctggcgtaatgctgatgatgaccggggtcccaggcgagggttggatgatgatcggggtcccaggcgaggcatggatgatgaccggggtcccaggcgaggcatggatgatgaccggggtcccaggcgaggcatggatgatgaccggggtcccaggcgagggttggatgatgatcgaggaccttggaggaacgccgatgatgacagaattcccaggcgtggtgcagaggatgacaggggcccttggagaaacatggatgatgatcgcctttcaagacgtgctgatgatgatcggtttcccagacggggtgatgactcaagacctggtccttggagaccattagtcaagccaggtggatggagagagaaagaaaaagccagagaggagagctggggtccacctcgagaatcaaggccatcagaagaacgtgaatgggacagagaaaaagaaagggacagagataatcaagatcgggaggagaatgacaaggaccctgagagagaaagggacagagagagagatgtggatcgagaggatcgcttcagaagacctagggatgaaggtggctggagaagaggaccagctgaggaatcttcaagctggagagactcaagtcgccgggacgatagggatagggatgaccgtcgccgtgagagggatgaccggcgtgatctaagagaaagacgagatctaagagacgacagggaccgaagaggacctccactcagatcagaacgtgaagaagtaagttcttggagacgtgctgatgacaggaaagatgaccgggtggaagagcgggaccctcctcgtcgagttcctcccccagctctttcaagagaccgagaaagagaccgagaccgagaaagagaaggtgaaaaagagaaggcctcatggagagctgagaaagatagggaatctctccgtcgtactaaaaatgagactgatgaagatggatggaccacagtacgacgttaagtctcaagataatggatttaaactggtgtcttaaataggtttgatcacattcaaggattattatacttgtgcttcaaccaatctaaattggattctttaatgttgtttcaccataacacaaaaagcatgaacttgtattaatcctatataatagattgatcatgcaccatatccacaggaggttggaaaaaccatgccattttctggaatttaagggtgttgcattatttcatcaatcatttgttgacaaaaaagaaaaactaaaaaataaatttaaaatgtgaaccttcaggtattgagtaacacctttatcttggtatagaactgatacttttttttgattttgaaatatctgataataatttggaatgaagtaaggttctgttaaaatatatttgaagaccctttaaagcagtgaatctgaaacaattttcacacccttaagtggttgatacgtacctattttaggtattttgaggtatttaccataaactaaatttagaaattttttagattcacttgaagtaaacattacaaacattggatacggtggggttttctttagattttacttgagagaaggtgagtacaaagcaatttgcagttgttgtaatgacaagattactgcgcaagtgtgaatccaaacagtatagcttttaaattttaaagcatttggtaaattatcgctgagtttttttctgttgccaatagcaaactgcttttccattaatggagaattcatgcctttcaagcattttaaatatgacaatatttataaatgtatggtttggaggaatcgtttaaattctctttcctaattttctttcttttgaagatagattctttcaacaagtaatttgtagtaatgactgtgttgacttcaattttggagcgcagtagctatgttaaagatgaactatttggtctcattgaagccaacacagaacttgctgctgtgttttttcttcagtgataaataaaatacttacagaa

SEQ ID NO: 332719 - DNA, 1041 bp, Homo sapiens
ttctttattgagttactatgtgtaacggtcattcaaataatagaaatttttggatgatatttcataagcaaaacaatcatcaaaatgttctaaaggtgaaagttgaatgcataatttaatacaagtttgtttactgttttgttagaaatgaaaaaactagatcaaaatgtcctgggcttagattctaatttgaccattgaattattttgtataaagacaaacccactggaggtaggtaatatcaacaatttaaatgttttaaaatttggcctgctgacaagttaatggtcatttggaagttagagtttttgtgctgagaggttgctttcgatgattctgatacacttgagagtcttttgtaaacctaatagctttctgcgagtttgttgctcttgacaaagtgtgccctttttgggttgggggttacttcgattgcaggaaaaacttaaacagtttgaagagcgattagcagaagaaaggcataatcgattggaagaacggaaaaggcagcgtaaagaagaacgcaggataacatactatagagaaaaagaagaggaggagcagagaagggcagaagaacaaatgctaaaaggtacacaggtcaaacaggattggaggggtgctaatgcaaggttggtgttaagatctagtttttagtgatcttatgtagaaaatacaggaatcaaggtaattggccttttagcactgtaattaactggatctcagaacccagtttgctgtatgtgaagttgttacatcgtctgccagcatttccccacacatttgatgttcttctagaaattaatactttttttaatcaccgtattctgtgtattaacatttattgaggaatacattccagatgatggctgttaaatgatgctatatctggaatcccagattgctcagggatgggggagggattctagtatcttattacaaaactatagttgaggggtgtagtacttattttcttgactatgttctgtcctgtagctgattacaaactattttcaaattcttttacttgtacattatgct

SEQ ID NO: 332720 - DNA, 7335 bp, Homo sapiens
gacccgccccctacatccggggcctgggcggcagcagggccgccgcggggaggtcacgtggctccttcctttccgtctctggccggctgggcgcgggcgactgctggcgaggcgcgtgggaccttacgctggttccccttcgtctcctctcccggcccgggccactagagagttcgctgacgccgggtgagctgagcctgccgccaagatgccggcctattttcagaggccggaaaatgccctcaaacgcgccaacgaatttcttgaggttggcaaaaagcagcctgctctggatgttctttatgatgttatgaaaagtaaaaaacatagaacatggcaaaagatacacgaaccaattatgttgaaatacttggaactttgcgtggatcttcgcaagagccacttggcaaaggaggggttataccagtataagaacatttgtcaacaggtgaacataaaatctctggaggatgttgttagggcatatttgaaaatggcagaggaaaaaactgaagctgctaaagaagaatctcagcagatggtcttagatatagaggatctagataatattcaaactcctgagagtgttctcctaagtgctgtaagtggtgaagacactcaggatcgtactgacagattacttttaactccatgggttaaattcctgtgggagtcttacaggcagtgtttggaccttcttagaaacaattctagagtagagcgcctgtaccatgatattgcccagcaagctttcaaattctgcctccaatacacgcgtaaggctgaattccgtaaactgtgtgacaatttgagaatgcacttatcgcagattcagcgccaccataaccaaagtacggcaatcaatcttaataatccagagagccagtccatgcatttggaaaccagacttgttcagctggacagtgctatcagcatggaattgtggcaggaagcattcaaagctgtggaagatattcacgggctattctccttgtctaaaaaaccacctaaacctcagttgatggcaaattactataacaaagtctcaactgtgttttggaaatctggaaatgctctttttcatgcatctacactccatcgtctttaccatctctctagagaaatgagaaagaatctcacacaagacgagatgcaaagaatgtctactagagtccttttagccactctttccatccctattactcctgagcgtacggatattgctcgacttctggatatggatggcattatagttgaaaaacagcgtcgccttgcaacactactaggtcttcaagccccaccgacacgaattggccttattaatgatatggtcagatttaatgtactacaatatgttgtcccagaagtgaaagacctttacaattggcttgaagtagaatttaacccattaaaactctgtgagcgagtcacaaaggttctaaattgggttagggaacaacctgaaaaggaaccggaattgcagcagtatgtgccacaactgcaaaacaacaccatcctccgccttctgcagcaggtgtcacagatttatcagagcattgagttttctcgtttgacttctttggttccttttgttgatgctttccaactggaacgggccatagtagatgcagccaggcattgcgacttgcaggttcgtattgatcacacttctcggaccctgagttttggatctgatttgaattatgctactcgagaagatgctccgattggtcctcatttgcaaagcatgccttcagagcagataagaaaccagctgacagccatgtcctcagtacttgcaaaagcacttgaagtcattaaaccagctcatatactgcaagagaaagaagaacagcatcagttggctgtcactgcataccttaaaaattcacgaaaagagcaccagcggatcctggctcgccgccagacaattgaggagagaaaagagcgccttgagagtctgaatattcagcgtgagaaagaagaattggaacagagggaagctgaactccagaaagtgcggaaggctgaggaagagaggctgcgccaggaagcaaaggagagagagaaggagcgtatcttacaggaacatgaacaaatcaaaaagaaaactgtccgagagcgtttggagcagatcaagaaaacagaactgggtgccaaagcattcaaagatattgatattgaagaccttgaggaattggatccagattttatcatggctaaacaggttgaacaactggagaaagaaaagaaagaacttcaagaacgcctaaagaatcaagaaaagaagattgactattttgaaagagccaaacgtttggaagaaattcctttgataaagagcgcttacgaggaacagagaattaaagacatggatctgtgggagcaacaagaggaagaaagaattactacaatgcagctagaacgtgaaaaggctcttgaacataagaatcgaatgtcacgaatgcttgaagacagagatttattcgtaatgcgactcaaagctgcacggcagtctgtttatgaggaaaaacttaaacagtttgaagagcgattagcagaagaaaggcataatcgattggaagaacggaaaaggcagcgtaaagaagaacgcaggataacatactatagagaaaaagaagaggaggagcagagaagggcagaagaacaaatgctaaaagagcgggaagagagagagcgcgccgaacgagcaaaacgcgaggaagagctacgagagtatcaggagcgggtgaagaaattagaagaagtggaaaggaaaaaacgccaaagggagttggaaattgaagaacgagaacggcgtagagaggaagagagaagacttggcgatagttccctttctagaaaggactctcgttggggagatagagattcagaaggcacctggagaaaaggacctgaagcagattctgagtggagaagaggcccgccagagaaggagtggagacgtggagaagggcgagatgaggacaggtctcatagaagagatgaagagcggccccggcgtctgggggatgatgaagatagagagccctctcttagaccagacgatgatcgggttccccggcgtggcatggatgatgacagaggccctagacgtggtcctgaggaagataggttctctcgtcgtggggcagacgatgaccggccttcctggcgtaacacagatgatgacaggcctcccagacgaattgccgatgaagacaggggaaactggcgtcatgcggatgatgacagaccacctagacgaggactggatgaggacagaggaagctggcgaacagctgatgaggacagaggaccaagacgtgggatggatgatgaccgggggccgaggcgaggaggcgctgatgatgagcgatcatcctggcgtaatgctgatgatgaccggggtcccaggcgagggttggatgatgatcggggtcccaggcgaggcatggatgatgaccggggtcccaggcgaggcatggatgatgaccggggtcccaggcgaggcatggatgatgaccggggtcccaggcgagggttggatgatgatcgaggaccttggaggaacgccgatgatgacagaattcccaggcgtggtgcagaggatgacaggggcccttggagaaacatggatgatgatcgcctttcaagacgtgctgatgatgatcggtttcccagacggggtgatgactcaagacctggtccttggagaccattagtcaagccaggtggatggagagagaaagaaaaagccagagaggagagctggggtccacctcgagaatcaaggccatcagaagaacgtgaatgggacagagaaaaagaaagggacagagataatcaagatcgggaggagaatgacaaggaccctgagagagaaagggacagagagagagatgtggatcgagaggatcgcttcagaagacctagggatgaaggtggctggagaagaggaccagctgaggaatcttcaagctggagagactcaagtcgccgggacgatagggatagggatgaccgtcgccgtgagagggatgaccggcgtgatctaagagaaagacgagatctaagagacgacagggaccgaagaggacctccactcagatcagaacgtgaagaagtaagttcttggagacgtgctgatgacaggaaagatgaccgggtggaagagcgggaccctcctcgtcgagttcctcccccagctctttcaagagaccgagaaagagaccgagaccgagaaagagaaggtgaaaaagagaaggcctcatggagagctgagaaagatagggaatctctccgtcgtactaaaaatgagactgatgaagatggatggaccacagtacgacgttaagtctcaagataatggatttaaactggtgtcttaaataggtttgatcacattcaaggattattatacttgtgcttcaaccaatctaaattggattctttaatgttgtttcaccataacacaaaaagcatgaacttgtattaatcctatataatagattgatcatgcaccatatccacaggaggttggaaaaaccatgccattttctggaatttaagggtgttgcattatttcatcaatcatttgttgacaaaaaagaaaaactaaaaaataaatttaaaatgtgaaccttcaggtattgagtaacacctttatcttggtatagaactgatacttttttttgattttgaaatatctgataataatttggaatgaagtaaggttctgttaaaatatatttgaagaccctttaaagcagtgaatctgaaacaattttcacacccttaagtggttgatacgtacctattttaggtattttgaggtatttaccataaactaaatttagaaattttttagattcacttgaagtaaacattacaaacattggatacggtggggttttctttagattttacttgagagaaggtgagtacaaagcaatttgcagttgttgtaatgacaagattactgcgcaagtgtgaatccaaacagtatagcttttaaattttaaagcatttggtaaattatcgctgagtttttttctgttgccaatagcaaactgcttttccattaatggagaattcatgcctttcaagcattttaaatatgacaatatttataaatgtatggtttggaggaatcgtttaaattctctttcctaattttctttcttttgaagatagattctttcaacaagtaatttgtagtaatgactgtgttgacttcaattttggagcgcagtagctatgttaaagatgaactatttggtctcattgaagccaacacagaacttgctgctgtgttttttcttcagtgataaataaaatacttacagaatttgttttagtgttgatttgtggttatagtattttgtttataatggtaagtttgcatattcagttgagttttttttacttgaatttttatcagtgccattaaatgtctgtgtttagtatcaatgaaaatgaacctaaatataacaaagaaagcatatgtggctaggatgtccccctaacatgtcttcctttgttaatgcaggaattccttagtttccttgtaacgctgtcctctgagtttgtgtgtgcatgtgcgtgtttgaagtaccaccttgggttttcacctgaaattagaaaaatcgtagttaatttgagaaaatgttacaaattcatcatggctgtaggcacttatttctgttattgagtagtggtgagaattcctattggtacagctgtagggccagaagagggagtattgatgctttttaacttaaccagatgcagctatttttgtttgatgttaccaatgatagaaatcattttaaacaccttagtatctggtatttcaaatacgtagaagtctttaaaggtctttcgtggggagaaggacttttctttcataacaagagaatttcagatcagtgattacaagtggggcagtaacttgctaagagtttgcttcctggagagtagatctgtatgtgtgacatcacaggtaagccccaagaatttatttaatcagatttgttcagacgagttactgctgcctacgttagagttagatttcaaggcgagtcagcaaacccatcctttctgctcagtctcccgtactgttctcccaagttctttgttctgggagtcagaacccaagtgcaagaggagggcagaagagtctgatgctgttactttgcgatcctgctcttggtttccactgtccaggccatacaactctgtctactcccattagtatttaccaacaggtgttaaaggaaagctgaacaagcagcctactcaccgatctgctaggtggtcttccatgttcatggtggcttctgcagtttcattgagagtaacattgctgttaatacagatagatccagtagtagagacatcatcggtccaaaagactttgcatctcattagttgtccatagtgactaccaggaggtggctggcatctataacgtgtgggacgtttttatgtaaagaactgcctgtgttttttttttttttaaccaaagacactgaccatagattgacttatacttttataagtctaattgaaatacttggggtactatgaaaggactgttccttgagtggctacgattagaaaatcaggactaacaaacttttctttgtctggaagcatatatatttgtgatataattttaatatgtataattttggtttaataaatcaaatctatgacaaaagttgttctcatcaaagctaataattctgcaacttccaaaaaggactttgtaggaaaattaaaatacaaagaaaaataaaagccactagaaattttaagtctgtacagaaaagaacaggttaagacaatctgtacctctacagttggagaagcccttttgactcttccctgtattgttttgctactaggcaagtatgcagcatgttcttatgaagataattttgtcatactttgtatatttcttaaactttgaaaaattgggtttctctaaatgtaatttttggcaaaatgttttaaagttccccattgagttccaaggatttttaaatgaatgtgtttacatatacttttcataagagaaccctagaaaattaactatagtaatactctgcgttttaactcccagtattcattgtcagctggaaaacctaggcaaatttggcacaggggctgaacatggggtactttttttcttttttggagacagagtcgctctgttgctcaggctggagtgcagtggcgtgatctgggctcactgcaacctccgcctcctggtttcaagcaattctcctgcctcagcctcctgaggagctgggattacaggcgcccacc

SEQ ID NO: 332721 - DNA, 5729 bp, Homo sapiens
gacccgccccctacatccggggcctgggcggcagcagggccgccgcggggaggtcacgtggctccttcctttccgtctctggccggctgggcgcgggcgactgctggcgaggcgcgtgggaccttacgctggttccccttcgtctcctctcccggcccgggccactagagagttcgctgacgccgggtgagctgagcctgccgccaagatgccggcctattttcagaggccggaaaatgccctcaaacgcgccaacgaatttcttgaggttggcaaaaagcagcctgctctggatgttctttatgatgttatgaaaagtaaaaaacatagaacatggcaaaagatacacgaaccaattatgttgaaatacttggaactttgcgtggatcttcgcaagagccacttggcaaaggaggggttataccagtataagaacatttgtcaacaggtgaacataaaatctctggaggatgttgttagggcatatttgaaaatggcagaggaaaaaactgaagctgctaaagaagaatctcagcagatggtcttagatatagaggatctagataatattcaaactcctgagagtgttctcctaagtgctgtaagtggtgaagacactcaggatcgtactgacagattacttttaactccatgggttaaattcctgtgggagtcttacaggcagtgtttggaccttcttagaaacaattctagagtagagcgcctgtaccatgatattgcccagcaagctttcaaattctgcctccaatacacgcgtaaggctgaattccgtaaactgtgtgacaatttgagaatgcacttatcgcagattcagcgccaccataaccaaagtacggcaatcaatcttaataatccagagagccagtccatgcatttggaaaccagacttgttcagctggacagtgctatcagcatggaattgtggcaggaagcattcaaagctgtggaagatattcacgggctattctccttgtctaaaaaaccacctaaacctcagttgatggcaaattactataacaaagtctcaactgtgttttggaaatctggaaatgctctttttcatgcatctacactccatcgtctttaccatctctctagagaaatgagaaagaatctcacacaagacgagatgcaaagaatgtctactagagtccttttagccactctttccatccctattactcctgagcgtacggatattgctcgacttctggatatggatggcattatagttgaaaaacagcgtcgccttgcaacactactaggtcttcaagccccaccgacacgaattggccttattaatgatatggtcagatttaatgtactacaatatgttgtcccagaagtgaaagacctttacaattggcttgaagtagaatttaacccattaaaactctgtgagcgagtcacaaaggtaagcctttgtatttaagttctggttgttaccacagagttggccttcttgcagttttgggttgtattcatatttgttaagagagaagttttgtcctatgtgttggaattcagtgcacatttcattgtcttttttctttatttcaagagaaaagatatatctgatgtgctcagcaaacctttggaggttaattagcagcatgactaacttagccattgctgccagtcaccttcaaacaagtatcagtagcttcatgatacattttgtatttctttgcattggatgatgtttttgtatattaaaaaaaaaagagttttagatgttttagtatctcttatgtagaaagtgtgattctctttcaatttaatggattttataggttctaaattgggttagggaacaacctgaaaaggaaccggaattgcagcagtatgtgccacaactgcaaaacaacaccatcctccgccttctgcagcaggtgtcacagatttatcagagcattgagttttctcgtttgacttctttggttccttttgttgatgctttccaactggaacgggccatagtagatgcagccaggcattgcgacttgcaggttcgtattgatcacacttctcggaccctgagttttggatctgatttgaattatgctactcgagaagatgctccgattggtcctcatttgcaaagcatgccttcagagcagataagaaaccagctgacagccatgtcctcagtacttgcaaaagcacttgaagtcattaaaccagctcatatactgcaagagaaagaagaacagcatcagttggctgtcactgcataccttaaaaattcacgaaaagagcaccagcggatcctggctcgccgccagacaattgaggagagaaaagagcgccttgagagtctgaatattcagcgtgagaaagaagaattggaacagagggaagctgaactccagaaagtgcggaaggctgaggaagagaggctgcgccaggaagcaaaggagagagagaaggagcgtatcttacaggaacatgaacaaatcaaaaagaaaactgtccgagagcgtttggagcagatcaagaaaacagaactgggtgccaaagcattcaaagatattgatattgaagaccttgaggaattggatccagattttatcatggctaaacaggttgaacaactggagaaagaaaagaaagaacttcaagaacgcctaaagaatcaagaaaagaagattgactattttgaaagagccaaacgtttggaagaaattcctttgataaagagcgcttacgaggaacagagaattaaagacatggatctgtgggagcaacaagaggaagaaagaattactacaatgcagctagaacgtgaaaaggctcttgaacataagaatcgaatgtcacgaatgcttgaagacagagatttattcgtaatgcgactcaaagctgcacggcagtctgtttatgaggaaaaacttaaacagtttgaagagcgattagcagaagaaaggcataatcgattggaagaacggaaaaggcagcgtaaagaagaacgcaggataacatactatagagaaaaagaagaggaggagcagagaagggcagaagaacaaatgctaaaagagcgggaagagagagagcgcgccgaacgagcaaaacgcgaggaagagctacgagagtatcaggagcgggtgaagaaattagaagaagtggaaaggaaaaaacgccaaagggagttggaaattgaagaacgagaacggcgtagagaggaagagagaagacttggcgatagttccctttctagaaaggactctcgttggggagatagagattcagaaggcacctggagaaaaggacctgaagcagattctgagtggagaagaggcccgccagagaaggagtggagacgtggagaagggcgagatgaggacaggtctcatagaagagatgaagagcggccccggcgtctgggggatgatgaagatagagagccctctcttagaccagacgatgatcgggttccccggcgtggcatggatgatgacagaggccctagacgtggtcctgaggaagataggttctctcgtcgtggggcagacgatgaccggccttcctggcgtaacacagatgatgacaggcctcccagacgaattgccgatgaagacaggggaaactggcgtcatgcggatgatgacagaccacctagacgaggactggatgaggacagaggaagctggcgaacagctgatgaggacagaggaccaagacgtgggatggatgatgaccgggggccgaggcgaggaggcgctgatgatgagcgatcatcctggcgtaatgctgatgatgaccggggtcccaggcgagggttggatgatgatcggggtcccaggcgaggcatggatgatgaccggggtcccaggcgaggcatggatgatgaccggggtcccaggcgaggcatggatgatgaccggggtcccaggcgagggttggatgatgatcgaggaccttggaggaacgccgatgatgacagaattcccaggcgtggtgcagaggatgacaggggcccttggagaaacatggatgatgatcgcctttcaagacgtgctgatgatgatcggtttcccagacggggtgatgactcaagacctggtccttggagaccattagtcaagccaggtggatggagagagaaagaaaaagccagagaggagagctggggtccacctcgagaatcaaggccatcagaagaacgtgaatgggacagagaaaaagaaagggacagagataatcaagatcgggaggagaatgacaaggaccctgagagagaaagggacagagagagagatgtggatcgagaggatcgcttcagaagacctagggatgaaggtggctggagaagaggaccagctgaggaatcttcaagctggagagactcaagtcgccgggacgatagggatagggatgaccgtcgccgtgagagggatgaccggcgtgatctaagagaaagacgagatctaagagacgacagggaccgaagaggacctccactcagatcagaacgtgaagaagtaagttcttggagacgtgctgatgacaggaaagatgaccgggtggaagagcgggaccctcctcgtcgagttcctcccccagctctttcaagagaccgagaaagagaccgagaccgagaaagagaaggtgaaaaagagaaggcctcatggagagctgagaaagatagggaatctctccgtcgtactaaaaatgagactgatgaagatggatggaccacagtacgacgttaagtctcaagataatggatttaaactggtgtcttaaataggtttgatcacattcaaggattattatacttgtgcttcaaccaatctaaattggattctttaatgttgtttcaccataacacaaaaagcatgaacttgtattaatcctatataatagattgatcatgcaccatatccacaggaggttggaaaaaccatgccattttctggaatttaagggtgttgcattatttcatcaatcatttgttgacaaaaaagaaaaactaaaaaataaatttaaaatgtgaaccttcaggtattgagtaacacctttatcttggtatagaactgatacttttttttgattttgaaatatctgataataatttggaatgaagtaaggttctgttaaaatatatttgaagaccctttaaagcagtgaatctgaaacaattttcacacccttaagtggttgatacgtacctattttaggtattttgaggtatttaccataaactaaatttagaaattttttagattcacttgaagtaaacattacaaacattggatacggtggggttttctttagattttacttgagagaaggtgagtacaaagcaatttgcagttgttgtaatgacaagattactgcgcaagtgtgaatccaaacagtatagcttttaaattttaaagcatttggtaaattatcgctgagtttttttctgttgccaatagcaaactgcttttccattaatggagaattcatgcctttcaagcattttaaatatgacaatatttataaatgtatggtttggaggaatcgtttaaattctctttcctaattttctttcttttgaagatagattctttcaacaagtaatttgtagtaatgactgtgttgacttcaattttggagcgcagtagctatgttaaagatgaactatttggtctcattgaagccaacacagaacttgctgctgtgttttttcttcagtgataaataaaatacttacagaa

SEQ ID NO: 332722 - DNA, 6664 bp, Homo sapiens
gacccgccccctacatccggggcctgggcggcagcagggccgccgcggggaggtcacgtggctccttcctttccgtctctggccggctgggcgcgggcgactgctggcgaggcgcgtgggaccttacgctggttccccttcgtctcctctcccggcccgggccactagagagttcgctgacgccgggtgagctgagcctgccgccaagatgccggcctattttcagaggccggaaaatgccctcaaacgcgccaacgaatttcttgaggttggcaaaaagcagcctgctctggatgttctttatgatgttatgaaaagtaaaaaacatagaacatggcaaaagatacacgaaccaattatgttgaaatacttggaactttgcgtggatcttcgcaagagccacttggcaaaggaggggttataccagtataagaacatttgtcaacaggtgaacataaaatctctggaggatgttgttagggcatatttgaaaatggcagaggaaaaaactgaagctgctaaagaagaatctcagcagatggtcttagatatagaggatctagataatattcaaactcctgagagtgttctcctaagtgctgtaagtggtgaagacactcaggatcgtactgacagattacttttaactccatgggttaaattcctgtgggagtcttacaggcagtgtttggaccttcttagaaacaattctagagtagagcgcctgtaccatgatattgcccagcaagctttcaaattctgcctccaatacacgcgtaaggctgaattccgtaaactgtgtgacaatttgagaatgcacttatcgcagattcagcgccaccataaccaaagtacggcaatcaatcttaataatccagagagccagtccatgcatttggaaaccagacttgttcagctggacagtgctatcagcatggaattgtggcaggaagcattcaaagctgtggaagatattcacgggctattctccttgtctaaaaaaccacctaaacctcagttgatggcaaattactataacaaagtctcaactgtgttttggaaatctggaaatgctctttttcatgcatctacactccatcgtctttaccatctctctagagaaatgagaaagaatctcacacaagacgagatgcaaagaatgtctactagagtccttttagccactctttccatccctattactcctgagcgtacggatattgctcgacttctggatatggatggcattatagttgaaaaacagcgtcgccttgcaacactactaggtcttcaagccccaccgacacgaattggccttattaatgatatggtcagatttaatgtactacaatatgttgtcccagaagtgaaagacctttacaattggcttgaagtagaatttaacccattaaaactctgtgagcgagtcacaaaggttctaaattgggttagggaacaacctgaaaaggaaccggaattgcagcagtatgtgccacaactgcaaaacaacaccatcctccgccttctgcagcaggtgtcacagatttatcagagcattgagttttctcgtttgacttctttggttccttttgttgatgctttccaactggaacgggccatagtagatgcagccaggcattgcgacttgcaggttcgtattgatcacacttctcggaccctgagttttggatctgatttgaattatgctactcgagaagatgctccgattggtcctcatttgcaaagcatgccttcagagcagataagaaaccagctgacagccatgtcctcagtacttgcaaaagcacttgaagtcattaaaccagctcatatactgcaagagaaagaagaacagcatcagttggctgtcactgcataccttaaaaattcacgaaaagagcaccagcggatcctggctcgccgccagacaattgaggagagaaaagagcgccttgagagtctgaatattcagcgtgagaaagaagaattggaacagagggaagctgaactccagaaagtgcggaaggctgaggaagagaggctgcgccaggaagcaaaggagagagagaaggagcgtatcttacaggaacatgaacaaatcaaaaagaaaactgtccgagagcgtttggagcagatcaagaaaacagaactgggtgccaaagcattcaaagatattgatattgaagaccttgaggaattggatccagattttatcatggctaaacaggttgaacaactggagaaagaaaagaaagaacttcaagaacgcctaaagaatcaagaaaagaagattgactattttgaaagagccaaacgtttggaagaaattcctttgataaagagcgcttacgaggaacagagaattaaagacatggatctgtgggagcaacaagaggaagaaagaattactacaatgcagctagaacgtgaaaaggctcttgaacataagaatcgaatgtcacgaatgcttgaagacagagatttattcgtaatgcgactcaaagctgcacggcagtctgtttatgaggaaaaacttaaacagtttgaagagcgattagcagaagaaaggcataatcgattggaagaacggaaaaggcagcgtaaagaagaacgcaggataacatactatagagaaaaagaagaggaggagcagagaagggcagaagaacaaatgctaaaagagcgggaagagagagagcgcgccgaacgagcaaaacgcgaggaagagctacgagagtatcaggagcgggtgaagaaattagaagaagtggaaaggaaaaaacgccaaagggagttggaaattgaagaacgagaacggcgtagagaggaagagagaagacttggcgatagttccctttctagaaaggactctcgttggggagatagagattcagaaggcacctggagaaaaggacctgaagcagattctgagtggagaagaggcccgccagagaaggagtggagacgtggagaagggcgagatgaggacaggtctcatagaagagatgaagagcggccccggcgtctgggggatgatgaagatagagagccctctcttagaccagacgatgatcgggttccccggcgtggcatggatgatgacagaggccctagacgtggtcctgaggaagataggttctctcgtcgtggggcagacgatgaccggccttcctggcgtaacacagatgatgacaggcctcccagacgaattgccgatgaagacaggggaaactggcgtcatgcggatgatgacagaccacctagacgaggactggatgaggacagaggaagctggcgaacagctgatgaggacagaggaccaagacgtgggatggatgatgaccgggggccgaggcgaggaggcgctgatgatgagcgatcatcctggcgtaatgctgatgatgaccggggtcccaggcgagggttggatgatgatcggggtcccaggcgaggcatggatgatgaccggggtcccaggcgaggcatggatgatgaccggggtcccaggcgaggcatggatgatgaccggggtcccaggcgagggttggatgatgatcgaggaccttggaggaacgccgatgatgacagaattcccaggcgtggtgcagaggatgacaggggcccttggagaaacatggatgatgatcgcctttcaagacgtgctgatgatgatcggtttcccagacggggtgatgactcaagacctggtccttggagaccattagtcaagccaggtggatggagagagaaagaaaaagccagagaggagagctggggtccacctcgagaatcaaggccatcagaagaacgtgaatgggacagagaaaaagaaagggacagagataatcaagatcgggaggagaatgacaaggaccctgagagagaaagggacagagagagagatgtggatcgagaggatcgcttcagaagacctagggatgaaggtggctggagaagaggaccagctgaggaatcttcaagctggagagactcaagtcgccgggacgatagggatagggatgaccgtcgccgtgagagggatgaccggcgtgatctaagagaaagacgagatctaagagacgacagggaccgaagaggacctccactcagatcagaacgtgaagaagtaagttcttggagacgtgctgatgacaggaaagatgaccgggtggaagagcgggaccctcctcgtcgagttcctcccccagctctttcaagagaccgagaaagagaccgagaccgagaaagagaaggtgaaaaagagaaggcctcatggagagctgagaaagatagggaatctctccgtcgtactaaaaatgagactgatgaagatggatggaccacagtacgacgttaagtctcaagataatggatttaaactggtgtcttaaataggtttgatcacattcaaggattattatacttgtgcttcaaccaatctaaattggattctttaatgttgtttcaccataacacaaaaagcatgaacttgtattaatcctatataatagattgatcatgcaccatatccacaggaggttggaaaaaccatgccattttctggaatttaagggtgttgcattatttcatcaatcatttgttgacaaaaaagaaaaactaaaaaataaatttaaaatgtgaaccttcaggtattgagtaacacctttatcttggtatagaactgatacttttttttgattttgaaatatctgataataatttggaatgaagtaaggttctgttaaaatatatttgaagaccctttaaagcagtgaatctgaaacaattttcacacccttaagtggttgatacgtacctattttaggtattttgaggtatttaccataaactaaatttagaaattttttagattcacttgaagtaaacattacaaacattggatacggtggggttttctttagattttacttgagagaaggtgagtacaaagcaatttgcagttgttgtaatgacaagattactgcgcaagtgtgaatccaaacagtatagcttttaaattttaaagcatttggtaaattatcgctgagtttttttctgttgccaatagcaaactgcttttccattaatggagaattcatgcctttcaagcattttaaatatgacaatatttataaatgtatggtttggaggaatcgtttaaattctctttcctaattttctttcttttgaagatagattctttcaacaagtaatttgtagtaatgactgtgttgacttcaattttggagcgcagtagctatgttaaagatgaactatttggtctcattgaagccaacacagaacttgctgctgtgttttttcttcagtgataaataaaatacttacagaatttgttttagtgttgatttgtggttatagtattttgtttataatggtaagtttgcatattcagttgagttttttttacttgaatttttatcagtgccattaaatgtctgtgtttagtatcaatgaaaatgaacctaaatataacaaagaaagcatatgtggctaggatgtccccctaacatgtcttcctttgttaatgcaggaattccttagtttccttgtaacgctgtcctctgagtttgtgtgtgcatgtgcgtgtttgaagtaccaccttgggttttcaccgatctgctaggtggtcttccatgttcatggtggcttctgcagtttcattgagagtaacattgctgttaatacagatagatccagtagtagagacatcatcggtccaaaagactttgcatctcattagttgtccatagtgactaccaggaggtggctggcatctataacgtgtgggacgtttttatgtaaagaactgcctgtgttttttttttttttaaccaaagacactgaccatagattgacttatacttttataagtctaattgaaatacttggggtactatgaaaggactgttccttgagtggctacgattagaaaatcaggactaacaaacttttctttgtctggaagcatatatatttgtgatataattttaatatgtataattttggtttaataaatcaaatctatgacaaaagttgttctcatcaaagctaataattctgcaacttccaaaaaggactttgtaggaaaattaaaatacaaagaaaaataaaagccactagaaattttaagtctgtacagaaaagaacaggttaagacaatctgtacctctacagttggagaagcccttttgactcttccctgtattgttttgctactaggcaagtatgcagcatgttcttatgaagataattttgtcatactttgtatatttcttaaactttgaaaaattgggtttctctaaatgtaatttttggcaaaatgttttaaagttccccattgagttccaaggatttttaaatgaatgtgtttacatatacttttcataagagaaccctagaaaattaactatagtaatactctgcgttttaactcccagtattcattgtcagctggaaaacctaggcaaatttggcacaggggctgaacatggggtactttttttcttttttggagacagagtcgctctgttgctcaggctggagtgcagtggcgtgatctgggctcactgcaacctccgcctcctggtttcaagcaattctcctgcctcagcctcctgaggagctgggattacaggcgcccacc

SEQ ID NO: 332723 - DNA, 5297 bp, Homo sapiens
gacccgccccctacatccggggcctgggcggcagcagggccgccgcggggaggtcacgtggctccttcctttccgtctctggccggctgggcgcgggcgactgctggcgaggcgcgtgggaccttacgctggttccccttcgtctcctctcccggcccgggccactagagagttcgctgacgccgggtgagctgagcctgccgccaagatgccggcctattttcagaggccggaaaatgccctcaaacgcgccaacgaatttcttgaggttggcaaaaagcagcctgctctggatgttctttatgatgttatgaaaagtaaaaaacatagaacatggcaaaagatacacgaaccaattatgttgaaatacttggaactttgcgtggatcttcgcaagagccacttggcaaaggaggggttataccagtataagaacatttgtcaacaggtgaacataaaatctctggaggatgttgttagggcatatttgaaaatggcagaggaaaaaactgaagctgctaaagaagaatctcagcagatggtcttagatatagaggatctagataatattcaaactcctgagagtgttctcctaagtgctgtaagtggtgaagacactcaggatcgtactgacagattacttttaactccatgggttaaattcctgtgggagtcttacaggcagtgtttggaccttcttagaaacaattctagagtagagcgcctgtaccatgatattgcccagcaagctttcaaattctgcctccaatacacgcgtaaggctgaattccgtaaactgtgtgacaatttgagaatgcacttatcgcagattcagcgccaccataaccaaagtacggcaatcaatcttaataatccagagagccagtccatgcatttggaaaccagacttgttcagctggacagtgctatcagcatggaattgtggcaggaagcattcaaagctgtggaagatattcacgggctattctccttgtctaaaaaaccacctaaacctcagttgatggcaaattactataacaaagtctcaactgtgttttggaaatctggaaatgctctttttcatgcatctacactccatcgtctttaccatctctctagagaaatgagaaagaatctcacacaagacgagatgcaaagaatgtctactagagtccttttagccactctttccatccctattactcctgagcgtacggatattgctcgacttctggatatggatggcattatagttgaaaaacagcgtcgccttgcaacactactaggtcttcaagccccaccgacacgaattggccttattaatgatatggtcagatttaatgtactacaatatgttgtcccagaagtgaaagacctttacaattggcttgaagtagaatttaacccattaaaactctgtgagcgagtcacaaaggttctaaattgggttagggaacaacctgaaaaggaaccggaattgcagcagtatgtgccacaactgcaaaacaacaccatcctccgccttctgcagcaggtgtcacagatttatcagagcattgagttttctcgtttgacttctttggttccttttgttgatgctttccaactggaacgggccatagtagatgcagccaggcattgcgacttgcaggttcgtattgatcacacttctcggaccctgagttttggatctgatttgaattatgctactcgagaagatgctccgattggtcctcatttgcaaagcatgccttcagagcagataagaaaccagctgacagccatgtcctcagtacttgcaaaagcacttgaagtcattaaaccagctcatatactgcaagagaaagaagaacagcatcagttggctgtcactgcataccttaaaaattcacgaaaagagcaccagcggatcctggctcgccgccagacaattgaggagagaaaagagcgccttgagagtctgaatattcagcgtgagaaagaagaattggaacagagggaagctgaactccagaaagtgcggaaggctgaggaagagaggctgcgccaggaagcaaaggagagagagaaggagcgtatcttacaggaacatgaacaaatcaaaaagaaaactgtccgagagcgtttggagcagatcaagaaaacagaactgggtgccaaagcattcaaagatattgatattgaagaccttgaggaattggatccagattttatcatggctaaacaggttgaacaactggagaaagaaaagaaagaacttcaagaacgcctaaagaatcaagaaaagaagattgactattttgaaagagccaaacgtttggaagaaattcctttgataaagagcgcttacgaggaacagagaattaaagacatggatctgtgggagcaacaagaggaagaaagaattactacaatgcagctagaacgtgaaaaggctcttgaacataagaatcgaatgtcacgaatgcttgaagacagagatttattcgtaatgcgactcaaagctgcacggcagtctgtttatgaggaaaaacttaaacagtttgaagagcgattagcagaagaaaggcataatcgattggaagaacggaaaaggcagcgtaaagaagaacgcaggataacatactatagagaaaaagaagaggaggagcagagaagggcagaagaacaaatgctaaaagagcgggaagagagagagcgcgccgaacgagcaaaacgcgaggaagagctacgagagtatcaggagcgggtgaagaaattagaagaagtggaaaggaaaaaacgccaaagggagttggaaattgaagaacgagaacggcgtagagaggaagagagaagacttggcgatagttccctttctagaaaggactctcgttggggagatagagattcagaaggcacctggagaaaaggacctgaagcagattctgagtggagaagaggcccgccagagaaggagtggagacgtggagaagggcgagatgaggacaggtctcatagaagagatgaagagcggccccggcgtctgggggatgatgaagatagagagccctctcttagaccagacgatgatcgggttccccggcgtggcatggatgatgacagaggccctagacgtggtcctgaggaagataggttctctcgtcgtggggcagacgatgaccggccttcctggcgtaacacagatgatgacaggcctcccagacgaattgccgatgaagacaggggaaactggcgtcatgcggatgatgacagaccacctagacgaggactggatgaggacagaggaagctggcgaacagctgatgaggacagaggaccaagacgtgggatggatgatgaccgggggccgaggcgaggaggcgctgatgatgagcgatcatcctggcgtaatgctgatgatgaccggggtcccaggcgagggttggatgatgatcggggtcccaggcgaggcatggatgatgaccggggtcccaggcgaggcatggatgatgaccggggtcccaggcgaggcatggatgatgaccggggtcccaggcgagggttggatgatgatcgaggaccttggaggaacgccgatgatgacagaattcccaggcgtggtgcagaggatgacaggggcccttggagaaacatggatgatgatcgcctttcaagacgtgctgatgatgatcggtttcccagacggggtgatgactcaagacctggtccttggagaccattagtcaagccaggtggatggagagagaaagaaaaagccagagaggagagctggggtccacctcgagaatcaaggccatcagaagaacgtgaatgggacagagaagagagaaagggacagagagagagatgtggatcgagaggatcgcttcagaagacctagggatgaaggtggctggagaagaggaccagctgaggaatcttcaagctggagagactcaagtcgccgggacgatagggatagggatgaccgtcgccgtgagagggatgaccggcgtgatctaagagaaagacgagatctaagagacgacagggaccgaagaggacctccactcagatcagaacgtgaagaagtaagttcttggagacgtgctgatgacaggaaagatgaccgggtggaagagcgggaccctcctcgtcgagttcctcccccagctctttcaagagaccgagaaagagaccgagaccgagaaagagaaggtgaaaaagagaaggcctcatggagagctgagaaagatagggaatctctccgtcgtactaaaaatgagactgatgaagatggatggaccacagtacgacgttaagtctcaagataatggatttaaactggtgtcttaaataggtttgatcacattcaaggattattatacttgtgcttcaaccaatctaaattggattctttaatgttgtttcaccataacacaaaaagcatgaacttgtattaatcctatataatagattgatcatgcaccatatccacaggaggttggaaaaaccatgccattttctggaatttaagggtgttgcattatttcatcaatcatttgttgacaaaaaagaaaaactaaaaaataaatttaaaatgtgaaccttcaggtattgagtaacacctttatcttggtatagaactgatacttttttttgattttgaaatatctgataataatttggaatgaagtaaggttctgttaaaatatatttgaagaccctttaaagcagtgaatctgaaacaattttcacacccttaagtggttgatacgtacctattttaggtattttgaggtatttaccataaactaaatttagaaattttttagattcacttgaagtaaacattacaaacattggatacggtggggttttctttagattttacttgagagaaggtgagtacaaagcaatttgcagttgttgtaatgacaagattactgcgcaagtgtgaatccaaacagtatagcttttaaattttaaagcatttggtaaattatcgctgagtttttttctgttgccaatagcaaactgcttttccattaatggagaattcatgcctttcaagcattttaaatatgacaatatttataaatgtatggtttggaggaatcgtttaaattctctttcctaattttctttcttttgaagatagattctttcaacaagtaatttgtagtaatgactgtgttgacttcaattttggagcgcagtagctatgttaaagatgaactatttggtctcattgaagccaacacagaacttgctgctgtgttttttcttcagtgataaataaaatacttacagaa

SEQ ID NO: 332724 - DNA, 6667 bp, Homo sapiens
gacccgccccctacatccggggcctgggcggcagcagggccgccgcggggaggtcacgtggctccttcctttccgtctctggccggctgggcgcgggcgactgctggcgaggcgcgtgggaccttacgctggttccccttcgtctcctctcccggcccgggccactagagagttcgctgacgccgggtgagctgagcctgccgccaagatgccggcctattttcagaggccggaaaatgccctcaaacgcgccaacgaatttcttgaggttggcaaaaagcagcctgctctggatgttctttatgatgttatgaaaagtaaaaaacatagaacatggcaaaagatacacgaaccaattatgttgaaatacttggaactttgcgtggatcttcgcaagagccacttggcaaaggaggggttataccagtataagaacatttgtcaacaggtgaacataaaatctctggaggatgttgttagggcatatttgaaaatggcagaggaaaaaactgaagctgctaaagaagaatctcagcagatggtcttagatatagaggatctagataatattcaaactcctgagagtgttctcctaagtgctgtaagtggtgaagacactcaggatcgtactgacagattacttttaactccatgggttaaattcctgtgggagtcttacaggcagtgtttggaccttcttagaaacaattctagagtagagcgcctgtaccatgatattgcccagcaagctttcaaattctgcctccaatacacgcgtaaggctgaattccgtaaactgtgtgacaatttgagaatgcacttatcgcagattcagcgccaccataaccaaagtacggcaatcaatcttaataatccagagagccagtccatgcatttggaaaccagacttgttcagctggacagtgctatcagcatggaattgtggcaggaagcattcaaagctgtggaagatattcacgggctattctccttgtctaaaaaaccacctaaacctcagttgatggcaaattactataacaaagtctcaactgtgttttggaaatctggaaatgctctttttcatgcatctacactccatcgtctttaccatctctctagagaaatgagaaagaatctcacacaagacgagatgcaaagaatgtctactagagtccttttagccactctttccatccctattactcctgagcgtacggatattgctcgacttctggatatggatggcattatagttgaaaaacagcgtcgccttgcaacactactaggtcttcaagccccaccgacacgaattggccttattaatgatatggtcagatttaatgtactacaatatgttgtcccagaagtgaaagacctttacaattggcttgaagtagaatttaacccattaaaactctgtgagcgagtcacaaaggttctaaattgggttagggaacaacctgaaaaggaaccggaattgcagcagtatgtgccacaactgcaaaacaacaccatcctccgccttctgcagcaggtgtcacagatttatcagagcattgagttttctcgtttgacttctttggttccttttgttgatgctttccaactggaacgggccatagtagatgcagccaggcattgcgacttgcaggttcgtattgatcacacttctcggaccctgagttttggatctgatttgaattatgctactcgagaagatgctccgattggtcctcatttgcaaagcatgccttcagagcagataagaaaccagctgacagccatgtcctcagtacttgcaaaagcacttgaagtcattaaaccagctcatatactgcaagagaaagaagaacagcatcagttggctgtcactgcataccttaaaaattcacgaaaagagcaccagcggatcctggctcgccgccagacaattgaggagagaaaagagcgccttgagagtctgaatattcagcgtgagaaagaagaattggaacagagggaagctgaactccagaaagtgcggaaggctgaggaagagaggctgcgccaggaagcaaaggagagagagaaggagcgtatcttacaggaacatgaacaaatcaaaaagaaaactgtccgagagcgtttggagcagatcaagaaaacagaactgggtgccaaagcattcaaagatattgatattgaagaccttgaggaattggatccagattttatcatggctaaacaggttgaacaactggagaaagaaaagaaagaacttcaagaacgcctaaagaatcaagaaaagaagattgactattttgaaagagccaaacgtttggaagaaattcctttgataaagagcgcttacgaggaacagagaattaaagacatggatctgtgggagcaacaagaggaagaaagaattactacaatgcagctagaacgtgaaaaggctcttgaacataagaatcgaatgtcacgaatgcttgaagacagagatttattcgtaatgcgactcaaagctgcacggcagtctgtttatgaggaaaaacttaaacagtttgaagagcgattagcagaagaaaggcataatcgattggaagaacggaaaaggcagcgtaaagaagaacgcaggataacatactatagagaaaaagaagaggaggagcagagaagggcagaagaacaaatgctaaaagagcgggaagagagagagcgcgccgaacgagcaaaacgcgaggaagagctacgagagtatcaggagcgggtgaagaaattagaagaagtggaaaggaaaaaacgccaaagggagttggaaattgaagaacgagaacggcgtagagaggaagagagaagacttggcgatagttccctttctagaaaggactctcgttggggagatagagattcagaaggcacctggagaaaaggacctgaagcagattctgagtggagaagaggcccgccagagaaggagtggagacgtggagaagggcgagatgaggacaggtctcatagaagagatgaagagcggccccggcgtctgggggatgatgaagatagagagccctctcttagaccagacgatgatcgggttccccggcgtggcatggatgatgacagaggccctagacgtggtcctgaggaagataggttctctcgtcgtggggcagacgatgaccggccttcctggcgtaacacagatgatgacaggcctcccagacgaattgccgatgaagacaggggaaactggcgtcatgcggatgatgacagaccacctagacgaggactggatgaggacagaggaagctggcgaacagctgatgaggacagaggaccaagacgtgggatggatgatgaccgggggccgaggcgaggaggcgctgatgatgagcgatcatcctggcgtaatgctgatgatgaccggggtcccaggcgagggttggatgatgatcggggtcccaggcgaggcatggatgatgaccggggtcccaggcgaggcatggatgatgaccggggtcccaggcgaggcatggatgatgaccggggtcccaggcgagggttggatgatgatcgaggaccttggaggaacgccgatgatgacagaattcccaggcgtggtgcagaggatgacaggggcccttggagaaacatggatgatgatcgcctttcaagacgtgctgatgatgatcggtttcccagacggggtgatgactcaagacctggtccttggagaccattagtcaagccaggtggatggagagagaaagaaaaagccagagaggagagctggggtccacctcgagaatcaaggccatcagaagaacgtgaatgggacagagaaaaagaaagggacagagataatcaagatcgggaggagaatgacaaggaccctgagagagaaagggacagagagagagatgtggatcgagaggatcgcttcagaagacctagggatgaaggtggctggagaagaggaccagctgaggaatcttcaagctggagagactcaagtcgccgggacgatagggatagggatgaccgtcgccgtgagagggatgaccggcgtgatctaagagaaagacgagatctaagagacgacagggaccgaagaggacctccactcagatcagaacgtgaagaagtaagttcttggagacgtgctgatgacaggaaagatgaccgggtggaagagcgggaccctcctcgtcgagttcctcccccagctctttcaagagaccgagaaagagaccgagaccgagaaagagaaggtgaaaaagagaaggcctcatggagagctgagaaagatagggaatctctccgtcgtactaaaaatgagactgatgaagatggatggaccacagtacgacgttaagtctcaagataatggatttaaactggtgtcttaaataggtttgatcacattcaaggattattatacttgtgcttcaaccaatctaaattggattctttaatgttgtttcaccataacacaaaaagcatgaacttgtattaatcctatataatagattgatcatgcaccatatccacaggaggttggaaaaaccatgccattttctggaatttaagggtgttgcattatttcatcaatcatttgttgacaaaaaagaaaaactaaaaaataaatttaaaatgtgaaccttcaggtattgagtaacacctttatcttggtatagaactgatacttttttttgattttgaaatatctgataataatttggaatgaagtaaggttctgttttaagtggttgatacgtacctattttaggtattttgaggtatttaccataaactaaatttagaaattttttagattcacttgaagtaaacattacaaacattggatacggtggggttttctttagattttacttgagagaaggtgagtacaaagcaatttgcagttgttgtaatgacaagattactgcgcaagtgtgaatccaaacagtatagcttttaaattttaaagcatttggtaaattatcgctgagtttttttctgttgccaatagcaaactgcttttccattaatggagaattcatgcctttcaagcattttaaatatgacaatatttataaatgtatggtttggaggaatcgtttaaattctctttcctaattttctttcttttgaagatagattctttcaacaagtaatttgtagtaatgactgtgttgacttcaattttggagcgcagtagctatgttaaagatgaactatttggtctcattgaagccaacacagaacttgctgctgtgttttttcttcagtgataaataaaatacttacagaatttgttttagtgttgatttgtggttatagtattttgtttataatggtaagtttgcatattcagttgagttttttttacttgaatttttatcagtgccattaaatgtctgtgtttagtatcaatgaaaatgaacctaaatataacaaagaaagcatatgtggctaggatgtccccctaacatgtcttcctttgttaatgcaggaattccttagtttccttgtaacgctgtcctctgagtttgtgtgtgcatgtgcgtgtttgaagtaccaccttgggttttcacctgaaattagaaaaatcgtagttaatttgagaaaatgttacaaattcatcatggctgtaggcacttatttctgttattgagtagtggtgagaattcctattggtacagctgtagggccagaagagggagtattgatgctttttaacttaaccagatgcagctatttttgtttgatgttaccaatgatagaaatcattttaaacaccttagtatctggtatttcaaatacgtagaagtctttaaaggtctttcgtggggagaaggacttttctttcataacaagagaatttcagatcagtgattacaagtggggcagtaacttgctaagagtttgcttcctggagagtagatctgtatgtgtgacatcacaggtaagccccaagaatttatttaatcagatttgttcagacgagttactgctgcctacgttagagttagatttcaaggcgagtcagcaaacccatcctttctgctcagtctcccgtactgttctcccaagttctttgttctgggagtcagaacccaagtgcaagaggagggcagaagagtctgatgctgttactttgcgatcctgctcttggtttccactgtccaggccatacaactctgtctactcccattagtatttaccaacaggtgttaaaggaaagctgaacaagcagcctactcaccgatctgctaggtggtcttccatgttcatggtggcttctgcagtttcattgagagtaacattgctgttaatacagatagatccagtagtagagacatcatcggtccaaaagactttgcatctcattagttgtccatagtgactaccaggaggtggctggcatctataacgtgtgggacgtttttatgtaaagaactgcctgtgttttttttttttttaaccaaagacactgaccatagattgacttatacttttataagtctaattgaaatacttggggtactatgaaaggactgttccttgagtggctacgattagaaaatcaggactaacaaacttttctttgtctggaagcatatatatttgtgatataattttaatatgtataattttggtttaataaatcaaatctatgaca

SEQ ID NO: 332725 - DNA, 3262 bp, Homo sapiens
ctagaggatcccggatgtttccctttgtctccttttggagttgtacctgaattttattgtccaattttcatccgaatccactggggaatgggacgattttgcttttgtttcttggccaggaatcgcgtaatcctgaaagtcttgtgagaagacatggcgagcagcagagtcaagaacacaccacgatggcggagaaaggaagattgactattttgaaagagccaaacgtttggaagaaattcctttgataaagagcgcttacgaggaacagagaattaaagacatggatctgtgggagcaacaagaggaagaaagaattactacaatgcagctagaacgtgaaaaggctcttgaacataagaatcgaatgtcacgaatgcttgaagacagagatttattcgtaatgcgactcaaagctgcacggcagtctgtttatgaggaaaaacttaaacagtttgaagagcgattagcagaagaaaggcataatcgattggaagaacggaaaaggcagcgtaaagaagaacgcaggataacatactatagagaaaaagaagaggaggagcagagaagggcagaagaacaaatgctaaaagagcgggaagagagagagcgcgccgaacgagcaaaacgcgaggaagagctacgagagtatcaggagcgggtgaagaaattagaagaagtggaaaggaaaaaacgccaaagggagttggaaattgaagaacgagaacggcgtagagaggaagagagaagacttggcgatagttccctttctagaaaggactctcgttggggagatagagattcagaaggcacctggagaaaaggacctgaagcagattctgagtggagaagaggcccgccagagaaggagtggagacgtggagaagggcgagatgaggacaggtctcatagaagagatgaagagcggccccggcgtctgggggatgatgaagatagagagccctctcttagaccagacgatgatcgggttccccggcgtggcatggatgatgacagaggccctagacgtggtcctgaggaagataggttctctcgtcgtggggcagacgatgaccggccttcctggcgtaacacagatgatgacaggcctcccagacgaattgccgatgaagacaggggaaactggcgtcatgcggatgatgacagaccacctagacgaggactggatgaggacagaggaagctggcgaacagctgatgaggacagaggaccaagacgtgggatggatgatgaccgggggccgaggcgaggaggcgctgatgatgagcgatcatcctggcgtaatgctgatgatgaccggggtcccaggcgagggttggatgatgatcggggtcccaggcgaggcatggatgatgaccggggtcccaggcgaggcatggatgatgaccggggtcccaggcgaggcatggatgatgaccggggtcccaggcgagggttggatgatgatcgaggaccttggaggaacgccgatgatgacagaattcccaggcgtggtgcagaggatgacaggggcccttggagaaacatggatgatgatcgcctttcaagacgtgctgatgatgatcggtttcccagacggggtgatgactcaagacctggtccttggagaccattagtcaagccaggtggatggagagagaaagaaaaagccagagaggagagctggggtccacctcgagaatcaaggccatcagaagaacgtgaatgggacagagaaaaagaaagggacagagataatcaagatcgggaggagaatgacaaggaccctgagagagaaagggacagagagagagatgtggatcgagaggatcgcttcagaagacctagggatgaaggtggctggagaagaggaccagctgaggaatcttcaagctggagagactcaagtcgccgggacgatagggatagggatgaccgtcgccgtgagagggatgaccggcgtgatctaagagaaagacgagatctaagagacgacagggaccgaagaggacctccactcagatcagaacgtgaagaagtaagttcttggagacgtgctgatgacaggaaagatgaccgggtggaagagcgggaccctcctcgtcgagttcctcccccagctctttcaagagaccgagaaagagaccgagaccgagaaagagaaggtgaaaaagagaaggcctcatggagagctgagaaagatagggaatctctccgtcgtactaaaaatgagactgatgaagatggatggaccacagtacgacgttaagtctcaagataatggatttaaactggtgtcttaaataggtttgatcacattcaaggattattatacttgtgcttcaaccaatctaaattggattctttaatgttgtttcaccataacacaaaaagcatgaacttgtattaatcctatataatagattgatcatgcaccatatccacaggaggttggaaaaaccatgccattttctggaatttaagggtgttgcattatttcatcaatcatttgttgacaaaaaagaaaaactaaaaaataaatttaaaatgtgaaccttcaggtattgagtaacacctttatcttggtatagaactgatacttttttttgattttgaaatatctgataataatttggaatgaagtaaggttctgttaaaatatatttgaagaccctttaaagcagtgaatctgaaacaattttcacacccttaagtggttgatacgtacctattttaggtattttgaggtatttaccataaactaaatttagaaattttttagattcacttgaagtaaacattacaaacattggatacggtggggttttctttagattttacttgagagaaggtgagtacaaagcaatttgcagttgttgtaatgacaagattactgcgcaagtgtgaatccaaacagtatagcttttaaattttaaagcatttggtaaattatcgctgagtttttttctgttgccaatagcaaactgcttttccattaatggagaattcatgcctttcaagcattttaaatatgacaatatttataaatgtatggtttggaggaatcgtttaaattctctttcctaattttctttcttttgaagatagattctttcaacaagtaatttgtagtaatgactgtgttgacttcaattttggagcgcagtagctatgttaaagatgaactatttggtctcattgaagccaacacagaacttgctgctgtgttttttcttcagtgataaataaaatacttacagaa

SEQ ID NO: 332726 - DNA, 2897 bp, Homo sapiens
aagtttgaaatagatgatgtccgatgttgagcagaattattctatgcgactcaactgcacgcagtcgctatggagaaaaacttaaacagtttgaagagcgattagcagaagaaaggcataatcgattggaagaacggaaaaggcagcgtaaagaagaacgcaggataacatactatagagaaaaagaagaggaggagcagagaagggcagaagaacaaatgctaaaagagcgggaagagagagagcgcgccgaacgagcaaaacgcgaggaagagctacgagagtatcaggagcgggtgaagaaattagaagaagtggaaaggaaaaaacgccaaagggagttggaaattgaagaacgagaacggcgtagagaggaagagagaagacttggcgatagttccctttctagaaaggactctcgttggggagatagagattcagaaggcacctggagaaaaggacctgaagcagattctgagtggagaagaggcccgccagagaaggagtggagacgtggagaagggcgagatgaggacaggtctcatagaagagatgaagagcggccccggcgtctgggggatgatgaagatagagagccctctcttagaccagacgatgatcgggttccccggcgtggcatggatgatgacagaggccctagacgtggtcctgaggaagataggttctctcgtcgtggggcagacgatgaccggccttcctggcgtaacacagatgatgacaggcctcccagacgaattgccgatgaagacaggggaaactggcgtcatgcggatgatgacagaccacctagacgaggactggatgaggacagaggaagctggcgaacagctgatgaggacagaggaccaagacgtgggatggatgatgaccgggggccgaggcgaggaggcgctgatgatgagcgatcatcctggcgtaatgctgatgatgaccggggtcccaggcgagggttggatgatgatcggggtcccaggcgaggcatggatgatgaccggggtcccaggcgaggcatggatgatgaccggggtcccaggcgaggcatggatgatgaccggggtcccaggcgagggttggatgatgatcgaggaccttggaggaacgccgatgatgacagaattcccaggcgtggtgcagaggatgacaggggcccttggagaaacatggatgatgatcgcctttcaagacgtgctgatgatgatcggtttcccagacggggtgatgactcaagacctggtccttggagaccattagtcaagccaggtggatggagagagaaagaaaaagccagagaggagagctggggtccacctcgagaatcaaggccatcagaagaacgtgaatgggacagagaaaaagaaagggacagagataatcaagatcgggaggagaatgacaaggaccctgagagagaaagggacagagagagagatgtggatcgagaggatcgcttcagaagacctagggatgaaggtggctggagaagaggaccagctgaggaatcttcaagctggagagactcaagtcgccgggacgatagggatagggatgaccgtcgccgtgagagggatgaccggcgtgatctaagagaaagacgagatctaagagacgacagggaccgaagaggacctccactcagatcagaacgtgaagaagtaagttcttggagacgtgctgatgacaggaaagatgaccgggtggaagagcgggaccctcctcgtcgagttcctcccccagctctttcaagagaccgagaaagagaccgagaccgagaaagagaaggtgaaaaagagaaggcctcatggagagctgagaaagatagggaatctctccgtcgtactaaaaatgagactgatgaagatggatggaccacagtacgacgttaagtctcaagataatggatttaaactggtgtcttaaataggtttgatcacattcaaggattattatacttgtgcttcaaccaatctaaattggattctttaatgttgtttcaccataacacaaaaagcatgaacttgtattaatcctatataatagattgatcatgcaccatatccacaggaggttggaaaaaccatgccattttctggaatttaagggtgttgcattatttcatcaatcatttgttgacaaaaaagaaaaactaaaaaataaatttaaaatgtgaaccttcaggtattgagtaacacctttatcttggtatagaactgatacttttttttgattttgaaatatctgataataatttggaatgaagtaaggttctgttaaaatatatttgaagaccctttaaagcagtgaatctgaaacaattttcacacccttaagtggttgatacgtacctattttaggtattttgaggtatttaccataaactaaatttagaaattttttagattcacttgaagtaaacattacaaacattggatacggtggggttttctttagattttacttgagagaaggtgagtacaaagcaatttgcagttgttgtaatgacaagattactgcgcaagtgtgaatccaaacagtatagcttttaaattttaaagcatttggtaaattatcgctgagtttttttctgttgccaatagcaaactgcttttccattaatggagaattcatgcctttcaagcattttaaatatgacaatatttataaatgtatggtttggaggaatcgtttaaattctctttcctaattttctttcttttgaagatagattctttcaacaagtaatttgtagtaatgactgtgttgacttcaattttggagcgcagtagctatgttaaagatgaactatttggtctcattgaagccaacacagaacttgctgctgtgttttttcttcagtgataaataaaatacttacagaa

SEQ ID NO: 332727 - DNA, 2619 bp, Homo sapiens
cgtctgtatgtaaaaggaggcgtagggatggagggcgatgaggactaggatgatggcgggcaggatagttcagacggtttctatttcctgagcgtctgagatgttagtattagttagttttgttgtgagtgttaggaaaagggcatacaggactaggaagcagataaggaaaatgattatgcccggcgtgatctaagagtaagacgagatctaagagacgacagggagtggagacgtggagaagggcgagatgaggacaggtctcatagaagagatgaagagcggccccggcgtctgggggatgatgaagatagagagccctctcttagaccagacgatgatcgggttccccggcgtggcatggatgatgacagaggccctagacgtggtcctgaggaagataggttctctcgtcgtggggcagacgatgaccggccttcctggcgtaacacagatgatgacaggcctcccagacgaattgccgatgaagacaggggaaactggcgtcatgcggatgatgacagaccacctagacgaggactggatgaggacagaggaagctggcgaacagctgatgaggacagaggaccaagacgtgggatggatgatgaccgggggccgaggcgaggaggcgctgatgatgagcgatcatcctggcgtaatgctgatgatgaccggggtcccaggcgagggttggatgatgatcggggtcccaggcgaggcatggatgatgaccggggtcccaggcgaggcatggatgatgaccggggtcccaggcgaggcatggatgatgaccggggtcccaggcgagggttggatgatgatcgaggaccttggaggaacgccgatgatgacagaattcccaggcgtggtgcagaggatgacaggggcccttggagaaacatggatgatgatcgcctttcaagacgtgctgatgatgatcggtttcccagacggggtgatgactcaagacctggtccttggagaccattagtcaagccaggtggatggagagagaaagaaaaagccagagaggagagctggggtccacctcgagaatcaaggccatcagaagaacgtgaatgggacagagaaaaagaaagggacagagataatcaagatcgggaggagaatgacaaggaccctgagagagaaagggacagagagagagatgtggatcgagaggatcgcttcagaagacctagggatgaaggtggctggagaagaggaccagctgaggaatcttcaagctggagagactcaagtcgccgggacgatagggatagggatgaccgtcgccgtgagagggatgaccggcgtgatctaagagaaagacgagatctaagagacgacagggaccgaagaggacctccactcagatcagaacgtgaagaagtaagttcttggagacgtgctgatgacaggaaagatgaccgggtggaagagcgggaccctcctcgtcgagttcctcccccagctctttcaagagaccgagaaagagaccgagaccgagaaagagaaggtgaaaaagagaaggcctcatggagagctgagaaagatagggaatctctccgtcgtactaaaaatgagactgatgaagatggatggaccacagtacgacgttaagtctcaagataatggatttaaactggtgtcttaaataggtttgatcacattcaaggattattatacttgtgcttcaaccaatctaaattggattctttaatgttgtttcaccataacacaaaaagcatgaacttgtattaatcctatataatagattgatcatgcaccatatccacaggaggttggaaaaaccatgccattttctggaatttaagggtgttgcattatttcatcaatcatttgttgacaaaaaagaaaaactaaaaaataaatttaaaatgtgaaccttcaggtattgagtaacacctttatcttggtatagaactgatacttttttttgattttgaaatatctgataataatttggaatgaagtaaggttctgttaaaatatatttgaagaccctttaaagcagtgaatctgaaacaattttcacacccttaagtggttgatacgtacctattttaggtattttgaggtatttaccataaactaaatttagaaattttttagattcacttgaagtaaacattacaaacattggatacggtggggttttctttagattttacttgagagaaggtgagtacaaagcaatttgcagttgttgtaatgacaagattactgcgcaagtgtgaatccaaacagtatagcttttaaattttaaagcatttggtaaattatcgctgagtttttttctgttgccaatagcaaactgcttttccattaatggagaattcatgcctttcaagcattttaaatatgacaatatttataaatgtatggtttggaggaatcgtttaaattctctttcctaattttctttcttttgaagatagattctttcaacaagtaatttgtagtaatgactgtgttgacttcaattttggagcgcagtagctatgttaaagatgaactatttggtctcattgaagccaacacagaacttgctgctgtgttttttcttcagtgataaataaaatacttacagaa

SEQ ID NO: 332728 - DNA, 2257 bp, Homo sapiens
tcctagcctcgccagtgtcctagcctcgccagtgtcctagcctcgccagtgtcctagcctcgccagtgtcctagcctcgccagtgtcctagcctcgccagtgaggagacagacgaattgccgatgaagacaggggaaactggcgtcatgcggatgatgacagaccacctagacgaggactggatgaggacagaggaagctggcgaacagctgatgaggacagaggaccaagacgtgggatggatgatgaccgggggccgaggcgaggaggcgctgatgatgagcgatcatcctggcgtaatgctgatgatgaccggggtcccaggcgagggttggatgatgatcggggtcccaggcgaggcatggatgatgaccggggtcccaggcgaggcatggatgatgaccggggtcccaggcgaggcatggatgatgaccggggtcccaggcgagggttggatgatgatcgaggaccttggaggaacgccgatgatgacagaattcccaggcgtggtgcagaggatgacaggggcccttggagaaacatggatgatgatcgcctttcaagacgtgctgatgatgatcggtttcccagacggggtgatgactcaagacctggtccttggagaccattagtcaagccaggtggatggagagagaaagaaaaagccagagaggagagctggggtccacctcgagaatcaaggccatcagaagaacgtgaatgggacagagaaaaagaaagggacagagataatcaagatcgggaggagaatgacaaggaccctgagagagaaagggacagagagagagatgtggatcgagaggatcgcttcagaagacctagggatgaaggtggctggagaagaggaccagctgaggaatcttcaagctggagagactcaagtcgccgggacgatagggatagggatgaccgtcgccgtgagagggatgaccggcgtgatctaagagaaagacgagatctaagagacgacagggaccgaagaggacctccactcagatcagaacgtgaagaagtaagttcttggagacgtgctgatgacaggaaagatgaccgggtggaagagcgggaccctcctcgtcgagttcctcccccagctctttcaagagaccgagaaagagaccgagaccgagaaagagaaggtgaaaaagagaaggcctcatggagagctgagaaagatagggaatctctccgtcgtactaaaaatgagactgatgaagatggatggaccacagtacgacgttaagtctcaagataatggatttaaactggtgtcttaaataggtttgatcacattcaaggattattatacttgtgcttcaaccaatctaaattggattctttaatgttgtttcaccataacacaaaaagcatgaacttgtattaatcctatataatagattgatcatgcaccatatccacaggaggttggaaaaaccatgccattttctggaatttaagggtgttgcattatttcatcaatcatttgttgacaaaaaagaaaaactaaaaaataaatttaaaatgtgaaccttcaggtattgagtaacacctttatcttggtatagaactgatacttttttttgattttgaaatatctgataataatttggaatgaagtaaggttctgttaaaatatatttgaagaccctttaaagcagtgaatctgaaacaattttcacacccttaagtggttgatacgtacctattttaggtattttgaggtatttaccataaactaaatttagaaattttttagattcacttgaagtaaacattacaaacattggatacggtggggttttctttagattttacttgagagaaggtgagtacaaagcaatttgcagttgttgtaatgacaagattactgcgcaagtgtgaatccaaacagtatagcttttaaattttaaagcatttggtaaattatcgctgagtttttttctgttgccaatagcaaactgcttttccattaatggagaattcatgcctttcaagcattttaaatatgacaatatttataaatgtatggtttggaggaatcgtttaaattctctttcctaattttctttcttttgaagatagattctttcaacaagtaatttgtagtaatgactgtgttgacttcaattttggagcgcagtagctatgttaaagatgaactatttggtctcattgaagccaacacagaacttgctgctgtgttttttcttcagtgataaataaaatacttacagaa

SEQ ID NO: 332729 - DNA, 2156 bp, Homo sapiens
taccaagaaaaagtttgtaggcaaacctttaggccctcctacagcacaggcggggccagactcctcacacattcccaatcgcaagggacagaggaagctggcgaacagctgatgaggacagaggaccaagacgtgggatggatgatgaccgggggccgaggcgaggaggcgctgatgatgagcgatcatcctggcgtaatgctgatgatgaccggggtcccaggcgagggttggatgatgatcggggtcccaggcgaggcatggatgatgaccggggtcccaggcgaggcatggatgatgaccggggtcccaggcgaggcatggatgatgaccggggtcccaggcgagggttggatgatgatcgaggaccttggaggaacgccgatgatgacagaattcccaggcgtggtgcagaggatgacaggggcccttggagaaacatggatgatgatcgcctttcaagacgtgctgatgatgatcggtttcccagacggggtgatgactcaagacctggtccttggagaccattagtcaagccaggtggatggagagagaaagaaaaagccagagaggagagctggggtccacctcgagaatcaaggccatcagaagaacgtgaatgggacagagaaaaagaaagggacagagataatcaagatcgggaggagaatgacaaggaccctgagagagaaagggacagagagagagatgtggatcgagaggatcgcttcagaagacctagggatgaaggtggctggagaagaggaccagctgaggaatcttcaagctggagagactcaagtcgccgggacgatagggatagggatgaccgtcgccgtgagagggatgaccggcgtgatctaagagaaagacgagatctaagagacgacagggaccgaagaggacctccactcagatcagaacgtgaagaagtaagttcttggagacgtgctgatgacaggaaagatgaccgggtggaagagcgggaccctcctcgtcgagttcctcccccagctctttcaagagaccgagaaagagaccgagaccgagaaagagaaggtgaaaaagagaaggcctcatggagagctgagaaagatagggaatctctccgtcgtactaaaaatgagactgatgaagatggatggaccacagtacgacgttaagtctcaagataatggatttaaactggtgtcttaaataggtttgatcacattcaaggattattatacttgtgcttcaaccaatctaaattggattctttaatgttgtttcaccataacacaaaaagcatgaacttgtattaatcctatataatagattgatcatgcaccatatccacaggaggttggaaaaaccatgccattttctggaatttaagggtgttgcattatttcatcaatcatttgttgacaaaaaagaaaaactaaaaaataaatttaaaatgtgaaccttcaggtattgagtaacacctttatcttggtatagaactgatacttttttttgattttgaaatatctgataataatttggaatgaagtaaggttctgttaaaatatatttgaagaccctttaaagcagtgaatctgaaacaattttcacacccttaagtggttgatacgtacctattttaggtattttgaggtatttaccataaactaaatttagaaattttttagattcacttgaagtaaacattacaaacattggatacggtggggttttctttagattttacttgagagaaggtgagtacaaagcaatttgcagttgttgtaatgacaagattactgcgcaagtgtgaatccaaacagtatagcttttaaattttaaagcatttggtaaattatcgctgagtttttttctgttgccaatagcaaactgcttttccattaatggagaattcatgcctttcaagcattttaaatatgacaatatttataaatgtatggtttggaggaatcgtttaaattctctttcctaattttctttcttttgaagatagattctttcaacaagtaatttgtagtaatgactgtgttgacttcaattttggagcgcagtagctatgttaaagatgaactatttggtctcattgaagccaacacagaacttgctgctgtgttttttcttcagtgataaataaaatacttacagaa

SEQ ID NO: 332730 - DNA, 4228 bp, Homo sapiens
gacccgccccctacatccggggcctgggcggcagcagggccgccgcggggaggtcacgtggctccttcctttccgtctctggccggctgggcgcgggcgactgctggcgaggcgcgtgggaccttacgctggttccccttcgtctcctctcccggcccgggccactagagagttcgctgacgccgggtgagctgagcctgccgccaagatgccggcctattttcagaggccggaaaatgccctcaaacgcgccaacgaatttcttgaggttggcaaaaagcagcctgctctggatgttctttatgatgttatgaaaagtaaaaaacatagaacatggcaaaagatacacgaaccaattatgttgaaatacttggaactttgcgtggatcttcgcaagagccacttggcaaaggaggggttataccagtataagaacatttgtcaacaggtgaacataaaatctctggaggatgttgttagggcatatttgaaaatggcagaggaaaaaactgaagctgctaaagaagaatctcagcagatggtcttagatatagaggatctagataatattcaaactcctgagagtgttctcctaagtgctgtaagtggtgaagacactcaggatcgtactgacagattacttttaactccatgggttaaattcctgtgggagtcttacaggcagtgtttggaccttcttagaaacaattctagagtagagcgcctgtaccatgatattgcccagcaagctttcaaattctgcctccaatacacgcgtaaggctgaattccgtaaactgtgtgacaatttgagaatgcacttatcgcagattcagcgccaccataaccaaagtacggcaatcaatcttaataatccagagagccagtccatgcatttggaaaccagacttgttcagctggacagtgctatcagcatggaattgtggcaggaagcattcaaagctgtggaagatattcacgggctattctccttgtctaaaaaaccacctaaacctcagttgatggcaaattactataacaaagtctcaactgtgttttggaaatctggaaatgctctttttcatgcatctacactccatcgtctttaccatctctctagagaaatgagaaagaatctcacacaagacgagatgcaaagaatgtctactagagtccttttagccactctttccatccctattactcctgagcgtacggatattgctcgacttctggatatggatggcattatagttgaaaaacagcgtcgccttgcaacactactaggtcttcaagccccaccgacacgaattggccttattaatgatatggtcagatttaatgtactacaatatgttgtcccagaagtgaaagacctttacaattggcttgaagtagaatttaacccattaaaactctgtgagcgagtcacaaaggttctaaattgggttagggaacaacctgaaaaggaaccggaattgcagcagtatgtgccacaactgcaaaacaacaccatcctccgccttctgcagcaggtgtcacagatttatcagagcattgagttttctcgtttgacttctttggttccttttgttgatgctttccaactggaacgggccatagtagatgcagccaggcattgcgacttgcaggttcgtattgatcacacttctcggaccctgagttttggatctgatttgaattatgctactcgagaagatgctccgattggtcctcatttgcaaagcatgccttcagagcagataagaaaccagctgacagccatgtcctcagtacttgcaaaagcacttgaagtcattaaaccagctcatatactgcaagagaaagaagaacagcatcagttggctgtcactgcataccttaaaaattcacgaaaagagcaccagcggatcctggctcgccgccagacaattgaggagagaaaagagcgccttgagagtctgaatattcagcgtgagaaagaagaattggaacagagggaagctgaactccagaaagtgcggaaggctgaggaagagaggctgcgccaggaagcaaaggagagagagaaggagcgtatcttacaggaacatgaacaaatcaaaaagaaaactgtccgagagcgtttggagcagatcaagaaaacagaactgggtgccaaagcattcaaagatattgatattgaagaccttgaggaattggatccagattttatcatggctaaacaggttgaacaactggagaaagaaaagaaagaacttcaagaacgcctaaagaatcaagaaaagaagattgactattttgaaagagccaaacgtttggaagaaattcctttgataaagagcgcttacgaggaacagagaattaaagacatggatctgtgggagcaacaagaggaagaaagaattactacaatgcagctagaacgtgaaaaggctcttgaacataagaatcgaatgtcacgaatgcttgaagacagagatttattcgtaatgcgactcaaagctgcacggcagtctgtttatgaggaaaaacttaaacagtttgaagagcgattagcagaagaaaggcataatcgattggaagaacggaaaaggcagcgtaaagaagaacgcaggataacatactatagagaaaaagaagaggaggagcagagaagggcagaagaacaaatgctaaaagagcgggaagagagagagcgcgccgaacgagcaaaacgcgaggaagagctacgagagtatcaggagcgggtgaagaaattagaagaagtggaaaggaaaaaacgccaaagggagttggaaattgaagaacgagaacggcgtagagaggaagagagaagacttggcgatagttccctttctagaaaggactctcgttggggagatagagattcagaaggcacctggagaaaaggacctgaagcagattctgagtggagaagaggcccgccagagaaggagtggagacgtggagaagggcgagatgaggacaggtctcatagaagagatgaagagcggccccggcgtctgggggatgatgaagatagagagccctctcttagaccagacgatgatcgggttccccggcgtggcatggatgatgacagaggccctagacgtggtcctgaggaagataggttctctcgtcgtggggcagacgatgaccggccttcctggcgtaacacagatgatgacaggcctcccagacgaattgccgatgaagacaggggaaactggcgtcatgcggatgatgacagaccacctagacgaggactggatgaggacagaggaagctggcgaacagctgatgaggacagaggaccaagacgtgggatggatgatgaccgggggccgaggcgaggaggcgctgatgatgagcgatcatcctggcgtaatgctgatgatgaccggggtcccaggcggaaaaaccatgccattttctggaatttaagggtgttgcattatttcatcaatcatttgttgacaaaaaagaaaaactaaaaaataaatttaaaatgtgaaccttcaggtattgagtaacacctttatcttggtatagaactgatacttttttttgattttgaaatatctgataataatttggaatgaagtaaggttctgttaaaatatatttgaagaccctttaaagcagtgaatctgaaacaattttcacacccttaagtggttgatacgtacctattttaggtattttgaggtatttaccataaactaaatttagaaattttttagattcacttgaagtaaacattacaaacattggatacggtggggttttctttagattttacttgagagaaggtgagtacaaagcaatttgcagttgttgtaatgacaagattactgcgcaagtgtgaatccaaacagtatagcttttaaattttaaagcatttggtaaattatcgctgagtttttttctgttgccaatagcaaactgcttttccattaatggagaattcatgcctttcaagcattttaaatatgacaatatttataaatgtatggtttggaggaatcgtttaaattctctttcctaattttctttcttttgaagatagattctttcaacaagtaatttgtagtaatgactgtgttgacttcaattttggagcgcagtagctatgttaaagatgaactatttggtctcattgaagccaacacagaacttgctgctgtgttttttcttcagtgataaataaaatacttacagaa

SEQ ID NO: 332731 - DNA, 1997 bp, Homo sapiens
agaaaatggaggcccaaacttcgtggctgtccaaaggctgtgtgacccgttgggcattggaaccagtccagccatctttgtcagtccgttgcttttacccctgtggtttagggcagtcagttttcttgcccttaaattatcaaaagccctttgattttattagtagtagaagttctagcttgttcccgctgccaaagtgtccttgtactgacaaatgtagaccagcagtgttcgatgcaattttcttcaaggaagaaaatgtgtctgctggccagtatggtagtcagcagtcacatttggcagccaagcacttagaatatatggttgatggtcctaaggaaatatctccgttttactttaaatgtaagtaaccacatatgggtagtggctaacgagtgggacggcacagatctgggtgttctcatttgttctccacgccccaggcatcaggtaaggtcaggttatgagtttaaactgtctgttatatttgtaaactctaagccccagcttggactggatgtacttataattatccatttggtctaacagtaagaacctgacctgtcattgtaaatggctacagggatgaaggtggctggagaagaggaccagctgaggaatcttcaagctggagagactcaagtcgccgggacgatagggatagggatgaccgtcgccgtgagagggatgaccggcgtgatctaagagaaagacgagatctaagagacgacagggaccgaagaggacctccactcagatcagaacgtgaagaagtaagttcttggagacgtgctgatgacaggaaagatgaccgggtggaagagcgggaccctcctcgtcgagttcctcccccagctctttcaagagaccgagaaagagaccgagaccgagaaagagaaggtgaaaaagagaaggcctcatggagagctgagaaagatagggaatctctccgtcgtactaaaaatgagactgatgaagatggatggaccacagtacgacgttaagtctcaagataatggatttaaactggtgtcttaaataggtttgatcacattcaaggattattatacttgtgcttcaaccaatctaaattggattctttaatgttgtttcaccataacacaaaaagcatgaacttgtattaatcctatataatagattgatcatgcaccatatccacaggaggttggaaaaaccatgccattttctggaatttaagggtgttgcattatttcatcaatcatttgttgacaaaaaagaaaaactaaaaaataaatttaaaatgtgaaccttcaggtattgagtaacacctttatcttggtatagaactgatacttttttttgattttgaaatatctgataataatttggaatgaagtaaggttctgttaaaatatatttgaagaccctttaaagcagtgaatctgaaacaattttcacacccttaagtggttgatacgtacctattttaggtattttgaggtatttaccataaactaaatttagaaattttttagattcacttgaagtaaacattacaaacattggatacggtggggttttctttagattttacttgagagaaggtgagtacaaagcaatttgcagttgttgtaatgacaagattactgcgcaagtgtgaatccaaacagtatagcttttaaattttaaagcatttggtaaattatcgctgagtttttttctgttgccaatagcaaactgcttttccattaatggagaattcatgcctttcaagcattttaaatatgacaatatttataaatgtatggtttggaggaatcgtttaaattctctttcctaattttctttcttttgaagatagattctttcaacaagtaatttgtagtaatgactgtgttgacttcaattttggagcgcagtagctatgttaaagatgaactatttggtctcattgaagccaacacagaacttgctgctgtgttttttcttcagtgataaataaaatacttacagaa

SEQ ID NO: 332732 - DNA, 3995 bp, Homo sapiens
gacccgccccctacatccggggcctgggcggcagcagggccgccgcggggaggtcacgtggctccttcctttccgtctctggccggctgggcgcgggcgactgctggcgaggcgcgtgggaccttacgctggttccccttcgtctcctctcccggcccgggccactagagagttcgctgacgccgggtgagctgagcctgccgccaagatgccggcctattttcagaggccggaaaatgccctcaaacgcgccaacgaatttcttgaggttggcaaaaagcagcctgctctggatgttctttatgatgttatgaaaagtaaaaaacatagaacatggcaaaagatacacgaaccaattatgttgaaatacttggaactttgcgtggatcttcgcaagagccacttggcaaaggaggggttataccagtataagaacatttgtcaacaggtgaacataaaatctctggaggatgttgttagggcatatttgaaaatggcagaggaaaaaactgaagctgctaaagaagaatctcagcagatggtcttagatatagaggatctagataatattcaaactcctgagagtgttctcctaagtgctgtaagtggtgaagacactcaggatcgtactgacagattacttttaactccatgggttaaattcctgtgggagtcttacaggcagtgtttggaccttcttagaaacaattctagagtagagcgcctgtaccatgatattgcccagcaagctttcaaattctgcctccaatacacgcgtaaggctgaattccgtaaactgtgtgacaatttgagaatgcacttatcgcagattcagcgccaccataaccaaagtacggcaatcaatcttaataatccagagagccagtccatgcatttggaaaccagacttgttcagctggacagtgctatcagcatggaattgtggcaggaagcattcaaagctgtggaagatattcacgggctattctccttgtctaaaaaaccacctaaacctcagttgatggcaaattactataacaaagtctcaactgtgttttggaaatctggaaatgctctttttcatgcatctacactccatcgtctttaccatctctctagagaaatgagaaagaatctcacacaagacgagatgcaaagaatgtctactagagtccttttagccactctttccatccctattactcctgagcgtacggatattgctcgacttctggatatggatggcattatagttgaaaaacagcgtcgccttgcaacactactaggtcttcaagccccaccgacacgaattggccttattaatgatatggtcagatttaatgtactacaatatgttgtcccagaagtgaaagacctttacaattggcttgaagtagaatttaacccattaaaactctgtgagcgagtcacaaaggttctaaattgggttagggaacaacctgaaaaggaaccggaattgcagcagtatgtgccacaactgcaaaacaacaccatcctccgccttctgcagcaggtgtcacagatttatcagagcattgagttttctcgtttgacttctttggttccttttgttgatgctttccaactggaacgggccatagtagatgcagccaggcattgcgacttgcaggttcgtattgatcacacttctcggaccctgagttttggatctgatttgaattatgctactcgagaagatgctccgattggtcctcatttgcaaagcatgccttcagagcagataagaaaccagctgacagccatgtcctcagtacttgcaaaagcacttgaagtcattaaaccagctcatatactgcaagagaaagaagaacagcatcagttggctgtcactgcataccttaaaaattcacgaaaagagcaccagcggatcctggctcgccgccagacaattgaggagagaaaagagcgccttgagagtctgaatattcagcgtgagaaagaagaattggaacagagggaagctgaactccagaaagtgcggaaggctgaggaagagaggctgcgccaggaagcaaaggagagagagaaggagcgtatcttacaggaacatgaacaaatcaaaaagaaaactgtccgagagcgtttggagcagatcaagaaaacagaactgggtgccaaagcattcaaagatattgatattgaagaccttgaggaattggatccagattttatcatggctaaacaggttgaacaactggagaaagaaaagaaagaacttcaagaacgcctaaagaatcaagaaaagaagattgactattttgaaagagccaaacgtttggaagaaattcctttgataaagagcgcttacgaggaacagagaattaaagacatggatctgtgggagcaacaagaggaagaaagaattactacaatgcagctagaacgtgaaaaggctcttgaacataagaatcgaatgtcacgaatgcttgaagacagagatttattcgtaatgcgactcaaagctgcacggcagtctgtttatgaggaaaaacttaaacagtttgaagagcgattagcagaagaaaggcataatcgattggaagaacggaaaaggcagcgtaaagaagaacgcaggataacatactatagagaaaaagaagaggaggagcagagaagggcagaagaacaaatgctaaaagagcgggaagagagagagcgcgccgaacgagcaaaacgcgaggaagagctacgagagtatcaggagcgggtgaagaaattagaagaagtggaaaggaaaaaacgccaaagggagttggaaattgaagaacgagaacggcgtagagaggaagagagaagacttggcgatagttccctttctagaaaggactctcgttggggagatagagattcagaaggcacctggagaaaaggacctgaagcagattctgagtggagaagaggcccgccagagaaggagtggagacgtggagaagggcgagatgaggacaggtctcatagaagagatgaagagcggccccggcgtctgggggatgatgaagatagagagccctctcttagaccagacgatgatcgggttccccggcgtggcatggatgatgacagaggccctagacgtggtcctgaggaagataggttctctcgtcgtggggcagacgatgaccggccttcctggcgtaacacagatgatgacaggcctcccagacgaattgccgatgaagacaggggaaactggcgtcatgcggatgatgacagaccacctagacgaggactggatgaggacagaggaagctggcgaacagctgatgaggacagaggaccaagacgtgggatggatgatgaccgggggccgaggcgaggaggcgctgatgatgagcgatcatcctggcgtaatgctgatgatgaccggggtcccaggcgagggttggatgatgatcggggtcccaggcgaggcatggatgatgaccggggtcccaggcgaggcatggatgatgaccggggtcccaggcgaggcatggatgatgaccggggtcccaggcgagggttggatgatgatcgaggaccttggaggaacgccgatgatgacagaattcccaggcgtggtgcagaggatgacaggggcccttggagaaacatggatgatgatcgcctttcaagacgtgctgatgatgatcggtttcccagacggggtgatgactcaagacctggtccttggagaccattagtcaagccaggtggatggagagagaaagaaaaagccagagaggagagctggggtccacctcgagaatcaaggccatcagaagaacgtgaatgggacagagaaaaagaaagggacagagataatcacacgggagagatgaaagggctgagaagaaggacggaccaatggccagagccctcgacacaggaaagtgtgaaacgccggcgaccgcggaggacgcgcgacaggggacgccgaggaacggccagggggcccgagcgggccgagggcc

SEQ ID NO: 332733 - DNA, 3763 bp, Homo sapiens
gacccgccccctacatccggggcctgggcggcagcagggccgccgcggggaggtcacgtggctccttcctttccgtctctggccggctgggcgcgggcgactgctggcgaggcgcgtgggaccttacgctggttccccttcgtctcctctcccggcccgggccactagagagttcgctgacgccgggtgagctgagcctgccgccaagatgccggcctattttcagaggccggaaaatgccctcaaacgcgccaacgaatttcttgaggttggcaaaaagcagcctgctctggatgttctttatgatgttatgaaaagtaaaaaacatagaacatggcaaaagatacacgaaccaattatgttgaaatacttggaactttgcgtggatcttcgcaagagccacttggcaaaggaggggttataccagtataagaacatttgtcaacaggtgaacataaaatctctggaggatgttgttagggcatatttgaaaatggcagaggaaaaaactgaagctgctaaagaagaatctcagcagatggtcttagatatagaggatctagataatattcaaactcctgagagtgttctcctaagtgctgtaagtggtgaagacactcaggatcgtactgacagattacttttaactccatgggttaaattcctgtgggagtcttacaggcagtgtttggaccttcttagaaacaattctagagtagagcgcctgtaccatgatattgcccagcaagctttcaaattctgcctccaatacacgcgtaaggctgaattccgtaaactgtgtgacaatttgagaatgcacttatcgcagattcagcgccaccataaccaaagtacggcaatcaatcttaataatccagagagccagtccatgcatttggaaaccagacttgttcagctggacagtgctatcagcatggaattgtggcaggaagcattcaaagctgtggaagatattcacgggctattctccttgtctaaaaaaccacctaaacctcagttgatggcaaattactataacaaagtctcaactgtgttttggaaatctggaaatgctctttttcatgcatctacactccatcgtctttaccatctctctagagaaatgagaaagaatctcacacaagacgagatgcaaagaatgtctactagagtccttttagccactctttccatccctattactcctgagcgtacggatattgctcgacttctggatatggatggcattatagttgaaaaacagcgtcgccttgcaacactactaggtcttcaagccccaccgacacgaattggccttattaatgatatggtcagatttaatgtactacaatatgttgtcccagaagtgaaagacctttacaattggcttgaagtagaatttaacccattaaaactctgtgagcgagtcacaaaggttctaaattgggttagggaacaacctgaaaaggaaccggaattgcagcagtatgtgccacaactgcaaaacaacaccatcctccgccttctgcagcaggtgtcacagatttatcagagcattgagttttctcgtttgacttctttggttccttttgttgatgctttccaactggaacgggccatagtagatgcagccaggcattgcgacttgcaggttcgtattgatcacacttctcggaccctgagttttggatctgatttgaattatgctactcgagaagatgctccgattggtcctcatttgcaaagcatgccttcagagcagataagaaaccagctgacagccatgtcctcagtacttgcaaaagcacttgaagtcattaaaccagctcatatactgcaagagaaagaagaacagcatcagttggctgtcactgcataccttaaaaattcacgaaaagagcaccagcggatcctggctcgccgccagacaattgaggagagaaaagagcgccttgagagtctgaatattcagcgtgagaaagaagaattggaacagagggaagctgaactccagaaagtgcggaaggctgaggaagagaggctgcgccaggaagcaaaggagagagagaaggagcgtatcttacaggaacatgaacaaatcaaaaagaaaactgtccgagagcgtttggagcagatcaagaaaacagaactgggtgccaaagcattcaaagatattgatattgaagaccttgaggaattggatccagattttatcatggctaaacaggttgaacaactggagaaagaaaagaaagaacttcaagaacgcctaaagaatcaagaaaagaagattgactattttgaaagagccaaacgtttggaagaaattcctttgataaagagcgcttacgaggaacagagaattaaagacatggatctgtgggagcaacaagaggaagaaagaattactacaatgcagctagaacgtgaaaaggctcttgaacataagaatcgaatgtcacgaatgcttgaagacagagatttattcgtaatgcgactcaaagctgcacggcagtctgtttatgaggaaaaacttaaacagtttgaagagcgattagcagaagaaaggcataatcgattggaagaacggaaaaggcagcgtaaagaagaacgcaggataacatactatagagaaaaagaagaggaggagcagagaagggcagaagaacaaatgctaaaagagcgggaagagagagagcgcgccgaacgagcaaaacgcgaggaagagctacgagagtatcaggagcgggtgaagaaattagaagaagtggaaaggaaaaaacgccaaagggagttggaaattgaagaacgagaacggcgtagagaggaagagagaagacttggcgatagttccctttctagaaaggactctcgttggggagatagagattcagaaggcacctggagaaaaggacctgaagcagattctgagtggagaagaggcccgccagagaaggagtggagacgtggagaagggcgagatgaggacaggtctcatagaagagatgaagagcggccccggcgtctgggggatgatgaagatagagagccctctcttagaccagacgatgatcgggttccccggcgtggcatggatgatgacagaggccctagacgtggtcctgaggaagataggttctctcgtcgtggggcagacgatgaccggccttcctggcgtaacacagatgatgacaggcctcccagacgaattgccgatgaagacaggggaaactggcgtcatgcggatgatgacagaccacctagacgaggactggatgaggacagaggaagctggcgaacagctgatgaggacagaggaccaagacgtgggatggatgatgaccgggggccgaggcgaggaggcgctgatgatgagcgatcatcctggcgtaatgctgatgatgaccggggtcccaggcgagggttggatgatgatcggggtcccaggcgaggcatggatgatgaccggggtcccaggcgaggcatggatgatgaccggggtcccaggcgaggcatggatgatgaccggggtcccaggcgagggttggatgatgatcgaggaccttggaggaacgccgatgatgacagaattcccaggcgtggtgcagaggcaaataacttcctgtggcccttcaaattgtcttctccacgaggtggaatgaagaaaaagaccacccattttgtagaaggtggagatgctggcaacagggaggaccagatcaacaggcttattagaagaatgatacaagggtgtggtaccatg

SEQ ID NO: 332734 - DNA, 1146 bp, Homo sapiens
  misc_feature (10)..(10): n is a, c, g, or t
  misc_feature (30)..(30): n is a, c, g, or t
  misc_feature (34)..(34): n is a, c, g, or t
cgcccggagntgcacggagagcggtgcccnttcnaccgagaaagagaaggtgaaaaagagaaggcctcatggagagctgagaaagatagggaatctctccgtcgtactaaaaatgagactgatgaagatggatggaccacagtacgacgttaagtctcaagataatggatttaaactggtgtcttaaataggtttgatcacattcaaggattattatacttgtgcttcaaccaatctaaattggattctttaatgttgtttcaccataacacaaaaagcatgaacttgtattaatcctatataatagattgatcatgcaccatatccacaggaggttggaaaaaccatgccattttctggaatttaagggtgttgcattatttcatcaatcatttgttgacaaaaaagaaaaactaaaaaataaatttaaaatgtgaaccttcaggtattgagtaacacctttatcttggtatagaactgatacttttttttgattttgaaatatctgataataatttggaatgaagtaaggttctgttaaaatatatttgaagaccctttaaagcagtgaatctgaaacaattttcacacccttaagtggttgatacgtacctattttaggtattttgaggtatttaccataaactaaatttagaaattttttagattcacttgaagtaaacattacaaacattggatacggtggggttttctttagattttacttgagagaaggtgagtacaaagcaatttgcagttgttgtaatgacaagattactgcgcaagtgtgaatccaaacagtatagcttttaaattttaaagcatttggtaaattatcgctgagtttttttctgttgccaatagcaaactgcttttccattaatggagaattcatgcctttcaagcattttaaatatgacaatatttataaatgtatggtttggaggaatcgtttaaattctctttcctaattttctttcttttgaagatagattctttcaacaagtaatttgtagtaatgactgtgttgacttcaattttggagcgcagtagctatgttaaagatgaactatttggtctcattgaagccaacacagaacttgctgctgtgttttttcttcagtgataaataaaatacttacagaa

SEQ ID NO: 332735 - DNA, 3130 bp, Homo sapiens
gacccgccccctacatccggggcctgggcggcagcagggccgccgcggggaggtcacgtggctccttcctttccgtctctggccggctgggcgcgggcgactgctggcgaggcgcgtgggaccttacgctggttccccttcgtctcctctcccggcccgggccactagagagttcgctgacgccgggtgagctgagcctgccgccaagatgccggcctattttcagaggccggaaaatgccctcaaacgcgccaacgaatttcttgaggttggcaaaaagcagcctgctctggatgttctttatgatgttatgaaaagtaaaaaacatagaacatggcaaaagatacacgaaccaattatgttgaaatacttggaactttgcgtggatcttcgcaagagccacttggcaaaggaggggttataccagtataagaacatttgtcaacaggtgaacataaaatctctggaggatgttgttagggcatatttgaaaatggcagaggaaaaaactgaagctgctaaagaagaatctcagcagatggtcttagatatagaggatctagataatattcaaactcctgagagtgttctcctaagtgctgtaagtggtgaagacactcaggatcgtactgacagattacttttaactccatgggttaaattcctgtgggagtcttacaggcagtgtttggaccttcttagaaacaattctagagtagagcgcctgtaccatgatattgcccagcaagctttcaaattctgcctccaatacacgcgtaaggctgaattccgtaaactgtgtgacaatttgagaatgcacttatcgcagattcagcgccaccataaccaaagtacggcaatcaatcttaataatccagagagccagtccatgcatttggaaaccagacttgttcagctggacagtgctatcagcatggaattgtggcaggaagcattcaaagctgtggaagatattcacgggctattctccttgtctaaaaaaccacctaaacctcagttgatggcaaattactataacaaagtctcaactgtgttttggaaatctggaaatgctctttttcatgcatctacactccatcgtctttaccatctctctagagaaatgagaaagaatctcacacaagacgagatgcaaagaatgtctactagagtccttttagccactctttccatccctattactcctgagcgtacggatattgctcgacttctggatatggatggcattatagttgaaaaacagcgtcgccttgcaacactactaggtcttcaagccccaccgacacgaattggccttattaatgatatggtcagatttaatgtactacaatatgttgtcccagaagtgaaagacctttacaattggcttgaagtagaatttaacccattaaaactctgtgagcgagtcacaaaggttctaaattgggttagggaacaacctgaaaaggaaccggaattgcagcagtatgtgccacaactgcaaaacaacaccatcctccgccttctgcagcaggtgtcacagatttatcagagcattgagttttctcgtttgacttctttggttccttttgttgatgctttccaactggaacgggccatagtagatgcagccaggcattgcgacttgcaggttcgtattgatcacacttctcggaccctgagttttggatctgatttgaattatgctactcgagaagatgctccgattggtcctcatttgcaaagcatgccttcagagcagataagaaaccagctgacagccatgtcctcagtacttgcaaaagcacttgaagtcattaaaccagctcatatactgcaagagaaagaagaacagcatcagttggctgtcactgcataccttaaaaattcacgaaaagagcaccagcggatcctggctcgccgccagacaattgaggagagaaaagagcgccttgagagtctgaatattcagcgtgagaaagaagaattggaacagagggaagctgaactccagaaagtgcggaaggctgaggaagagaggctgcgccaggaagcaaaggagagagagaaggagcgtatcttacaggaacatgaacaaatcaaaaagaaaactgtccgagagcgtttggagcagatcaagaaaacagaactgggtgccaaagcattcaaagatattgatattgaagaccttgaggaattggatccagattttatcatggctaaacaggttgaacaactggagaaagaaaagaaagaacttcaagaacgcctaaagaatcaagaaaagaagattgactattttgaaagagccaaacgtttggaagaaattcctttgataaagagcgcttacgaggaacagagaattaaagacatggatctgtgggagcaacaagaggaagaaagaattactacaatgcagctagaacgtgaaaaggctcttgaacataagaatcgaatgtcacgaatgcttgaagacagagatttattcgtaatgcgactcaaagctgcacggcagtctgtttatgaggaaaaacttaaacagtttgaagagcgattagcagaagaaaggcataatcgattggaagaacggaaaaggcagcgtaaagaagaacgcaggataacatactatagagaaaaagaagaggaggagcagagaagggcagaagaacaaatgctaaaaggtacacaggtcaaacaggattggaggggtgctaatgcaaggttggtgttaagatctagtttttagtgatcttatgtagaaaatacaggaatcaaggtaattggccttttagcactgtaattaactggatctcagaacccagtttgctgtatgtgaagttgttacatcgtctgccagcatttccccacacatttgatgttcttctagaaattaatactttttttaatcaccgtattctgtgtattaacatttattgaggaatacattccagatgatggctgttaaatgatgctatatctggaatcccagattgctcagggatgggggagggattctagtatcttattacaaaactatagttgaggggtgtagtacttattttcttgactatgttctgtcctgtagctgattacaaactattttcaaattcttttacttgtacattatgct

SEQ ID NO: 332736 - DNA, 2682 bp, Homo sapiens
gacccgccccctacatccggggcctgggcggcagcagggccgccgcggggaggtcacgtggctccttcctttccgtctctggccggctgggcgcgggcgactgctggcgaggcgcgtgggaccttacgctggttccccttcgtctcctctcccggcccgggccactagagagttcgctgacgccgggtgagctgagcctgccgccaagatgccggcctattttcagaggccggaaaatgccctcaaacgcgccaacgaatttcttgaggttggcaaaaagcagcctgctctggatgttctttatgatgttatgaaaagtaaaaaacatagaacatggcaaaagatacacgaaccaattatgttgaaatacttggaactttgcgtggatcttcgcaagagccacttggcaaaggaggggttataccagtataagaacatttgtcaacaggtgaacataaaatctctggaggatgttgttagggcatatttgaaaatggcagaggaaaaaactgaagctgctaaagaagaatctcagcagatggtcttagatatagaggatctagataatattcaaactcctgagagtgttctcctaagtgctgtaagtggtgaagacactcaggatcgtactgacagattacttttaactccatgggttaaattcctgtgggagtcttacaggcagtgtttggaccttcttagaaacaattctagagtagagcgcctgtaccatgatattgcccagcaagctttcaaattctgcctccaatacacgcgtaaggctgaattccgtaaactgtgtgacaatttgagaatgcacttatcgcagattcagcgccaccataaccaaagtacggcaatcaatcttaataatccagagagccagtccatgcatttggaaaccagacttgttcagctggacagtgctatcagcatggaattgtggcaggaagcattcaaagctgtggaagatattcacgggctattctccttgtctaaaaaaccacctaaacctcagttgatggcaaattactataacaaagtctcaactgtgttttggaaatctggaaatgctctttttcatgcatctacactccatcgtctttaccatctctctagagaaatgagaaagaatctcacacaagacgagatgcaaagaatgtctactagagtccttttagccactctttccatccctattactcctgagcgtacggatattgctcgacttctggatatggatggcattatagttgaaaaacagcgtcgccttgcaacactactaggtcttcaagccccaccgacacgaattggccttattaatgatatggtcagatttaatgtactacaatatgttgtcccagaagtgaaagacctttacaattggcttgaagtagaatttaacccattaaaactctgtgagcgagtcacaaaggttctaaattgggttagggaacaacctgaaaaggaaccggaattgcagcagtatgtgccacaactgcaaaacaacaccatcctccgccttctgcagcaggtgtcacagatttatcagagcattgagttttctcgtttgacttctttggttccttttgttgatgctttccaactggaacgggccatagtagatgcagccaggcattgcgacttgcaggttcgtattgatcacacttctcggaccctgagttttggatctgatttgaattatgctactcgagaagatgctccgattggtcctcatttgcaaagcatgccttcagagcagataagaaaccagctgacagccatgtcctcagtacttgcaaaagcacttgaagtcattaaaccagctcatatactgcaagagaaagaagaacagcatcagttggctgtcactgcataccttaaaaattcacgaaaagagcaccagcggatcctggctcgccgccagacaattgaggagagaaaagagcgccttgagagtctgaatattcagcgtgagaaagaagaattggaacagagggaagctgaactccagaaagtgcggaaggctgaggaagagaggctgcgccaggaagcaaaggagagagagaaggagcgtatcttacaggaacatgaacaaatcaaaaagaaaactgtccgagagcgtttggagcagatcaagaaaacagaactgggtgccaaagcattcaaagatattgatattgaagaccttgaggaattggatccagattttatcatggctaaacaggttgaacaactggagaaagaaaagaaagaacttcaagaacgcctaaagaatcaagaaaagaagattgactattttgaaagagccaaacgtttggaagaaattcctttgataaagagcgcttacgaggaacagagaattaaagacatggatctgtgggagcaacaagaggaagaaagaattactacaatgcagctagaacgtgaaaaggctcttgaacataagaatcgaatgtcacgaatgcttgaagacagagatttattcgtaatgcgactcaaagctgcacggcagtctgtttatgaggaaaaacttaaacagtttgaagagcgattagcagaagaaaggcataatcgattggaagaacggaaaaggcgctgtaggttaaggcgctgtaggttaaggcgctgtgggttaaggcgctgtaggttaaggcgctgtaggttaaggcgctgtaggtt

SEQ ID NO: 332737 - DNA, 2607 bp, Homo sapiens
gacccgccccctacatccggggcctgggcggcagcagggccgccgcggggaggtcacgtggctccttcctttccgtctctggccggctgggcgcgggcgactgctggcgaggcgcgtgggaccttacgctggttccccttcgtctcctctcccggcccgggccactagagagttcgctgacgccgggtgagctgagcctgccgccaagatgccggcctattttcagaggccggaaaatgccctcaaacgcgccaacgaatttcttgaggttggcaaaaagcagcctgctctggatgttctttatgatgttatgaaaagtaaaaaacatagaacatggcaaaagatacacgaaccaattatgttgaaatacttggaactttgcgtggatcttcgcaagagccacttggcaaaggaggggttataccagtataagaacatttgtcaacaggtgaacataaaatctctggaggatgttgttagggcatatttgaaaatggcagaggaaaaaactgaagctgctaaagaagaatctcagcagatggtcttagatatagaggatctagataatattcaaactcctgagagtgttctcctaagtgctgtaagtggtgaagacactcaggatcgtactgacagattacttttaactccatgggttaaattcctgtgggagtcttacaggcagtgtttggaccttcttagaaacaattctagagtagagcgcctgtaccatgatattgcccagcaagctttcaaattctgcctccaatacacgcgtaaggctgaattccgtaaactgtgtgacaatttgagaatgcacttatcgcagattcagcgccaccataaccaaagtacggcaatcaatcttaataatccagagagccagtccatgcatttggaaaccagacttgttcagctggacagtgctatcagcatggaattgtggcaggaagcattcaaagctgtggaagatattcacgggctattctccttgtctaaaaaaccacctaaacctcagttgatggcaaattactataacaaagtctcaactgtgttttggaaatctggaaatgctctttttcatgcatctacactccatcgtctttaccatctctctagagaaatgagaaagaatctcacacaagacgagatgcaaagaatgtctactagagtccttttagccactctttccatccctattactcctgagcgtacggatattgctcgacttctggatatggatggcattatagttgaaaaacagcgtcgccttgcaacactactaggtcttcaagccccaccgacacgaattggccttattaatgatatggtcagatttaatgtactacaatatgttgtcccagaagtgaaagacctttacaattggcttgaagtagaatttaacccattaaaactctgtgagcgagtcacaaaggttctaaattgggttagggaacaacctgaaaaggaaccggaattgcagcagtatgtgccacaactgcaaaacaacaccatcctccgccttctgcagcaggtgtcacagatttatcagagcattgagttttctcgtttgacttctttggttccttttgttgatgctttccaactggaacgggccatagtagatgcagccaggcattgcgacttgcaggttcgtattgatcacacttctcggaccctgagttttggatctgatttgaattatgctactcgagaagatgctccgattggtcctcatttgcaaagcatgccttcagagcagataagaaaccagctgacagccatgtcctcagtacttgcaaaagcacttgaagtcattaaaccagctcatatactgcaagagaaagaagaacagcatcagttggctgtcactgcataccttaaaaattcacgaaaagagcaccagcggatcctggctcgccgccagacaattgaggagagaaaagagcgccttgagagtctgaatattcagcgtgagaaagaagaattggaacagagggaagctgaactccagaaagtgcggaaggctgaggaagagaggctgcgccaggaagcaaaggagagagagaaggagcgtatcttacaggaacatgaacaaatcaaaaagaaaactgtccgagagcgtttggagcagatcaagaaaacagaactgggtgccaaagcattcaaagatattgatattgaagaccttgaggaattggatccagattttatcatggctaaacaggttgaacaactggagaaagaaaagaaagaacttcaagaacgcctaaagaatcaagaaaagaagattgactattttgaaagagccaaacgtttggaagaaattcctttgataaagagcgcttacgaggaacagagaggctgcgccaggaagcaaaggagagagagaaggagcgtatcttacaggaacatgaacaaatcaaaaagaaaactgtccgagagcgtttggagcagatcaagaaaacagaagtgggtgccaaagcattcaaagatattgatattgaagaccttgaggaattggatgcagattttatcatggctaaacaggttgaacaactggagaaagaaaagcaagaacttcaagaacgcctaaagaatcaaaaa

SEQ ID NO: 332738 - DNA, 769 bp, Homo sapiens
gacccgccccctacatccggggcctgggcggcagcagggccgccgcggggaggtcacgtggctccttcctttccgtctctggccggctgggcgcgggcgactgctggcgaggcgcgtgggaccttacgctggttccccttcgtctcctctcccggcccgggccactagagagttcgctgacgccgggtgagctgagcctgccgccaagatgccggcctattttcagaggccggaaaatgccctcaaacgcgccaacgaatttcttgaggttggcaaaaagcagcctgctctggatgttctttatgatgttatgaaaagtaaaaaacatagaacatggcaaaagatacacgaaccaattatgttgaaatacttggaactttgcgtggatcttcgcaagagccacttggcaaaggaggggttataccagtataagaacatttgtcaacaggtgaacataaaatctctggaggatgttgttagggcatatttgaaaatggcagaggaaaaaactgaagctgctaaagaagaatctcagcagatggtcttagatatagaggatctagataatattcaaactcctgagagtgttctcctaagtgctgtaagtggtgaagacactcaggatcgtactgacagattactatatacagaaaaccccaaggactgcacacaaaactactcaaactcgatcaactgatcaactgaaagtagaaggatacaagtataacattcagaaattggttgctttctgttaccgcgttgcgcactg

SEQ ID NO: 332739 - DNA, 727 bp, Homo sapiens
gacctgctttcttttatgtgagtagtgttatttcttatgtgctatacaaataattgaaggctaattagcagtataactataaatagtaatgctgccagtctccttcagacaaaaattctataagaagtgtttaaatatattcggtaagtagcaggtttttaggcttttttgttttacaacaactaggatttgaaaagattataggtttgaggaatagtatgataatggttctcaaagcatggagtttagagtcgatggtctgggattagcattctggctttaacaatgtactgctaacataaattctctggcataatttctacttcccatgactgtcatgagattgcacataaaaagtgctgaataaacagtggctagtgttattaaccctttgttttctatgcaggtgtcacagatttatcagagcattgagttttctcgtttgacttctttggttccttttgttgatgctttccaactggaacgggccatagtagatgcagccaggcattgcgacttgcaggtaggtatgtgctgtaaggagacaggagaaggcccttgagggctagaaagacacataccttctgtttctcagcttttggtacagtgataccattttaaagtttactgagtgaacttttccagcttttgtatatgacattcttctgttactttttgacttcatgcttacttgtggatttaaccattgataatttaattttcaaag

SEQ ID NO: 332740 - DNA, 6721 bp, Homo sapiens
gacccgccccctacatccggggcctgggcggcagcagggccgccgcggggaggtcacgtggctccttcctttccgtctctggccggctgggcgcgggcgactgctggcgaggcgcgtgggaccttacgctggttccccttcgtctcctctcccggcccgggccactagagagttcgctgacgccgggtgagctgagcctgccgccaagatgccggcctattttcagaggccggaaaatgccctcaaacgcgccaacgaatttcttgaggttggcaaaaagcagcctgctctggatgttctttatgatgttatgaaaagtaaaaaacatagaacatggcaaaagatacacgaaccaattatgttgaaatacttggaactttgcgtggatcttcgcaagagccacttggcaaaggaggggttataccagtataagaacatttgtcaacaggtgaacataaaatctctggaggatgttgttagggcatatttgaaaatggcagaggaaaaaactgaagctgctaaagaagaatctcagcagatggtcttagatatagaggatctagataatattcaaactcctgagagtgttctcctaagtgctgtaagtggtgaagacactcaggatcgtactgacagattacttttaactccatgggttaaattcctgtgggagtcttacaggcagtgtttggaccttcttagaaacaattctagagtagagcgcctgtaccatgatattgcccagcaagctttcaaattctgcctccaatacacgcgtaaggctgaattccgtaaactgtgtgacaatttgagaatgcacttatcgcagattcagcgccaccataaccaaagtacggcaatcaatcttaataatccagagagccagtccatgcatttggaaaccagacttgttcagctggacagtgctatcagcatggaattgtggcaggaagcattcaaagctgtggaagatattcacgggctattctccttgtctaaaaaaccacctaaacctcagttgatggcaaattactataacaaagtctcaactgtgttttggaaatctggaaatgctctttttcatgcatctacactccatcgtctttaccatctctctagagaaatgagaaagaatctcacacaagacgagatgcaaagaatgtctactagagtccttttagccactctttccatccctattactcctgagcgtacggatattgctcgacttctggatatggatggcattatagttgaaaaacagcgtcgccttgcaacactactaggtcttcaagccccaccgacacgaattggccttattaatgatatggtcagatttaatgtactacaatatgttgtcccagaagtgaaagacctttacaattggcttgaagtagaatttaacccattaaaactctgtgagcgagtcacaaaggttctaaattgggttagggaacaacctgaaaaggaaccggaattgcagcagtatgtgccacaactgcaaaacaacaccatcctccgccttctgcagcaggtgtcacagatttatcagagcattgagttttctcgtttgacttctttggttccttttgttgatgctttccaactggaacgggccatagtagatgcagccaggcattgcgacttgcaggttcgtattgatcacacttctcggaccctgagttttggatctgatttgaattatgctactcgagaagatgctccgattggtcctcatttgcaaagcatgccttcagagcagataagaaaccagctgacagccatgtcctcagtacttgcaaaagcacttgaagtcattaaaccagctcatatactgcaagagaaagaagaacagcatcagttggctgtcactgcataccttaaaaattcacgaaaagagcaccagcggatcctggctcgccgccagacaattgaggagagaaaagagcgccttgagagtctgaatattcagcgtgagaaagaagaattggaacagagggaagctgaactccagaaagtgcggaaggctgaggaagagaggctgcgccaggaagcaaaggagagagagaaggagcgtatcttacaggaacatgaacaaatcaaaaagaaaactgtccgagagcgtttggagcagatcaagaaaacagaactgggtgccaaagcattcaaagatattgatattgaagaccttgaggaattggatccagattttatcatggctaaacaggttgaacaactggagaaagaaaagaaagaacttcaagaacgcctaaagaatcaagaaaagaagattgactattttgaaagagccaaacgtttggaagaaattcctttgataaagagcgcttacgaggaacagagaattaaagacatggatctgtgggagcaacaagaggaagaaagaattactacaatgcagctagaacgtgaaaaggctcttgaacataagaatcgaatgtcacgaatgcttgaagacagagatttattcgtaatgcgactcaaagctgcacggcagtctgtttatgaggaaaaacttaaacagtttgaagagcgattagcagaagaaaggcataatcgattggaagaacggaaaaggcagcgtaaagaagaacgcaggataacatactatagagaaaaagaagaggaggagcagagaagggcagaagaacaaatgctaaaagagcgggaagagagagagcgcgccgaacgagcaaaacgcgaggaagagctacgagagtatcaggagcgggtgaagaaattagaagaagtggaaaggaaaaaacgccaaagggagttggaaattgaagaacgagaacggcgtagagaggaagagagaagacttggcgatagttccctttctagaaaggactctcgttggggagatagagattcagaaggcacctggagaaaaggacctgaagcagattctgagtggagaagaggcccgccagagaaggagtggagacgtggagaagggcgagatgaggacaggtctcatagaagagatgaagagcggccccggcgtctgggggatgatgaagatagagagccctctcttagaccagacgatgatcgggttccccggcgtggcatggatgatgacagaggccctagacgtggtcctgaggaagataggttctctcgtcgtggggcagacgatgaccggccttcctggcgtaacacagatgatgacaggcctcccagacgaattgccgatgaagacaggggaaactggcgtcatgcggatgatgacagaccacctagacgaggactggatgaggacagaggaagctggcgaacagctgatgaggacagaggaccaagacgtgggatggatgatgaccgggggccgaggcgaggaggcgctgatgatgagcgatcatcctggcgtaatgctgatgatgaccggggtcccaggcgagggttggatgatgatcggggtcccaggcgaggcatggatgatgaccggggtcccaggcgaggcatggatgatgaccggggtcccaggcgaggcatggatgatgaccggggtcccaggcgagggttggatgatgatcgaggaccttggaggaacgccgatgatgacagaattcccaggcgtggtgcagaggatgacaggggcccttggagaaacatggatgatgatcgcctttcaagacgtgctgatgatgatcggtttcccagacggggtgatgactcaagacctggtccttggagaccattagtcaagccaggtggatggagagagaaagaaaaagccagagaggagagctggggtccacctcgagaatcaaggccatcagaagaacgtgaatgggacagagaaaaagaaagggacagagataatcaagatcgggaggagaatgacaaggaccctgagagagaaagggacagagagagagatgtggatcgagaggatcgcttcagaagacctagggatgaaggtggctggagaagaggaccagctgaggaatcttcaagctggagagactcaagtcgccgggacgatagggatagggatgaccgtcgccgtgagagggatgaccggcgtgatctaagagaaagacgagatctaagagacgacagggaccgaagaggacctccactcagatcagaacgtgaagaagtaagttcttggagacgtgctgatgacaggaaagatgaccgggtggaagagcgggaccctcctcgtcgagttcctcccccagctctttcaagagaccgagaaagagaccgagaccgagaaagagaaggtgaaaaagagaaggcctcatggagagctgagaaagatagggaatctctccgtcgtactaaaaatgagactgatgaagatggatggaccacagtacgacgttaagtctcaagataatggatttaaactggtgtcttaaataggtttgatcacattcaaggattattatacttgtgcttcaaccaatctaaattggattctttaatgttgtttcaccataacacaaaaagcatgaacttgtattaatcctatataatagattgatcatgcaccatatccacaggaggttggaaaaaccatgccattttctggaatttaagggtgttgcattatttcatcaatcatttgttgacaaaaaagaaaaactaaaaaataaatttaaaatgtgaaccttcaggtattgagtaacacctttatcttggtatagaactgatacttttttttgattttgaaatatctgataataatttggaatgaagtaaggttctgttaaaatatatttgaagaccctttaaagcagtgaatctgaaacaattttcacacccttaagtggttgatacgtacctattttaggtattttgaggtatttaccataaactaaatttagaaattttttagattcacttgaagtaaacattacaaacattggatacggtggggttttctttagattttacttgagagaaggtgagtacaaagcaatttgcagttgttgtaatgacaagattactgcgcaagtgtgaatccaaacagtatagcttttaaattttaaagcatttggtaaattatcgctgagtttttttctgttgccaatagcaaactgcttttccattaatggagaattcatgcctttcaagcattttaaatatgacaatatttataaatgtatggtttggaggaatcgtttaaattctctttcctaattttctttcttttgaagatagattctttcaacaagtaatttgtagtaatgactgtgttgacttcaattttggagcgcagtagctatgttaaagatgaactatttggtctcattgaagccaacacagaacttgctgctgtgttttttcttcagtgataaataaaatacttacagaatttgttttagtgttgatttgtggttatagtattttgtttataatggtaagtttgcatattcagttgagttttttttacttgaatttttatcagtgccattaaatgtctgtgtttagtatcaatgaaaatgaacctaaatataacaaagaaagcatatgtggctaggatgtccccctaacatgtcttcctttgttaatgcaggaattccttagtttccttgtaacgctgtcctctgagtttgtgtgtgcatgtgcgtgtttgaagtaccaccttgggttttcacctgaaattagaaaaatcgtagttaatttgagaaaatgttacaaattcatcatggctgtaggcacttatttctgttattgagtagtggtgagaattcctattggtacagctgtagggccagaagagggagtattgatgctttttaacttaaccagatgcagctatttttgtttgatgttaccaatgatagaaatcattttaaacaccttagtatctggtatttcaaatacgtagaagtctttaaaggtctttcgtggggagaaggacttttctttcataacaagagaatttcagatcagtgattacaagtggggcagtaacttgctaagagtttgcttcctggagagtagatctgtatgtgtgacatcacaggtaagccccaagaatttatttaatcagatttgttcagacgagttactgctgcctacgttagagttagatttcaaggcgagtcagcaaacccatcctttctgctcagtctcccgtactgttctcccaagttctttgttctgggagtcagaacccaagtgcaagaggagggcagaagagtctgatgctgttactttgcgatcctgctcttggtttccactgtccaggccatacaactctgtctactcccattagtatttaccaacaggtgttaaaggaaagctgaacaagcagcctactcaccgatctgctaggtggtcttccatgttcatggtggcttctgcagtttcattgagagtaacattgctgttaatacagatagatccagtagtagagacatcatcggtccaaaagactttgcatctcattagttgtccatagtgactaccaggaggtggctggcatctataacgtgtgggacgtttttatgtaaagaactgcctgtgttttttttttttttaaccaaagacactgaccatagattgacttatacttttataagtctaattgaaatacttggggtactatgaaaggactgttccttgagtggctacgattagaaaatcaggactaacaaacttttctttgtctggaagcatatatatttgtgatataattttaatatgtataattttggtttaataaatcaaatctatgaca

SEQ ID NO: 332741 - DNA, 4545 bp, Homo sapiens
caatggatggtctcgatctcttgactcgtgatgtgcccccttggctcccaaagtgctgggattacaggcgtgagccaccgcgcccggtcaatcacaatctttttctgaagctagaaaacactgacagtactgagtggatagatgaagtcctgattctccaagtattcgtttaaacacagcccatttctcttactcccatgctttgatggaataatatttatgagtatagtgcaccatggtgatgtacacgttctgtcactagcacgccttaccgtaagattaaagagaagtgcttttctgcttaccaagtatcatttacaaacctaacagatttaaaactttgctctccatagaatgtctactagagtccttttagccactctttccatccctattactcctgagcgtacggatattgctcgacttctggatatggatggcattatagttgaaaaacagcgtcgccttgcaacactactaggtcttcaagccccaccgacacgaattggccttattaatgatatggtcagatttaatgtactacaatatgttgtcccagaagtgaaagacctttacaattggcttgaagtagaatttaacccattaaaactctgtgagcgagtcacaaaggttctaaattgggttagggaacaacctgaaaaggaaccggaattgcagcagtatgtgccacaactgcaaaacaacaccatcctccgccttctgcagcaggtgtcacagatttatcagagcattgagttttctcgtttgacttctttggttccttttgttgatgctttccaactggaacgggccatagtagatgcagccaggcattgcgacttgcaggttcgtattgatcacacttctcggaccctgagttttggatctgatttgaattatgctactcgagaagatgctccgattggtcctcatttgcaaagcatgccttcagagcagataagaaaccagctgacagccatgtcctcagtacttgcaaaagcacttgaagtcattaaaccagctcatatactgcaagagaaagaagaacagcatcagttggctgtcactgcataccttaaaaattcacgaaaagagcaccagcggatcctggctcgccgccagacaattgaggagagaaaagagcgccttgagagtctgaatattcagcgtgagaaagaagaattggaacagagggaagctgaactccagaaagtgcggaaggctgaggaagagaggctgcgccaggaagcaaaggagagagagaaggagcgtatcttacaggaacatgaacaaatcaaaaagaaaactgtccgagagcgtttggagcagatcaagaaaacagaactgggtgccaaagcattcaaagatattgatattgaagaccttgaggaattggatccagattttatcatggctaaacaggttgaacaactggagaaagaaaagaaagaacttcaagaacgcctaaagaatcaagaaaagaagattgactattttgaaagagccaaacgtttggaagaaattcctttgataaagagcgcttacgaggaacagagaattaaagacatggatctgtgggagcaacaagaggaagaaagaattactacaatgcagctagaacgtgaaaaggctcttgaacataagaatcgaatgtcacgaatgcttgaagacagagatttattcgtaatgcgactcaaagctgcacggcagtctgtttatgaggaaaaacttaaacagtttgaagagcgattagcagaagaaaggcataatcgattggaagaacggaaaaggcagcgtaaagaagaacgcaggataacatactatagagaaaaagaagaggaggagcagagaagggcagaagaacaaatgctaaaagagcgggaagagagagagcgcgccgaacgagcaaaacgcgaggaagagctacgagagtatcaggagcgggtgaagaaattagaagaagtggaaaggaaaaaacgccaaagggagttggaaattgaagaacgagaacggcgtagagaggaagagagaagacttggcgatagttccctttctagaaaggactctcgttggggagatagagattcagaaggcacctggagaaaaggacctgaagcagattctgagtggagaagaggcccgccagagaaggagtggagacgtggagaagggcgagatgaggacaggtctcatagaagagatgaagagcggccccggcgtctgggggatgatgaagatagagagccctctcttagaccagacgatgatcgggttccccggcgtggcatggatgatgacagaggccctagacgtggtcctgaggaagataggttctctcgtcgtggggcagacgatgaccggccttcctggcgtaacacagatgatgacaggcctcccagacgaattgccgatgaagacaggggaaactggcgtcatgcggatgatgacagaccacctagacgaggactggatgaggacagaggaagctggcgaacagctgatgaggacagaggaccaagacgtgggatggatgatgaccgggggccgaggcgaggaggcgctgatgatgagcgatcatcctggcgtaatgctgatgatgaccggggtcccaggcgagggttggatgatgatcggggtcccaggcgaggcatggatgatgaccggggtcccaggcgaggcatggatgatgaccggggtcccaggcgaggcatggatgatgaccggggtcccaggcgagggttggatgatgatcgaggaccttggaggaacgccgatgatgacagaattcccaggcgtggtgcagaggatgacaggggcccttggagaaacatggatgatgatcgcctttcaagacgtgctgatgatgatcggtttcccagacggggtgatgactcaagacctggtccttggagaccattagtcaagccaggtggatggagagagaaagaaaaagccagagaggagagctggggtccacctcgagaatcaaggccatcagaagaacgtgaatgggacagagaaaaagaaagggacagagataatcaagatcgggaggagaatgacaaggaccctgagagagaaagggacagagagagagatgtggatcgagaggatcgcttcagaagacctagggatgaaggtggctggagaagaggaccagctgaggaatcttcaagctggagagactcaagtcgccgggacgatagggatagggatgaccgtcgccgtgagagggatgaccggcgtgatctaagagaaagacgagatctaagagacgacagggaccgaagaggacctccactcagatcagaacgtgaagaagtaagttcttggagacgtgctgatgacaggaaagatgaccgggtggaagagcgggaccctcctcgtcgagttcctcccccagctctttcaagagaccgagaaagagaccgagaccgagaaagagaaggtgaaaaagagaaggcctcatggagagctgagaaagatagggaatctctccgtcgtactaaaaatgagactgatgaagatggatggaccacagtacgacgttaagtctcaagataatggatttaaactggtgtcttaaataggtttgatcacattcaaggattattatacttgtgcttcaaccaatctaaattggattctttaatgttgtttcaccataacacaaaaagcatgaacttgtattaatcctatataatagattgatcatgcaccatatccacaggaggttggaaaaaccatgccattttctggaatttaagggtgttgcattatttcatcaatcatttgttgacaaaaaagaaaaactaaaaaataaatttaaaatgtgaaccttcaggtattgagtaacacctttatcttggtatagaactgatacttttttttgattttgaaatatctgataataatttggaatgaagtaaggttctgttaaaatatatttgaagaccctttaaagcagtgaatctgaaacaattttcacacccttaagtggttgatacgtacctattttaggtattttgaggtatttaccataaactaaatttagaaattttttagattcacttgaagtaaacattacaaacattggatacggtggggttttctttagattttacttgagagaaggtgagtacaaagcaatttgcagttgttgtaatgacaagattactgcgcaagtgtgaatccaaacagtatagcttttaaattttaaagcatttggtaaattatcgctgagtttttttctgttgccaatagcaaactgcttttccattaatggagaattcatgcctttcaagcattttaaatatgacaatatttataaatgtatggtttggaggaatcgtttaaattctctttcctaattttctttcttttgaagatagattctttcaacaagtaatttgtagtaatgactgtgttgacttcaattttggagcgcagtagctatgttaaagatgaactatttggtctcattgaagccaacacagaacttgctgctgtgttttttcttcagtgataaataaaatacttacagaa

SEQ ID NO: 332742 - DNA, 5233 bp, Homo sapiens
gacccgccccctacatccggggcctgggcggcagcagggccgccgcggggaggtcacgtggctccttcctttccgtctctggccggctgggcgcgggcgactgctggcgaggcgcgtgggaccttacgctggttccccttcgtctcctctcccggcccgggccactagagagttcgctgacgccgggtgagctgagcctgccgccaagatgccggcctattttcagaggccggaaaatgccctcaaacgcgccaacgaatttcttgaggttggcaaaaagcagcctgctctggatgttctttatgatgttatgaaaagtaaaaaacatagaacatggcaaaagatacacgaaccaattatgttgaaatacttggaactttgcgtggatcttcgcaagagccacttggcaaaggaggggttataccagtataagaacatttgtcaacaggtgaacataaaatctctggaggatgttgttagggcatatttgaaaatggcagaggaaaaaactgaagctgctaaagaagaatctcagcagatggtcttagatatagaggatctagataatattcaaactcctgagagtgttctcctaagtgctgtaagtggtgaagacactcaggatcgtactgacagattacttttaactccatgggttaaattcctgtgggagtcttacaggcagtgtttggaccttcttagaaacaattctagagtagagcgcctgtaccatgatattgcccagcaagctttcaaattctgcctccaatacacgcgtaaggctgaattccgtaaactgtgtgacaatttgagaatgcacttatcgcagattcagcgccaccataaccaaagtacggcaatcaatcttaataatccagagagccagtccatgcatttggaaaccagacttgttcagctggacagtgctatcagcatggaattgtggcaggaagcattcaaagctgtggaagatattcacgggctattctccttgtctaaaaaaccacctaaacctcagttgatggcaaattactataacaaagtctcaactgtgttttggaaatctggaaatgctctttttcatgcatctacactccatcgtctttaccatctctctagagaaatgagaaagaatctcacacaagacgagatgcaaagaatgtctactagagtccttttagccactctttccatccctattactcctgagcgtacggatattgctcgacttctggatatggatggcattatagttgaaaaacagcgtcgccttgcaacactactaggtcttcaagccccaccgacacgaattggccttattaatgatatggtcagatttaatgtactacaatatgttgtcccagaagtgaaagacctttacaattggcttgaagtagaatttaacccattaaaactctgtgagcgagtcacaaaggttctaaattgggttagggaacaacctgaaaaggaaccggaattgcagcagtatgtgccacaactgcaaaacaacaccatcctccgccttctgcagcaggtgtcacagatttatcagagcattgagttttctcgtttgacttctttggttccttttgttgatgctttccaactggaacgggccatagtagatgcagccaggcattgcgacttgcaggttcgtattgatcacacttctcggaccctgagttttggatctgatttgaattatgctactcgagaagatgctccgattggtcctcatttgcaaagcatgccttcagagcagataagaaaccagctgacagccatgtcctcagtacttgcaaaagcacttgaagtcattaaaccagctcatatactgcaagagaaagaagaacagcatcagttggctgtcactgcataccttaaaaattcacgaaaagagcaccagcggatcctggctcgccgccagacaattgaggagagaaaagagcgccttgagagtctgaatattcagcgtgagaaagaagaattggaacagagggaagctgaactccagaaagtgcggaaggctgaggaagagaggctgcgccaggaagcaaaggagagagagaaggagcgtatcttacaggaacatgaacaaatcaaaaagaaaactgtccgagagcgtttggagcagatcaagaaaacagaactgggtgccaaagcattcaaagatattgatattgaagaccttgaggaattggatccagattttatcatggctaaacaggttgaacaactggagaaagaaaagaaagaacttcaagaacgcctaaagaatcaagaaaagaagattgactattttgaaagagccaaacgtttggaagaaattcctttgataaagagcgcttacgaggaacagagaattaaagacatggatctgtgggagcaacaagaggaagaaagaattactacaatgcagctagaacgtgaaaaggctcttgaacataagaatcgaatgtcacgaatgcttgaagacagagatttattcgtaatgcgactcaaagctgcacggcagtctgtttatgaggaaaaacttaaacagtttgaagagcgattagcagaagaaaggcataatcgattggaagaacggaaaaggcagcgtaaagaagaacgcaggataacatactatagagaaaaagaagaggaggagcagagaagggcagaagaacaaatgctaaaagagcgggaagagagagagcgcgccgaacgagcaaaacgcgaggaagagctacgagagtatcaggagcgggtgaagaaattagaagaagtggaaaggaaaaaacgccaaagggagttggaaattgaagaacgagaacggcgtagagaggaagagagaagacttggcgatagttccctttctagaaaggactctcgttggggagatagagattcagaaggcacctggagaaaaggacctgaagcagattctgagtggagaagaggcccgccagagaaggagtggagacgtggagaagggcgagatgaggacaggtctcatagaagagatgaagagcggccccggcgtctgggggatgatgaagatagagagccctctcttagaccagacgatgatcgggttccccggcgtggcatggatgatgacagaggccctagacgtggtcctgaggaagataggttctctcgtcgtggggcagacgatgaccggccttcctggcgtaacacagatgatgacaggcctcccagacgaattgccgatgaagacaggggaaactggcgtcatgcggatgatgacagaccacctagacgaggactggatgaggacagaggaagctggcgaacagctgatgaggacagaggaccaagacgtgggatggatgatgaccgggggccgaggcgaggaggcgctgatgatgagcgatcatcctggcgtaatgctgatgatgaccggggtcccaggcggcgagggttggatgatgatcgaggaccttggaggaacgccgatgatgacagaattcccaggcgtggtgcagaggatgacaggggcccttggagaaacatggatgatgatcgcctttcaagacgtgctgatgatgatcggtttcccagacggggtgatgactcaagacctggtccttggagaccattagtcaagccaggtggatggagagagaaagaaaaagccagagaggagagctggggtccacctcgagaatcaaggccatcagaagaacgtgaatgggacagagaaaaagaaagggacagagataatcaagatcgggaggagaatgacaaggaccctgagagagaaagggacagagagagagatgtggatcgagaggatcgcttcagaagacctagggatgaaggtggctggagaagaggaccagctgaggaatcttcaagctggagagactcaagtcgccgggacgatagggatagggatgaccgtcgccgtgagagggatgaccggcgtgatctaagagaaagacgagatctaagagacgacagggaccgaagaggacctccactcagatcagaacgtgaagaagtaagttcttggagacgtgctgatgacaggaaagatgaccgggtggaagagcgggaccctcctcgtcgagttcctcccccagctctttcaagagaccgagaaagagaccgagaccgagaaagagaaggtgaaaaagagaaggcctcatggagagctgagaaagatagggaatctctccgtcgtactaaaaatgagactgatgaagatggatggaccacagtacgacgttaagtctcaagataatggatttaaactggtgtcttaaataggtttgatcacattcaaggattattatacttgtgcttcaaccaatctaaattggattctttaatgttgtttcaccataacacaaaaagcatgaacttgtattaatcctatataatagattgatcatgcaccatatccacaggaggttggaaaaaccatgccattttctggaatttaagggtgttgcattatttcatcaatcatttgttgacaaaaaagaaaaactaaaaaataaatttaaaatgtgaaccttcaggtattgagtaacacctttatcttggtatagaactgatacttttttttgattttgaaatatctgataataatttggaatgaagtaaggttctgttaaaatatatttgaagaccctttaaagcagtgaatctgaaacaattttcacacccttaagtggttgatacgtacctattttaggtattttgaggtatttaccataaactaaatttagaaattttttagattcacttgaagtaaacattacaaacattggatacggtggggttttctttagattttacttgagagaaggtgagtacaaagcaatttgcagttgttgtaatgacaagattactgcgcaagtgtgaatccaaacagtatagcttttaaattttaaagcatttggtaaattatcgctgagtttttttctgttgccaatagcaaactgcttttccattaatggagaattcatgcctttcaagcattttaaatatgacaatatttataaatgtatggtttggaggaatcgtttaaattctctttcctaattttctttcttttgaagatagattctttcaacaagtaatttgtagtaatgactgtgttgacttcaattttggagcgcagtagctatgttaaagatgaactatttggtctcattgaagccaacacagaacttgctgctgtgttttttcttcagtgataaataaaatacttacagaa

SEQ ID NO: 332743 - DNA, 2911 bp, Homo sapiens
gtcggtaccatggatcccatcatcgcctgacagacagagatgtattacgtaatggcgactcaaagctgcgcggtggtctgttgatgaggaaaaacttaaacagtttgaagagcgattagcagaagaaaggcataatcgattggaagaacggaaaaggcagcgtaaagaagaacgcaggataacatactatagagaaaaagaagaggaggagcagagaagggcagaagaacaaatgctaaaagagcgggaagagagagagcgcgccgaacgagcaaaacgcgaggaagagctacgagagtatcaggagcgggtgaagaaattagaagaagtggaaaggaaaaaacgccaaagggagttggaaattgaagaacgagaacggcgtagagaggaagagagaagacttggcgatagttccctttctagaaaggactctcgttggggagatagagattcagaaggcacctggagaaaaggacctgaagcagattctgagtggagaagaggcccgccagagaaggagtggagacgtggagaagggcgagatgaggacaggtctcatagaagagatgaagagcggccccggcgtctgggggatgatgaagatagagagccctctcttagaccagacgatgatcgggttccccggcgtggcatggatgatgacagaggccctagacgtggtcctgaggaagataggttctctcgtcgtggggcagacgatgaccggccttcctggcgtaacacagatgatgacaggcctcccagacgaattgccgatgaagacaggggaaactggcgtcatgcggatgatgacagaccacctagacgaggactggatgaggacagaggaagctggcgaacagctgatgaggacagaggaccaagacgtgggatggatgatgaccgggggccgaggcgaggaggcgctgatgatgagcgatcatcctggcgtaatgctgatgatgaccggggtcccaggcgagggttggatgatgatcggggtcccaggcgaggcatggatgatgaccggggtcccaggcgaggcatggatgatgaccggggtcccaggcgaggcatggatgatgaccggggtcccaggcgagggttggatgatgatcgaggaccttggaggaacgccgatgatgacagaattcccaggcgtggtgcagaggatgacaggggcccttggagaaacatggatgatgatcgcctttcaagacgtgctgatgatgatcggtttcccagacggggtgatgactcaagacctggtccttggagaccattagtcaagccaggtggatggagagagaaagaaaaagccagagaggagagctggggtccacctcgagaatcaaggccatcagaagaacgtgaatgggacagagaaaaagaaagggacagagataatcaagatcgggaggagaatgacaaggaccctgagagagaaagggacagagagagagatgtggatcgagaggatcgcttcagaagacctagggatgaaggtggctggagaagaggaccagctgaggaatcttcaagctggagagactcaagtcgccgggacgatagggatagggatgaccgtcgccgtgagagggatgaccggcgtgatctaagagaaagacgagatctaagagacgacagggaccgaagaggacctccactcagatcagaacgtgaagaagtaagttcttggagacgtgctgatgacaggaaagatgaccgggtggaagagcgggaccctcctcgtcgagttcctcccccagctctttcaagagaccgagaaagagaccgagaccgagaaagagaaggtgaaaaagagaaggcctcatggagagctgagaaagatagggaatctctccgtcgtactaaaaatgagactgatgaagatggatggaccacagtacgacgttaagtctcaagataatggatttaaactggtgtcttaaataggtttgatcacattcaaggattattatacttgtgcttcaaccaatctaaattggattctttaatgttgtttcaccataacacaaaaagcatgaacttgtattaatcctatataatagattgatcatgcaccatatccacaggaggttggaaaaaccatgccattttctggaatttaagggtgttgcattatttcatcaatcatttgttgacaaaaaagaaaaactaaaaaataaatttaaaatgtgaaccttcaggtattgagtaacacctttatcttggtatagaactgatacttttttttgattttgaaatatctgataataatttggaatgaagtaaggttctgttaaaatatatttgaagaccctttaaagcagtgaatctgaaacaattttcacacccttaagtggttgatacgtacctattttaggtattttgaggtatttaccataaactaaatttagaaattttttagattcacttgaagtaaacattacaaacattggatacggtggggttttctttagattttacttgagagaaggtgagtacaaagcaatttgcagttgttgtaatgacaagattactgcgcaagtgtgaatccaaacagtatagcttttaaattttaaagcatttggtaaattatcgctgagtttttttctgttgccaatagcaaactgcttttccattaatggagaattcatgcctttcaagcattttaaatatgacaatatttataaatgtatggtttggaggaatcgtttaaattctctttcctaattttctttcttttgaagatagattctttcaacaagtaatttgtagtaatgactgtgttgacttcaattttggagcgcagtagctatgttaaagatgaactatttggtctcattgaagccaacacagaacttgctgctgtgttttttcttcagtgataaataaaatacttacagaa

SEQ ID NO: 332744 - DNA, 3261 bp, Homo sapiens
ttctttattgagttactatgtgtaacggtcattcaaataatagaaatttttggatgatatttcataagcaaaacaatcatcaaaatgttctaaaggtgaaagttgaatgcataatttaatacaagtttgtttactgttttgttagaaatgaaaaaactagatcaaaatgtcctgggcttagattctaatttgaccattgaattattttgtataaagacaaacccactggaggtaggtaatatcaacaatttaaatgttttaaaatttggcctgctgacaagttaatggtcatttggaagttagagtttttgtgctgagaggttgctttcgatgattctgatacacttgagagtcttttgtaaacctaatagctttctgcgagtttgttgctcttgacaaagtgtgccctttttgggttgggggttacttcgattgcaggaaaaacttaaacagtttgaagagcgattagcagaagaaaggcataatcgattggaagaacggaaaaggcagcgtaaagaagaacgcaggataacatactatagagaaaaagaagaggaggagcagagaagggcagaagaacaaatgctaaaagagcgggaagagagagagcgcgccgaacgagcaaaacgcgaggaagagctacgagagtatcaggagcgggtgaagaaattagaagaagtggaaaggaaaaaacgccaaagggagttggaaattgaagaacgagaacggcgtagagaggaagagagaagacttggcgatagttccctttctagaaaggactctcgttggggagatagagattcagaaggcacctggagaaaaggacctgaagcagattctgagtggagaagaggcccgccagagaaggagtggagacgtggagaagggcgagatgaggacaggtctcatagaagagatgaagagcggccccggcgtctgggggatgatgaagatagagagccctctcttagaccagacgatgatcgggttccccggcgtggcatggatgatgacagaggccctagacgtggtcctgaggaagataggttctctcgtcgtggggcagacgatgaccggccttcctggcgtaacacagatgatgacaggcctcccagacgaattgccgatgaagacaggggaaactggcgtcatgcggatgatgacagaccacctagacgaggactggatgaggacagaggaagctggcgaacagctgatgaggacagaggaccaagacgtgggatggatgatgaccgggggccgaggcgaggaggcgctgatgatgagcgatcatcctggcgtaatgctgatgatgaccggggtcccaggcgagggttggatgatgatcggggtcccaggcgaggcatggatgatgaccggggtcccaggcgaggcatggatgatgaccggggtcccaggcgaggcatggatgatgaccggggtcccaggcgagggttggatgatgatcgaggaccttggaggaacgccgatgatgacagaattcccaggcgtggtgcagaggatgacaggggcccttggagaaacatggatgatgatcgcctttcaagacgtgctgatgatgatcggtttcccagacggggtgatgactcaagacctggtccttggagaccattagtcaagccaggtggatggagagagaaagaaaaagccagagaggagagctggggtccacctcgagaatcaaggccatcagaagaacgtgaatgggacagagaaaaagaaagggacagagataatcaagatcgggaggagaatgacaaggaccctgagagagaaagggacagagagagagatgtggatcgagaggatcgcttcagaagacctagggatgaaggtggctggagaagaggaccagctgaggaatcttcaagctggagagactcaagtcgccgggacgatagggatagggatgaccgtcgccgtgagagggatgaccggcgtgatctaagagaaagacgagatctaagagacgacagggaccgaagaggacctccactcagatcagaacgtgaagaagtaagttcttggagacgtgctgatgacaggaaagatgaccgggtggaagagcgggaccctcctcgtcgagttcctcccccagctctttcaagagaccgagaaagagaccgagaccgagaaagagaaggtgaaaaagagaaggcctcatggagagctgagaaagatagggaatctctccgtcgtactaaaaatgagactgatgaagatggatggaccacagtacgacgttaagtctcaagataatggatttaaactggtgtcttaaataggtttgatcacattcaaggattattatacttgtgcttcaaccaatctaaattggattctttaatgttgtttcaccataacacaaaaagcatgaacttgtattaatcctatataatagattgatcatgcaccatatccacaggaggttggaaaaaccatgccattttctggaatttaagggtgttgcattatttcatcaatcatttgttgacaaaaaagaaaaactaaaaaataaatttaaaatgtgaaccttcaggtattgagtaacacctttatcttggtatagaactgatacttttttttgattttgaaatatctgataataatttggaatgaagtaaggttctgttaaaatatatttgaagaccctttaaagcagtgaatctgaaacaattttcacacccttaagtggttgatacgtacctattttaggtattttgaggtatttaccataaactaaatttagaaattttttagattcacttgaagtaaacattacaaacattggatacggtggggttttctttagattttacttgagagaaggtgagtacaaagcaatttgcagttgttgtaatgacaagattactgcgcaagtgtgaatccaaacagtatagcttttaaattttaaagcatttggtaaattatcgctgagtttttttctgttgccaatagcaaactgcttttccattaatggagaattcatgcctttcaagcattttaaatatgacaatatttataaatgtatggtttggaggaatcgtttaaattctctttcctaattttctttcttttgaagatagattctttcaacaagtaatttgtagtaatgactgtgttgacttcaattttggagcgcagtagctatgttaaagatgaactatttggtctcattgaagccaacacagaacttgctgctgtgttttttcttcagtgataaataaaatacttacagaa

SEQ ID NO: 332745 - DNA, 2493 bp, Homo sapiens
tacacaccacggaaagagaagggttcacgggaagagaagcagaagccccaggctgagcggaaggaggagaaaaaggcggctgcccctgctcctgaggaggagtggagacgtggagaagggcgagatgaggacaggtctcatagaagagatgaagagcggccccggcgtctgggggatgatgaagatagagagccctctcttagaccagacgatgatcgggttccccggcgtggcatggatgatgacagaggccctagacgtggtcctgaggaagataggttctctcgtcgtggggcagacgatgaccggccttcctggcgtaacacagatgatgacaggcctcccagacgaattgccgatgaagacaggggaaactggcgtcatgcggatgatgacagaccacctagacgaggactggatgaggacagaggaagctggcgaacagctgatgaggacagaggaccaagacgtgggatggatgatgaccgggggccgaggcgaggaggcgctgatgatgagcgatcatcctggcgtaatgctgatgatgaccggggtcccaggcgagggttggatgatgatcggggtcccaggcgaggcatggatgatgaccggggtcccaggcgaggcatggatgatgaccggggtcccaggcgaggcatggatgatgaccggggtcccaggcgagggttggatgatgatcgaggaccttggaggaacgccgatgatgacagaattcccaggcgtggtgcagaggatgacaggggcccttggagaaacatggatgatgatcgcctttcaagacgtgctgatgatgatcggtttcccagacggggtgatgactcaagacctggtccttggagaccattagtcaagccaggtggatggagagagaaagaaaaagccagagaggagagctggggtccacctcgagaatcaaggccatcagaagaacgtgaatgggacagagaaaaagaaagggacagagataatcaagatcgggaggagaatgacaaggaccctgagagagaaagggacagagagagagatgtggatcgagaggatcgcttcagaagacctagggatgaaggtggctggagaagaggaccagctgaggaatcttcaagctggagagactcaagtcgccgggacgatagggatagggatgaccgtcgccgtgagagggatgaccggcgtgatctaagagaaagacgagatctaagagacgacagggaccgaagaggacctccactcagatcagaacgtgaagaagtaagttcttggagacgtgctgatgacaggaaagatgaccgggtggaagagcgggaccctcctcgtcgagttcctcccccagctctttcaagagaccgagaaagagaccgagaccgagaaagagaaggtgaaaaagagaaggcctcatggagagctgagaaagatagggaatctctccgtcgtactaaaaatgagactgatgaagatggatggaccacagtacgacgttaagtctcaagataatggatttaaactggtgtcttaaataggtttgatcacattcaaggattattatacttgtgcttcaaccaatctaaattggattctttaatgttgtttcaccataacacaaaaagcatgaacttgtattaatcctatataatagattgatcatgcaccatatccacaggaggttggaaaaaccatgccattttctggaatttaagggtgttgcattatttcatcaatcatttgttgacaaaaaagaaaaactaaaaaataaatttaaaatgtgaaccttcaggtattgagtaacacctttatcttggtatagaactgatacttttttttgattttgaaatatctgataataatttggaatgaagtaaggttctgttaaaatatatttgaagaccctttaaagcagtgaatctgaaacaattttcacacccttaagtggttgatacgtacctattttaggtattttgaggtatttaccataaactaaatttagaaattttttagattcacttgaagtaaacattacaaacattggatacggtggggttttctttagattttacttgagagaaggtgagtacaaagcaatttgcagttgttgtaatgacaagattactgcgcaagtgtgaatccaaacagtatagcttttaaattttaaagcatttggtaaattatcgctgagtttttttctgttgccaatagcaaactgcttttccattaatggagaattcatgcctttcaagcattttaaatatgacaatatttataaatgtatggtttggaggaatcgtttaaattctctttcctaattttctttcttttgaagatagattctttcaacaagtaatttgtagtaatgactgtgttgacttcaattttggagcgcagtagctatgttaaagatgaactatttggtctcattgaagccaacacagaacttgctgctgtgttttttcttcagtgataaataaaatacttacagaa

SEQ ID NO: 332746 - DNA, 1704 bp, Homo sapiens
ggcgacctgaggatcacggcatcataaacgtgaatgggacagagtaaaaagacagggacagagatatcaagatcgggaggagaatgacgtggatggagagagaaagaaaaagccagagaggagagctggggtccacctcgagaatcaaggccatcagaagaacgtgaatgggacagagaaaaagaaagggacagagataatcaagatcgggaggagaatgacaaggaccctgagagagaaagggacagagagagagatgtggatcgagaggatcgcttcagaagacctagggatgaaggtggctggagaagaggaccagctgaggaatcttcaagctggagagactcaagtcgccgggacgatagggatagggatgaccgtcgccgtgagagggatgaccggcgtgatctaagagaaagacgagatctaagagacgacagggaccgaagaggacctccactcagatcagaacgtgaagaagtaagttcttggagacgtgctgatgacaggaaagatgaccgggtggaagagcgggaccctcctcgtcgagttcctcccccagctctttcaagagaccgagaaagagaccgagaccgagaaagagaaggtgaaaaagagaaggcctcatggagagctgagaaagatagggaatctctccgtcgtactaaaaatgagactgatgaagatggatggaccacagtacgacgttaagtctcaagataatggatttaaactggtgtcttaaataggtttgatcacattcaaggattattatacttgtgcttcaaccaatctaaattggattctttaatgttgtttcaccataacacaaaaagcatgaacttgtattaatcctatataatagattgatcatgcaccatatccacaggaggttggaaaaaccatgccattttctggaatttaagggtgttgcattatttcatcaatcatttgttgacaaaaaagaaaaactaaaaaataaatttaaaatgtgaaccttcaggtattgagtaacacctttatcttggtatagaactgatacttttttttgattttgaaatatctgataataatttggaatgaagtaaggttctgttaaaatatatttgaagaccctttaaagcagtgaatctgaaacaattttcacacccttaagtggttgatacgtacctattttaggtattttgaggtatttaccataaactaaatttagaaattttttagattcacttgaagtaaacattacaaacattggatacggtggggttttctttagattttacttgagagaaggtgagtacaaagcaatttgcagttgttgtaatgacaagattactgcgcaagtgtgaatccaaacagtatagcttttaaattttaaagcatttggtaaattatcgctgagtttttttctgttgccaatagcaaactgcttttccattaatggagaattcatgcctttcaagcattttaaatatgacaatatttataaatgtatggtttggaggaatcgtttaaattctctttcctaattttctttcttttgaagatagattctttcaacaagtaatttgtagtaatgactgtgttgacttcaattttggagcgcagtagctatgttaaagatgaactatttggtctcattgaagccaacacagaacttgctgctgtgttttttcttcagtgataaataaaatacttacagaa

SEQ ID NO: 332747 - DNA, 4529 bp, Homo sapiens
gacccgccccctacatccggggcctgggcggcagcagggccgccgcggggaggtcacgtggctccttcctttccgtctctggccggctgggcgcgggcgactgctggcgaggcgcgtgggaccttacgctggttccccttcgtctcctctcccggcccgggccactagagagttcgctgacgccgggtgagctgagcctgccgccaagatgccggcctattttcagaggccggaaaatgccctcaaacgcgccaacgaatttcttgaggttggcaaaaagcagcctgctctggatgttctttatgatgttatgaaaagtaaaaaacatagaacatggcaaaagatacacgaaccaattatgttgaaatacttggaactttgcgtggatcttcgcaagagccacttggcaaaggaggggttataccagtataagaacatttgtcaacaggtgaacataaaatctctggaggatgttgttagggcatatttgaaaatggcagaggaaaaaactgaagctgctaaagaagaatctcagcagatggtcttagatatagaggatctagataatattcaaactcctgagagtgttctcctaagtgctgtaagtggtgaagacactcaggatcgtactgacagattacttttaactccatgggttaaattcctgtgggagtcttacaggcagtgtttggaccttcttagaaacaattctagagtagagcgcctgtaccatgatattgcccagcaagctttcaaattctgcctccaatacacgcgtaaggctgaattccgtaaactgtgtgacaatttgagaatgcacttatcgcagattcagcgccaccataaccaaagtacggcaatcaatcttaataatccagagagccagtccatgcatttggaaaccagacttgttcagctggacagtgctatcagcatggaattgtggcaggaagcattcaaagctgtggaagatattcacgggctattctccttgtctaaaaaaccacctaaacctcagttgatggcaaattactataacaaagtctcaactgtgttttggaaatctggaaatgctctttttcatgcatctacactccatcgtctttaccatctctctagagaaatgagaaagaatctcacacaagacgagatgcaaagaatgtctactagagtccttttagccactctttccatccctattactcctgagcgtacggatattgctcgacttctggatatggatggcattatagttgaaaaacagcgtcgccttgcaacactactaggtcttcaagccccaccgacacgaattggccttattaatgatatggtcagatttaatgtactacaatatgttgtcccagaagtgaaagacctttacaattggcttgaagtagaatttaacccattaaaactctgtgagcgagtcacaaaggttctaaattgggttagggaacaacctgaaaaggaaccggaattgcagcagtatgtgccacaactgcaaaacaacaccatcctccgccttctgcagcaggtgtcacagatttatcagagcattgagttttctcgtttgacttctttggttccttttgttgatgctttccaactggaacgggccatagtagatgcagccaggcattgcgacttgcaggttcgtattgatcacacttctcggaccctgagttttggatctgatttgaattatgctactcgagaagatgctccgattggtcctcatttgcaaagcatgccttcagagcagataagaaaccagctgacagccatgtcctcagtacttgcaaaagcacttgaagtcattaaaccagctcatatactgcaagagaaagaagaacagcatcagttggctgtcactgcataccttaaaaattcacgaaaagagcaccagcggatcctggctcgccgccagacaattgaggagagaaaagagcgccttgagagtctgaatattcagcgtgagaaagaagaattggaacagagggaagctgaactccagaaagtgcggaaggctgaggaagagaggctgcgccaggaagcaaaggagagagagaaggagcgtatcttacaggaacatgaacaaatcaaaaagaaaactgtccgagagcgtttggagcagatcaagaaaacagaactgggtgccaaagcattcaaagatattgatattgaagaccttgaggaattggatccagattttatcatggctaaacaggttgaacaactggagaaagaaaagaaagaacttcaagaacgcctaaagaatcaagaaaagaagattgactattttgaaagagccaaacgtttggaagaaattcctttgataaagagcgcttacgaggaacagagaattaaagacatggatctgtgggagcaacaagaggaagaaagaattactacaatgcagctagaacgtgaaaaggctcttgaacataagaatcgaatgtcacgaatgcttgaagacagagatttattcgtaatgcgactcaaagctgcacggcagtctgtttatgaggaaaaacttaaacagtttgaagagcgattagcagaagaaaggcataatcgattggaagaacggaaaaggcagcgtaaagaagaacgcaggataacatactatagagaaaaagaagaggaggagcagagaagggcagaagaacaaatgctaaaagagcgggaagagagagagcgcgccgaacgagcaaaacgcgaggaagagctacgagagtatcaggagcgggtgaagaaattagaagaagtggaaaggaaaaaacgccaaagggagttggaaattgaagaacgagaacggcgtagagaggaagagagaagacttggcgatagttccctttctagaaaggactctcgttggggagatagagattcagaaggcacctggagaaaaggacctgaagcagattctgagtggagaagaggcccgccagagaaggagtggagacgtggagaagggcgagatgaggacaggtctcatagaagagatgaagagcggccccggcgtctgggggatgatgaagatagagagccctctcttagaccagacgatgatcgggttccccggcgtggcatggatgatgacagaggccctagacgtggtcctgaggaagataggttctctcgtcgtggggcagacgatgaccggccttcctggcgtaacacagatgatgacaggcctcccagacgaattgccgatgaagacaggggaaactggcgtcatgcggatgatgacagaccacctagacgaggactggatgaggacagaggaagctggcgaacagctgatgaggacagaggaccaagacgtgggatggatgatgaccgggggccgaggcgaggaggcgctgatgatgagcgatcatcctggcgtaatgctgatgatgaccggggtcccaggcgagggttggatgatgatcggggtcccaggcgaggcatggatgatgaccggggtcccaggcgaggcatggatgatgaccggggtcccaggcgaggcatggatgatgaccggggtcccaggcgagggttggatgatgatcgaggaccttggaggaacgccgatgatgacagaattcccaggcgtggtgcagaggatgacaggggcccttggagaaacatggatgatgatcgcctttcaagacgtgctgatgatgatcggtttcccagacggggtgatgactcaagacctggtccttggagaccattagtcaagccaggtggatggagagagaaagaaaaagccagagaggagagctggggtccacctcgagaatcaaggccatcagaagaacgtgaatgggacagagaaaaagaaagggacagagataatcaagatcgggaggagaatgacaaggaccctgagagagaaagggacagagagagagatgtggatcgagaggatcgcttcagaagacctagggatgaaggtggctggagaagaggaccagctgaggaatcttcaagctggagagactcaagtcgccgggacgatagggatagggatgaccgtcgccgtgagagggatgaccggcgtgatctaagagaaagacgagatctaagagacgacagggaccgaagaggacctccactcagatcagaacgtgaagaagtaagttcttggagacgtgctgatgacaggaaagatgaccgggtggaagagcgggaccctcctcgtcgagttcctcccccagctctttcaagagaccgagaaagagaccgagaccgagaaagagaaggtgaaaaagagaaggcctcatggagagctgagaaagatagggaatctctccgtcgtactaaaaatgagactgatgaagatggatggaccacagtacgacgttaagtctcaacgttcaagctgttgcttacttggtttgctctcctctactggctactatacctgttccttcaccagttcttattccacctttatcgctgtctcctcatcccacaccgggatggaaccgatttttctcttttatatttgcttatcatccttttcttagctggttcaa

SEQ ID NO: 332748 - DNA, 1559 bp, Homo sapiens
actggatttctttaattaaaaaaatccagtgtctcaaaaacttgtgaaaatgtgtttaaaaaacaaacggccagtgagcctgctacaccatttgcccatatgcctatgtaacttctgagaatctcacacaagacgagatgcaaagggatgaaggtggctggagaagaggaccagctgaggaatcttcaagctggagagactcaagtcgccgggacgatagggatagggatgaccgtcgccgtgagagggatgaccggcgtgatctaagagaaagacgagatctaagagacgacagggaccgaagaggacctccactcagatcagaacgtgaagaagtaagttcttggagacgtgctgatgacaggaaagatgaccgggtggaagagcgggaccctcctcgtcgagttcctcccccagctctttcaagagaccgagaaagagaccgagaccgagaaagagaaggtgaaaaagagaaggcctcatggagagctgagaaagatagggaatctctccgtcgtactaaaaatgagactgatgaagatggatggaccacagtacgacgttaagtctcaagataatggatttaaactggtgtcttaaataggtttgatcacattcaaggattattatacttgtgcttcaaccaatctaaattggattctttaatgttgtttcaccataacacaaaaagcatgaacttgtattaatcctatataatagattgatcatgcaccatatccacaggaggttggaaaaaccatgccattttctggaatttaagggtgttgcattatttcatcaatcatttgttgacaaaaaagaaaaactaaaaaataaatttaaaatgtgaaccttcaggtattgagtaacacctttatcttggtatagaactgatacttttttttgattttgaaatatctgataataatttggaatgaagtaaggttctgttaaaatatatttgaagaccctttaaagcagtgaatctgaaacaattttcacacccttaagtggttgatacgtacctattttaggtattttgaggtatttaccataaactaaatttagaaattttttagattcacttgaagtaaacattacaaacattggatacggtggggttttctttagattttacttgagagaaggtgagtacaaagcaatttgcagttgttgtaatgacaagattactgcgcaagtgtgaatccaaacagtatagcttttaaattttaaagcatttggtaaattatcgctgagtttttttctgttgccaatagcaaactgcttttccattaatggagaattcatgcctttcaagcattttaaatatgacaatatttataaatgtatggtttggaggaatcgtttaaattctctttcctaattttctttcttttgaagatagattctttcaacaagtaatttgtagtaatgactgtgttgacttcaattttggagcgcagtagctatgttaaagatgaactatttggtctcattgaagccaacacagaacttgctgctgtgttttttcttcagtgataaataaaatacttacagaa

SEQ ID NO: 332749 - DNA, 1333 bp, Homo sapiens
  misc_feature (63)..(63): n is a, c, g, or t
acccgcagcttgtcctccccagccaacaacatctgcttctacggcgagtgttcctactacctntccacggagcacgccctgtgcgggaagccagaccagatcgagggctcgctggcggccttcctgcccgacctgtccctggccaagaggaagacctggcggaacccttggcggcgttcctaccacaagcgcaagaaggccgagtgggaggtggaccctgactactgcgaggaggtgaagcagacaccgccctacgacagcagccaccgcatcctggacgtcatggacatgacgatcttcgacttcctcatgggaaacatggaccacagtacgacgttaagtctcaagataatggatttaaactggtgtcttaaataggtttgatcacattcaaggattattatacttgtgcttcaaccaatctaaattggattctttaatgttgtttcaccataacacaaaaagcatgaacttgtattaatcctatataatagattgatcatgcaccatatccacaggaggttggaaaaaccatgccattttctggaatttaagggtgttgcattatttcatcaatcatttgttgacaaaaaagaaaaactaaaaaataaatttaaaatgtgaaccttcaggtattgagtaacacctttatcttggtatagaactgatacttttttttgattttgaaatatctgataataatttggaatgaagtaaggttctgttaaaatatatttgaagaccctttaaagcagtgaatctgaaacaattttcacacccttaagtggttgatacgtacctattttaggtattttgaggtatttaccataaactaaatttagaaattttttagattcacttgaagtaaacattacaaacattggatacggtggggttttctttagattttacttgagagaaggtgagtacaaagcaatttgcagttgttgtaatgacaagattactgcgcaagtgtgaatccaaacagtatagcttttaaattttaaagcatttggtaaattatcgctgagtttttttctgttgccaatagcaaactgcttttccattaatggagaattcatgcctttcaagcattttaaatatgacaatatttataaatgtatggtttggaggaatcgtttaaattctctttcctaattttctttcttttgaagatagattctttcaacaagtaatttgtagtaatgactgtgttgacttcaattttggagcgcagtagctatgttaaagatgaactatttggtctcattgaagccaacacagaacttgctgctgtgttttttcttcagtgataaataaaatacttacagaa

SEQ ID NO: 332750 - DNA, 2402 bp, Homo sapiens
gacccgccccctacatccggggcctgggcggcagcagggccgccgcggggaggtcacgtggctccttcctttccgtctctggccggctgggcgcgggcgactgctggcgaggcgcgtgggaccttacgctggttccccttcgtctcctctcccggcccgggccactagagagttcgctgacgccgggtgagctgagcctgccgccaagatgccggcctattttcagaggccggaaaatgccctcaaacgcgccaacgaatttcttgaggttggcaaaaagcagcctgctctggatgttctttatgatgttatgaaaagtaaaaaacatagaacatggcaaaagatacacgaaccaattatgttgaaatattttttttgattttgaaatatctgataataatttggaatgaagtaaggttctgttaaaatatatttgaagaccctttaaagcagtgaatctgaaacaattttcacacccttaagtggttgatacgtacctattttaggtattttgaggtatttaccataaactaaatttagaaattttttagattcacttgaagtaaacattacaaacattggatacggtggggttttctttagattttacttgagagaaggtgagtacaaagcaatttgcagttgttgtaatgacaagattactgcgcaagtgtgaatccaaacagtatagcttttaaattttaaagcatttggtaaattatcgctgagtttttttctgttgccaatagcaaactgcttttccattaatggagaattcatgcctttcaagcattttaaatatgacaatatttataaatgtatggtttggaggaatcgtttaaattctctttcctaattttctttcttttgaagatagattctttcaacaagtaatttgtagtaatgactgtgttgacttcaattttggagcgcagtagctatgttaaagatgaactatttggtctcattgaagccaacacagaacttgctgctgtgttttttcttcagtgataaataaaatacttacagaatttgttttagtgttgatttgtggttatagtattttgtttataatggtaagtttgcatattcagttgagttttttttacttgaatttttatcagtgccattaaatgtctgtgtttagtatcaatgaaaatgaacctaaatataacaaagaaagcatatgtggctaggatgtccccctaacatgtcttcctttgttaatgcaggaattccttagtttccttgtaacgctgtcctctgagtttgtgtgtgcatgtgcgtgtttgaagtaccaccttgggttttcacctgaaattagaaaaatcgtagttaatttgagaaaatgttacaaattcatcatggctgtaggcacttatttctgttattgagtagtggtgagaattcctattggtacagctgtagggccagaagagggagtattgatgctttttaacttaaccagatgcagctatttttgtttgatgttaccaatgatagaaatcattttaaacaccttagtatctggtatttcaaatacgtagaagtctttaaaggtctttcgtggggagaaggacttttctttcataacaagagaatttcagatcagtgattacaagtggggcagtaacttgctaagagtttgcttcctggagagtagatctgtatgtgtgacatcacaggtaagccccaagaatttatttaatcagatttgttcagacgagttactgctgcctacgttagagttagatttcaaggcgagtcagcaaacccatcctttctgctcagtctcccgtactgttctcccaagttctttgttctgggagtcagaacccaagtgcaagaggagggcagaagagtctgatgctgttactttgcgatcctgctcttggtttccactgtccaggccatacaactctgtctactcccattagtatttaccaacaggtgttaaaggaaagctgaacaagcagcctactcaccgatctgctaggtggtcttccatgttcatggtggcttctgcagtttcattgagagtaacattgctgttaatacagatagatccagtagtagagacatcatcggtccaaaagactttgcatctcattagttgtccatagtgactaccaggaggtggctggcatctataacgtgtgggacgtttttatgtaaagaactgcctgtgttttttttttttttaaccaaagacactgaccatagattgacttatacttttataagtctaattgaaatacttggggtactatgaaaggactgttccttgagtggctacgattagaaaatcaggactaacaaacttttctttgtctggaagcatatatatttgtgatataattttaatatgtataattttggtttaataaatcaaatctatgaca

SEQ ID NO: 332751 - DNA, 1982 bp, Homo sapiens
gacccgccccctacatccggggcctgggcggcagcagggccgccgcggggaggtcacgtggctccttcctttccgtctctggccggctgggcgcgggcgactgctggcgaggcgcgtgggaccttacgctggttccccttcgtctcctctcccggcccgggccactagagagttcgctgacgccgggtgagctgagcctgccgccaagatgccggcctattttcagaggccggaaaatgccctcaaacgcgccaacgaatttcttgaggttggcaaaaagcagcctgctctggatgttctttatgatgttatgaaaagtaaaaaacatagaacatggcaaaagatacacgaaccaattatgttgaaatacttggaactttgcgtggatcttcgcaagagccacttggcaaaggaggggttataccagtataagaacatttgtcaacaggtgaacataaaatctctggaggatgttgttagggcatatttgaaaatggcagaggaaaaaactgaagctgctaaagaagaatctcagcagatggtcttagatatagaggatctagataatattcaaactcctgagagtgttctcctaagtgctgtaagtggtgaagacactcaggatcgtactgacagattacttttaactccatgggttaaattcctgtgggagtcttacaggcagtgtttggaccttcttagaaacaattctagagtagagcgcctgtaccatgatattgcccagcaagctttcaaattctgcctccaatacacgcgtaaggctgaattccgtaaactgtgtgacaatttgagaatgcacttatcgcagattcagcgccaccataaccaaagtacggcaatcaatcttaataatccagagagccagtccatgcatttggaaaccagacttgttcagctggacagtgctatcagcatggaattgtggcaggaagcattcaaagctgtggaagatattcacgggctattctccttgtctaaaaaaccacctaaacctcagttgatggcaaattactataacaaagtctcaactgtgttttggaaatctggaaatgctctttttcatgcatctacactccatcgtctttaccatctctctagagaaatgagaaagaatctcacacaagacgagatgcaaagaatgtctactagagtccttttagccactctttccatccctattactcctgagcgtacggatattgctcgacttctggatatggatggcattatagttgaaaaacagcgtcgccttgcaacactactaggtcttcaagccccaccgacacgaattggccttattaatgatatggtcagatttaatgtactacaatatgttgtcccagaagtgaaagacctttacaattggcttgaagtagaatttaacccattaaaactctgtgagcgagtcacaaaggttctaaattgggttagggaacaacctgaaaaggaaccggaattgcagcagtatgtgccacaactgcaaaacaacaccatcctccgccttctgcagcaggtgtcacagatttatcagagcattgagttttctcgtttgacttctttggttccttttgttgatgctttccaactggaacgggccatagtagatgcagccaggcattgcgacttgcaggttcgtattgatcacacttctcggaccctgagttttggatctgatttgaattatgctactcgagaagatgctccgattggtcctcatttgcaaagcatgccttcagagcagataagaaaccagctgacagccatgtcctcagtacttgcaaaagcacttgaagtcattaaaccagctcatatactgcaagagaaagaagaacagcatcagttggctgtcactgcataccttaaaaattcacgaaaagagcaccagcggatcctggctcgccgccagacaattgaggagagaaaagcaggctccaggagaaaaccaggcgtgcagggggtcc

SEQ ID NO: 332752 - DNA, 300 bp, Homo sapiens
cccctccgattaaattcaaaaagaaacagaatagaaatactattccaaagaaggcaaaataccacatacatcttatttgttctcacaggtaaacaaatggaaatctaagaaagatttactgattgtccagtaaggcaaagatttttgtagatatgacaccaaacacgttattcattaaagaaaacaattgagaaattgagtgttttgagtatttctttccatttttttttttttttttagagacagggacttgctctgttgacagagctagggtacagtggtgtgatcatggctcactat

SEQ ID NO: 332753 - DNA, 266 bp, Homo sapiens
ctgtagggcaggggtatcctgggccacgatggaagaaatgtcttgggccacgcgtaaaatataatagcaccaactatagatgatgagcttaaaaaaaagcggggggcaaaaaagctcataatgttttaagaaagtttacgaatttgtgttgggctgcattcaaagcatcctgggctgcgtgcagcctgtgggccacgggttggacaagcttggtccaggggatctctaataaaaaatgcacatctaatctctgactcagcaattct

SEQ ID NO: 332754 - DNA, 794 bp, Homo sapiens
ttttgtatttttagtagagatggggtttcaccgtgttggccaggatggtcttaatctcttgacattgcaatctgcccatcttggcctcccaaagtgttgggattacaggcgtgagccaccgcacccggcctgtggattttaattgaaaaaagatagtggtttttagcaaattacaactactggctcagaagtaataaatctaagcttcacatttattccatagaattatattgtttttcttataatgaacatataattcatatgtgatatatagcagtcatgttgttttattctctacaggtatgttcgcaattcgtgctgatcatgattttgtagtacaggaagacttcatgaaagcagtcagaaaagtggctgattctaagaagctggagtctaaattggactacaaacctgtgtaatttactgtaagatttttgatggctgcatgacagatgttggcttattgtaaaaataaagttaaagaaaataatgtatgtattggcaatgatgtcattaaaagtatatgaataaaaatatgagtaacatcataaaaattagtaattcaacttttaagatacagaagaaatttgtatgtttgttaaagttgcatttattgcagcaagttacaaagggaaagtgttgaagcttttcatatttgctgcgtgagcattttgtaaaatattgaaagtggtttgagatagtggtataagaaagcatttcttatgacttattttgtatcatttgttttcctcatctaaaaagttgaataaaatctgtttgattcagttctccta

SEQ ID NO: 332755 - DNA, 1386 bp, Homo sapiens
tcctgtttttaaagtttcaggggtgtgtctaattcttcttggtgctggtttatttaacagaagtcttagtttttggatattaatattgtggaaagttaacagagctgatgtctagctgatcaaactcaaagtaagctcttcagtttaaattttcgatgtgggcataaatcaagtaaaggtctaatttttaaaactaatttccagtattttttctaaacagattatgaagcaattgtgaagctttcggatggctttaatggagcagatctgagaaatgtttgtactgaagcaggtatgttcgcaattcgtgctgatcatgattttgtagtacaggaagacttcatgaaagcagtcagaaaagtggctgattctaagaagctggagtctaaattggactacaaacctgtgtaatttactgtaagatttttgatggctgcatgacagatgttggcttattgtaaaaataaagttaaagaaaataatgtatgtattggcaatgatgtcattaaaagtatatgaataaaaatatgagtaacatcataaaaattagtaattcaacttttaagatacagaagaaatttgtatgtttgttaaagttgcatttattgcagcaagttacaaagggaaagtgttgaagcttttcatatttgctgcgtgagcattttgtaaaatattgaaagtggtttgagatagtggtataagaaagcatttcttatgacttattttgtatcatttgttttcctcatctaaaaagttgaataaaatctgtttgattcagttctcctacatatatattcttgtcttttctgagtatatttactgtggtcctttaggttctttagcaagtaaactatttgataacccagatggattgtggatttttgaatattattttaaaatagtacacatacttaatgttcataagatcatcttcttaaataaaacatggatgtgtgggtatgtctgtactcctcctttcagaaagtgtttacatattcttcatctactgtgattaagctcattgttggttaattgaaaatatacatgcacatccataactttttaaagagtatgattcaacgtaatatttgctaatatgtgactgggttttcttggtttatgtaagacgataggtccctgttgaggatgtggaggtctggaccctcttccaggaaaaattctaacatacaattttgcgtatactataatttcaggaaatttattgtttcccaagctcatccaaggactctttaggtatgtatggatacctggctaagagtgtatgatgtaggggatgtaggagtgtcagaaatgttcaaaacatgatttctgttacctatacatgattcttatatcatctggcaataaaagctataacaaagtaca

SEQ ID NO: 332756 - DNA, 943 bp, Homo sapiens
  misc_feature (807)..(807): n is a, c, g, or t
  misc_feature (824)..(825): n is a, c, g, or t
  misc_feature (849)..(849): n is a, c, g, or t
  misc_feature (859)..(859): n is a, c, g, or t
ggccattcccggcatcccctatgagagacggcttctcatcatggcggaccctagagataaggcgcttcaggactaccgcaagaagttgcttgaacacaaggagatcgacggccgtcttaaggagttaagggaacaattaaaagaacttaccaagcagtatgaaaagtctgaaaatgatctgaaggccctacagagtgttgggcagatcgtgggtgaagtgcttaaacagttaactgaagaaaaattcattgttaaagctaccaatggaccaagatatgttgtgggttgtcgtcgacagcttgacaaaagtaagctgaagccaggaacaagagttgctttggatatgactacactaactatcatgagatatttgccgagagaggtggatccactggtttataacatgtctcatgaggaccctgggaatgtttcttattctgagattggagggctatcagaacagatccgggaattaagagaggtgatagaattacctcttacaaacccagagttatttcagcgtgtaggaataatacctccaaaaggctgtttgttatatggaccaccaggtacgggaaaaacactcttggcacgagccgttgctagccagctggactgcaatttcttaaaggttgtatctagttctattgtagacaagtacattggtgaaagtgctcgtttgatcagagaaatgtttaattatgctagagatcatcaaccatgcatcatttttatggatgaaatagatgctattggggggcggcggtttctgagggtacttcagtgacagagagattccgagaacgntatggggttccgaatcnnatggtgggtttgaaactctcggtngagttaaaangactcgggggccaacgaacagaaacgggcccggtggggggccgaattttaaaaccttgttggccaacgtaaggaaccgggctga

SEQ ID NO: 332757 - DNA, 733 bp, Homo sapiens
  misc_feature (711)..(711): n is a, c, g, or t
  misc_feature (713)..(713): n is a, c, g, or t
ttttgtatttttagtagagatggggtttcaccgtgttggccaggatggtcttaatctcttgacattgcaatctgcccatcttggcctcccaaagtgttgggattacaggcgtgagccaccgcacccggcctgtggattttaattgaaaaaagatagtggtttttagcaaattacaactactggctcagaagtaataaatctaagcttcacatttattccatagaattatattgtttttcttataatgaacatataattcatatgtgatatatagcagtcatgttgttttattctctacaggtatgttcgcaattcgtgctgatcatgattttgtagtacaggaagacttcatgaaagcagtcagaaaagtggctgattctaagaagctggagtctaaattggactacaaacctgtgtaatttactgtaagatttttgatggctgcatgacagatgttggcttattgtaaaaataaagttaaagaaaataatgtatgtattggcaatgatgtcattaaaagtatatgaataaaaatatgagtaacatcataaaaattagtaattcaacttttaagatacagaagaaatttgtatgtttgttaaagttgcatttattgcagcaagttacaaagggaaagtgttgaagcttttcatatttgctgcgtgagcattttgtaaaatattgaaagtggtttgagatagtgtacggatnancgggatcctctagaacacta

SEQ ID NO: 332758 - DNA, 537 bp, Homo sapiens
  misc_feature (8)..(8): n is a, c, g, or t
attcaatntgcggtgagcatcagcatgaatgaaaatgggaagacacaaattgcatggtgaaataggtaaggaagtcatctattttatatgtatttacatttggtaaatgaagaaaaatacttttagaaattactgatagtttcctaaatctggttttaaattcagcaaatgtggtggttttaaattcagcaaatagttattgagcatctactataagctaggaaccattgtaagtgttttgtaagggctgacaatatagcaaggaacaaaacagacaaatttctgccattagagaacttatattcttgttaggaaaaaacagataaagttagtaaaacaaagtataatagatgatgataagtgctatggagaaaaataaagcaagaaagtggggggcgggcatggtggctcactcctgtaatcctaatggttttggaggccgaggcagaaggaccgcttgaggccaggagtttgaggttgcagggagctatgatcatgtgactgcactccagtttggcaagacgctgtttcagggga

SEQ ID NO: 332759 - DNA, 468 bp, Homo sapiens
ggccattcccggcatcccctatgagagacggcttctcatcatggcggaccctagagataaggcgcttcaggactaccgcaagaagttgcttgaacacaaggagatcgacggccgtcttaaggagtgtgagtgcacctttctttccatttaatcaagtgcctcgactcgcttctgcctctgacaaagcagaagcctttcgccgagcccggcaaccgagccttagagatgaccaggcctagggccagggacaaggcgctttgtcatccggccctgagcttgtggagcagcactccttcgggtgtagaaatggcccagtccagcccgggtgacagaacatcggcggccttgaggtgaaaatgaaaaagaagtagaggaggagtggggaagtgggccgaggatgtttcccaggttagggtgcaagaagggcagtcttggtggagtcccgggacttggagaggggaaggcgct

SEQ ID NO: 332760 - DNA, 1619 bp, Homo sapiens
ggccattcccggcatcccctatgagagacggcttctcatcatggcggaccctagagataaggcgcttcaggactaccgcaagaagttgcttgaacacaaggagatcgacggccgtcttaaggagttaagggaacaattaaaagaacttaccaagcagtatgaaaagtctgaaaatgatctgaaggccctacagagtgttgggcagatcgtgggtgaagtgcttaaacagttaactgaagaaaaattcattgttaaagctaccaatggaccaagatatgttgtgggttgtcgtcgacagcttgacaaaagtaagctgaagccaggaacaagagttgctttggatatgactacactaactatcatgagatatttgccgagagaggtggatccactggtttataacatgtctcatgaggaccctgggaatgtttcttattctgagattggagggctatcagaacagatccgggaattaagagaggtgatagaattacctcttacaaacccagagttatttcagcgtgtaggaataatacctccaaaaggctgtttgttatatggaccaccaggtacgggaaaaacactcttggcacgagccgttgctagccagctggactgcaatttcttaaaggttgtatctagttctattgtagacaagtacattggtgaaagtgctcgtttgatcagagaaatgtttaattatgctagagatcatcaaccatgcatcatttttatggatgaaatagatgctattggtggtcgtcggttttctgagggtacttcagctgacagagagattcagagaacgttaatggagttactgaatcaaatggatggatttgatactctgcatagagttaaaatgatcatggctacaaacagaccagatacactggatcctgctttgctgcgtccaggaagattagatagaaaaatacatattgatttgccaaatgaacaagcaagattagacatactgaaaatccatgcaggtcccattacaaagcatggtgaaatagattatgaagcaattgtgaagctttcggatggctttaatggagcagatctgagaaatgtttgtactgaagcaggtatgttcgcaattcgtgctgatcatgattttgtagtacaggaagacttcatgaaagcagtcagaaaagtggctgattctaagaagctggagtctaaattggactacaaacctgtgtaatttactgtaagatttttgatggctgcatgacagatgttggcttattgtaaaaataaagttaaagaaaataatgtatgtattggcaatgatgtcattaaaagtatatgaataaaaatatgagtaacatcataaaaattagtaattcaacttttaagatacagaagaaatttgtatgtttgttaaagttgcatttattgcagcaagttacaaagggaaagtgttgaagcttttcatatttgctgcgtgagcattttgtaaaatattgaaagtggtttgagatagtggtataagaaagcatttcttatgacttattttgtatcatttgttttcctcatctaaaaagttgaataaaatctgtttgattcagttctcctaaaaaaaaaaaacacacaacccagacaacacaaca

SEQ ID NO: 332761 - DNA, 1383 bp, Homo sapiens
ggccattcccggcatcccctatgagagacggcttctcatcatggcggaccctagagataaggcgcttcaggactaccgcaagaagttgcttgaacacaaggagatcgacggccgtcttaaggagttaagggaacaattaaaagaacttaccaagcagtatgaaaagtctgaaaatgatctgaaggccctacagagtgttgggcagatcgtgggtgaagtgcttaaacagttaactgaagaaaaattcattgttaaagctaccaatggaccaagatatgttgtgggttgtcgtcgacagcttgacaaaagtaagctgaagccaggaacaagagttgctttggatatgactacactaactatcatgagatatttgccgagagaggtggatccactggtttataacatgtctcatgaggaccctgggaatgtttcttattctgagattggagggctatcagaacagatccgggaattaagagaggtgatagaattacctcttacaaacccagagttatttcagcgtgtaggaataatacctccaaaaggctgtttgttatatggaccaccaggtacgggaaaaacactcttggcacgagccgttgctagccagctggactgcaatttcttaaaggttgtatctagttctattgtagacaagtacattggtgaaagtgctcgtttgatcagagaaatgtttaattatgctagagatcatcaaccatgcatcatttttatggatgaaatagatgctattggtggtcgtcggttttctgagggtacttcagctgacagagagattcagagaacgttaatggagattatgaagcaattgtgaagctttcggatggctttaatggagcagatctgagaaatgtttgtactgaagcaggtatgttcgcaattcgtgctgatcatgattttgtagtacaggaagacttcatgaaagcagtcagaaaagtggctgattctaagaagctggagtctaaattggactacaaacctgtgtaatttactgtaagatttttgatggctgcatgacagatgttggcttattgtaaaaataaagttaaagaaaataatgtatgtattggcaatgatgtcattaaaagtatatgaataaaaatatgagtaacatcataaaaattagtaattcaacttttaagatacagaagaaatttgtatgtttgttaaagttgcatttattgcagcaagttacaaagggaaagtgttgaagcttttcatatttgctgcgtgagcattttgtaaaatattgaaagtggtttgagatagtggtataagaaagcatttcttatgacttattttgtatcatttgttttcctcatctaaaaagttgaataaaatctgtttgattcagttctccta

SEQ ID NO: 332762 - DNA, 1523 bp, Homo sapiens
ggccattcccggcatcccctatgagagacggcttctcatcatggcggaccctagagataaggcgcttcaggactaccgcaagaagttgcttgaacacaaggagatcgacggccgtcttaaggagttaagggaacaattaaaagaacttaccaagcagtatgaaaagtctgaaaatgatctgaaggccctacagagtgttgggcagatcgtgggtgaagtgcttaaacagttaactgaagaaaaattcattgttaaagctaccaatggaccaagatatgttgtgggttgtcgtcgacagcttgacaaaagtaagctgaagccaggaacaagagttgctttggatatgactacactaactatcatgagatatttgccgagagaggtggatccactggtttataacatgtctcatgaggaccctgggaatgtttcttattctgagattggagggctatcagaacagatccgggaattaagagaggtgatagaattacctcttacaaacccagagttatttcagcgtgtaggaataatacctccaaaaggctgtttgttatatggaccaccaggttgtatctagttctattgtagacaagtacattggtgaaagtgctcgtttgatcagagaaatgtttaattatgctagagatcatcaaccatgcatcatttttatggatgaaatagatgctattggtggtcgtcggttttctgagggtacttcagctgacagagagattcagagaacgttaatggagttactgaatcaaatggatggatttgatactctgcatagagttaaaatgatcatggctacaaacagaccagatacactggatcctgctttgctgcgtccaggaagattagatagaaaaatacatattgatttgccaaatgaacaagcaagattagacatactgaaaatccatgcaggtcccattacaaagcatggtgaaatagattatgaagcaattgtgaagctttcggatggctttaatggagcagatctgagaaatgtttgtactgaagcaggtatgttcgcaattcgtgctgatcatgattttgtagtacaggaagacttcatgaaagcagtcagaaaagtggctgattctaagaagctggagtctaaattggactacaaacctgtgtaatttactgtaagatttttgatggctgcatgacagatgttggcttattgtaaaaataaagttaaagaaaataatgtatgtattggcaatgatgtcattaaaagtatatgaataaaaatatgagtaacatcataaaaattagtaattcaacttttaagatacagaagaaatttgtatgtttgttaaagttgcatttattgcagcaagttacaaagggaaagtgttgaagcttttcatatttgctgcgtgagcattttgtaaaatattgaaagtggtttgagatagtggtataagaaagcatttcttatgacttattttgtatcatttgttttcctcatctaaaaagttgaataaaatctgtttgattcagttctccta

SEQ ID NO: 332763 - DNA, 1517 bp, Homo sapiens
ggccattcccggcatcccctatgagagacggcttctcatcatggcggaccctagagataaggcgcttcaggactaccgcaagaagttgcttgaacacaaggagatcgacggccgtcttaaggagttaagggaacaattaaaagaacttaccaagcagtatgaaaagtctgaaaatgatctgaaggccctacagagtgttgggcagatcgtgggtgaagtgcttaaacagttaactgaagaaaaattcattgttaaagctaccaatggaccaagatatgttgtgggttgtcgtcgacagatatttgccgagagaggtggatccactggtttataacatgtctcatgaggaccctgggaatgtttcttattctgagattggagggctatcagaacagatccgggaattaagagaggtgatagaattacctcttacaaacccagagttatttcagcgtgtaggaataatacctccaaaaggctgtttgttatatggaccaccaggtacgggaaaaacactcttggcacgagccgttgctagccagctggactgcaatttcttaaaggttgtatctagttctattgtagacaagtacattggtgaaagtgctcgtttgatcagagaaatgtttaattatgctagagatcatcaaccatgcatcatttttatggatgaaatagatgctattggtggtcgtcggttttctgagggtacttcagctgacagagagattcagagaacgttaatggagttactgaatcaaatggatggatttgatactctgcatagagttaaaatgatcatggctacaaacagaccagatacactggatcctgctttgctgcgtccaggaagattagatagaaaaatacatattgatttgccaaatgaacaagcaagattagacatactgaaaatccatgcaggtcccattacaaagcatggtgaaatagattatgaagcaattgtgaagctttcggatggctttaatggagcagatctgagaaatgtttgtactgaagcaggtatgttcgcaattcgtgctgatcatgattttgtagtacaggaagacttcatgaaagcagtcagaaaagtggctgattctaagaagctggagtctaaattggactacaaacctgtgtaatttactgtaagatttttgatggctgcatgacagatgttggcttattgtaaaaataaagttaaagaaaataatgtatgtattggcaatgatgtcattaaaagtatatgaataaaaatatgagtaacatcataaaaattagtaattcaacttttaagatacagaagaaatttgtatgtttgttaaagttgcatttattgcagcaagttacaaagggaaagtgttgaagcttttcatatttgctgcgtgagcattttgtaaaatattgaaagtggtttgagatagtggtataagaaagcatttcttatgacttattttgtatcatttgttttcctcatctaaaaagttgaataaaatctgtttgattcagttctccta

SEQ ID NO: 332764 - DNA, 1716 bp, Homo sapiens
ggccattcccggcatcccctatgagagacggcttctcatcatggcggaccctagagataaggcgcttcaggactaccgcaagaagttgcttgaacacaaggagatcgacggccgtcttaaggagttaagggaacaattaaaagaacttaccaagcagtatgaaaagtctgaaaatgatctgaaggccctacagagtgttgggcagatcgtgggtgaagtgcttaaacagttaactgaagaaaaatgtgagtgatgaattagcttattaattagtaaagaaacagtccacctctctctcacttttgaaatgcttattattttaatgacaataatgcagagagagagagtatttttgaatagacttaagttttccttcaactaatgtctccttggaggacagaaatacaactaaaccctctgtcaacgtggcttgacaaaagtaagctgaagccaggaacaagagttgctttggatatgactacactaactatcatgagatatttgccgagagaggtggatccactggtttataacatgtctcatgaggaccctgggaatgtttcttattctgagattggagggctatcagaacagatccgggaattaagagaggtgatagaattacctcttacaaacccagagttatttcagcgtgtaggaataatacctccaaaaggctgtttgttatatggaccaccaggtacgggaaaaacactcttggcacgagccgttgctagccagctggactgcaatttcttaaaggttgtatctagttctattgtagacaagtacattggtgaaagtgctcgtttgatcagagaaatgtttaattatgctagagatcatcaaccatgcatcatttttatggatgaaatagatgctattggtggtcgtcggttttctgagggtacttcagctgacagagagattcagagaacgttaatggagttactgaatcaaatggatggatttgatactctgcatagagttaaaatgatcatggctacaaacagaccagatacactggatcctgctttgctgcgtccaggaagattagatagaaaaatacatattgatttgccaaatgaacaagcaagattagacatactgaaaatccatgcaggtcccattacaaagcatggtgaaatagattatgaagcaattgtgaagctttcggatggctttaatggagcagatctgagaaatgtttgtactgaagcaggtatgttcgcaattcgtgctgatcatgattttgtagtacaggaagacttcatgaaagcagtcagaaaagtggctgattctaagaagctggagtctaaattggactacaaacctgtgtaatttactgtaagatttttgatggctgcatgacagatgttggcttattgtaaaaataaagttaaagaaaataatgtatgtattggcaatgatgtcattaaaagtatatgaataaaaatatgagtaacatcataaaaattagtaattcaacttttaagatacagaagaaatttgtatgtttgttaaagttgcatttattgcagcaagttacaaagggaaagtgttgaagcttttcatatttgctgcgtgagcattttgtaaaatattgaaagtggtttgagatagtggtataagaaagcatttcttatgacttattttgtatcatttgttttcctcatctaaaaagttgaataaaatctgtttgattcagttctccta

SEQ ID NO: 332765 - DNA, 1288 bp, Homo sapiens
ggccattcccggcatcccctatgagagacggcttctcatcatggcggaccctagagataaggcgcttcaggactaccgcaagaagttgcttgaacacaaggagatcgacggccgtcttaaggagttaagggaacaattaaaagaacttaccaagcagtatgaaaagtctgaaaatgatctgaaggccctacagagtgttgggcagatcgtgggtgaagtgcttaaacagttaactgaagaaaaattcattgttaaagctaccaatggaccaagatatgttgtgggttgtcgtcgacagcttgacaaaagtaagctgaagccaggaacaagagttgctttggatatgactacactaactatcatgagatatttgccgagagaggtggatccactggtttataacatgtctcatgaggaccctgggaatgtttcttattctgagattggagggctatcagaacagatccgggaattaagagaggtgatagaattacctcttacaaacccagagttatttcagcgtgtaggaataatacctccaaaaggctgtttgttatatggaccaccaggtacgggaaaaacactcttggcacgagccgttgctagccagctggactgcaatttcttaaaggttgtatctagttctattgtagacaagtacattggtgaaagtgctcgtttgatcagagaaatgtttaattatgctagagatcatcaaccatgcatcatttttatggatgaaatagatgctattggtggtcgtcggttttctgagggtacttcagctgacagagagattcagagaacgttaatggagttactgaatcaaatggatggatttgatactctgcatagagttaaaatgatcatggctacaaacagaccagatacactggatcctgctttgctgcgtccaggaagattagatagaaaaatacatattgatttgccaaatgaacaagcaagattagacatactgaaaatccatgcaggtcccattacaaagcatggtgaaatagattatgaagcaattgtgaagctttcggatggctttaatggagcagatctgagaaatgtttgtactgaagcaggtatgttcgcaattcgtgctgatcatgattttgtagtacaggaagacttcatgaaagcagtcagaaaagtggctgattctaagaagctggagtctaaattggactacaaacctgtgtaattaataagccaacatctgtcatgcagccatcaaaaatcttacagtaaagtcgacgcggccgcgaatttagtagtagta

SEQ ID NO: 332766 - DNA, 1082 bp, Homo sapiens
ctgtggatccctcgggctgctggaattcggcactttagacagagttatagagagatagagagagagtgtgcgagagaagtgtattgtgacagaccgttggtgcccccctggactgcaatttcttaaaggttgtatctagttctattgtagacaagtacattggtgaaagtgctcgtttgatcagagaaatgtttaattatgctagagatcatcaaccatgcatcatttttatggatgaaatagatgctattggtggtcgtcggttttctgagggtacttcagctgacagagagattcagagaacgttaatggagttactgaatcaaatggatggatttgatactctgcatagagttaaaatgatcatggctacaaacagaccagatacactggatcctgctttgctgcgtccaggaagattagatagaaaaatacatattgatttgccaaatgaacaagcaagattagacatactgaaaatccatgcaggtcccattacaaagcatggtgaaatagattatgaagcaattgtgaagctttcggatggctttaatggagcagatctgagaaatgtttgtactgaagcaggtatgttcgcaattcgtgctgatcatgattttgtagtacaggaagacttcatgaaagcagtcagaaaagtggctgattctaagaagctggagtctaaattggactacaaacctgtgtaatttactgtaagatttttgatggctgcatgacagatgttggcttattgtaaaaataaagttaaagaaaataatgtatgtattggcaatgatgtcattaaaagtatatgaataaaaatatgagtaacatcataaaaattagtaattcaacttttaagatacagaagaaatttgtatgtttgttaaagttgcatttattgcagcaagttacaaagggaaagtgttgaagcttttcatatttgctgcgtgagcattttgtaaaatattgaaagtggtttgagatagtggtataagaaagcatttcttatgacttattttgtatcatttgttttcctcatctaaaaagttgaataaaatctgtttgattcagttctccta

SEQ ID NO: 332767 - DNA, 1504 bp, Homo sapiens
ggccattcccggcatcccctatgagagacggcttctcatcatggcggaccctagagataaggcgcttcaggactaccgcaagaagttgcttgaacacaaggagatcgacggccgtcttaaggagttaagggaacaattaaaagaacttaccaagcagtatgaaaagtctgaaaatgatctgaaggccctacagagtgttgggcagatcgtgggtgaagtgcttaaacagttaactgaagaaaaattcattgttaaagctaccaatggaccaagatatgttgtgggttgtcgtcgacagcttgacaaaagtaagctgaagccaggaacaagagttgctttggatatgactacactaactatcatgagatatttgccgagagaggtggatccactggtttataacatgtctcatgaggaccctgggaatgtttcttattctgagattggagggctatcagaacagatccgggaattaagagaggtgatagaattacctcttacaaacccagagttatttcagcgtgtaggaataatacctccaaaaggctgtttgttatatggaccaccaggtacgggaaaaacactcttggcacgagccgttgctagccagctggactgcaatttcttaaaggttgtatctagttctattgtagacaagtacattggtgaaagtgctcgtttgatcagagaaatgtttaattatgctagagatcatcaaccatgcatcatttttatggatgaaatagatgctattggtggtcgtcggttttctgagggtacttcagctgacagagagattcagagaacgttaatggagttactgaatcaaatggatggatttgatactctgcatagagttaaaatgatcatggctacaaacagaccagatacactggatcctgctttgctgcgtccaggaagattagatagaaaaatacatattgatttgccaaatgaacaagcaagattagacatactgaaaatccatgcaggtcccattacaaagcatggtgaaatagcatggtgaaataggtaaggaagtcatctattttatatgtatttacatttggtaaatgaagaaaaatacttttagaaattactgatagtttcctaaatctggttttaaattcagcaaatgtggtggttttaaattcagcaaatagttattgagcatctactataagctaggaaccattgtaagtgttttgtaagggctgacaatatagcaaggaacaaaacagacaaatttctgccattagagaacttatattcttgttaggaaaaaacagataaagttagtaaaacaaagtataatagatgatgataagtgctatggagaaaaataaagcaagaaagtggggggcgggcatggtggctcactcctgtaatcctaatggttttggaggccgaggcagaaggaccgcttgaggccaggagtttgaggttgcagggagctatgatcatgtgactgcactccagtttggcaagacgctgtttcagggga

SEQ ID NO: 332768 - DNA, 786 bp, Homo sapiens
tcctgtttttaaagtttcaggggtgtgtctaattcttcttggtgctggtttatttaacagaagtcttagtttttggatattaatattgtggaaagttaacagagctgatgtctagctgatcaaactcaaagtaagctcttcagtttaaattttcgatgtgggcataaatcaagtaaaggtctaatttttaaaactaatttccagtattttttctaaacagattatgaagcaattgtgaagctttcggatggctttaatggagcagatctgagaaatgtttgtactgaagcaggtatgttcgcaattcgtgctgatcatgattttgtagtacaggaagacttcatgaaagcagtcagaaaagtggctgattctaagaagctggagtctaaattggactacaaacctgtgtaatttactgtaagatttttgatggctgcatgacagatgttggcttattgtaaaaataaagttaaagaaaataatgtatgtattggcaatgatgtcattaaaagtatatgaataaaaatatgagtaacatcataaaaattagtaattcaacttttaagatacagaagaaatttgtatgtttgttaaagttgcatttattgcagcaagttacaaagggaaagtgttgaagcttttcatatttgctgcgtgagcattttgtaaaatattgaaagtggtttgagatagtggtataagaaagcatttcttatgacttattttgtatcatttgttttcctcatctaaaaagttgaataaaatctgtttgattcagttctccta

SEQ ID NO: 332769 - DNA, 598 bp, Homo sapiens
cgaggatccccgatagctcgatcaaactcaaaattatgaagcaattgtgaagctttcggatggctttaatggagcagatctgagaaatgtttgtactgaagcaggtatgttcgcaattcgtgctgatcatgattttgtagtacaggaagacttcatgaaagcagtcagaaaagtggctgattctaagaagctggagtctaaattggactacaaacctgtgtaatttactgtaagatttttgatggctgcatgacagatgttggcttattgtaaaaataaagttaaagaaaataatgtatgtattggcaatgatgtcattaaaagtatatgaataaaaatatgagtaacatcataaaaattagtaattcaacttttaagatacagaagaaatttgtatgtttgttaaagttgcatttattgcagcaagttacaaagggaaagtgttgaagcttttcatatttgctgcgtgagcattttgtaaaatattgaaagtggtttgagatagtggtataagaaagcatttcttatgacttattttgtatcatttgttttcctcatctaaaaagttgaataaaatctgtttgattcagttctccta

SEQ ID NO: 332770 - DNA, 409 bp, Homo sapiens
tgaagtgcttaaacagttaactgaagaaaaatgtgagtgatgaattagcttattaattagtaaagaaacagtccacctctctctcacttttgaaatgcttattattttaatgacaataatgcagagagagagagtatttttgaatagacttaagttttccttcaactaatgtctccttggaggacagaaatacaactaaaccctctgtcaacgtgggtatgtatttttttactttctatttttcaattagttcttttatgttttttcttctagtcattgttaaagctaccaatggaccaagatatgttgtgggttgtcgtcgacaggtaatactttatatttgtatagtgcctgatgattgacaaagcagtttcatgtaagttattgtctctaattcttgaggcaagca

SEQ ID NO: 332771 - DNA, 1585 bp, Homo sapiens
ggccattcccggcatcccctatgagagacggcttctcatcatggcggaccctagagataaggcgcttcaggactaccgcaagaagttgcttgaacacaaggagatcgacggccgtcttaaggagttaagggaacaattaaaagaacttaccaagcagtatgaaaagtctgaaaatgatctgaaggccctacagagtgttgggcagatcgtgggtgaagtgcttaaacagttaactgaagaaaaattcattgttaaagctaccaatggaccaagatatgttgtgggttgtcgtcgacagcttgacaaaagtaagctgaagccaggaacaagagttgctttggatatgactacactaactatcatgagatatttgccgagagaggtggatccactggtttataacatgtctcatgaggaccctgggaatgtttcttattctgagattggagggctatcagaacagatccgggaattaagagaggtgatagaattacctcttacaaacccagagttatttcagcgtgtaggaataatacctccaaaaggctgtttgttatatggaccaccaggtacgggaaaaacactcttggcacgagccgttgctagccagctggactgcaatttcttaaaggttgtatctagttctattgtagacaagtacattggtgaaagtgctcgtttgatcagagaaatgtttaattatgctagagatcatcaaccatgcatcatttttatggatgaaatagatgctattggtggtcgtcggttttctgagggtacttcagctgacagagagattcagagaacgttaatggagttactgaatcaaatggatggatttgatactctgcatagagttaaaatgatcatggctacaaacagaccagatacactggatcctgctttgctgcgtccaggaagattagatagaaaaatacatattgatttgccaaatgaacaagcaagattagacatactgaaaatccatgcaggtcccattacaaagcatggtgaaatagattatgaagcaattgtgaagctttcggatggctttaatggagcagatctgagaaatgtttgtactgaagcaggtatgttcgcaattcgtgctgatcatgattttgtagtacaggaagacttcatgaaagcagtcagaaaagtggctgattctaagaagctggagtctaaattggactacaaacctgtgtaatttactgtaagatttttgatggctgcatgacagatgttggcttattgtaaaaataaagttaaagaaaataatgtatgtattggcaatgatgtcattaaaagtatatgaataaaaatatgagtaacatcataaaaattagtaattcaacttttaagatacagaagaaatttgtatgtttgttaaagttgcatttattgcagcaagttacaaagggaaagtgttgaagcttttcatatttgctgcgtgagcattttgtaaaatattgaaagtggtttgagatagtggtataagaaagcatttcttatgacttattttgtatcatttgttttcctcatctaaaaagttgaataaaatctgtttgattcagttctccta

SEQ ID NO: 332772 - DNA, 749 bp, Homo sapiens
ggccattcccggcatcccctatgagagacggcttctcatcatggcggaccctagagataaggcgcttcaggactaccgcaagaagttgcttgaacacaaggagatcgacggccgtcttaaggagttaagggaacaattaaaagaacttaccaagcagtatgaaaagtctgaaaatgatctgaaggccctacagagtgttgggcagatcgtgggtgaagtgcttaaacagttaactgaagaaaaattcattgttaaagctaccaatggaccaagatatgttgtgggttgtcgtcgacagcttgacaaaacaggcatacgggctcctcgcacctagcccagcaactcaaattcaccacctcggactcctgcgaccgcatcaaagacgaatttcagctactgcaagctcagtaccacagcctcaagctcgaatgtgacaagttggccagtgagaacgtcagagatgcagcgtcactatgctgactgtactacgcagcatgtcctacggccttgcaaccatcgagaatgcacacaacaggctgatcatcgttcaaaaggctgaacgcggcatcttgtgcccaggctccatgacctaacatctcacaagagcataaagcagaagagtcattgggagccattgacatggccaagcaggtcaccagatccccaagctgaactctatcatccgataacaagttcaagaccaacaacagacccagctgcaagccctgccctgcccttacaccaataca

SEQ ID NO: 332773 - DNA, 2185 bp, Homo sapiens
ggccattcccggcatcccctatgagagacggcttctcatcatggcggaccctagagataaggcgcttcaggactaccgcaagaagttgcttgaacacaaggagatcgacggccgtcttaaggagttaagggaacaattaaaagaacttaccaagcagtatgaaaagtctgaaaatgatctgaaggccctacagagtgttgggcagatcgtgggtgaagtgcttaaacagttaactgaagaaaaattcattgttaaagctaccaatggaccaagatatgttgtgggttgtcgtcgacagcttgacaaaagtaagctgaagccaggaacaagagttgctttggatatgactacactaactatcatgagatatttgccgagagaggtggatccactggtttataacatgtctcatgaggaccctgggaatgtttcttattctgagattggagggctatcagaacagatccgggaattaagagaggtgatagaattacctcttacaaacccagagttatttcagcgtgtaggaataatacctccaaaaggctgtttgttatatggaccaccaggtacgggaaaaacactcttggcacgagccgttgctagccagctggactgcaatttcttaaaggttgtatctagttctattgtagacaagtacattggtgaaagtgctcgtttgatcagagaaatgtttaattatgctagagatcatcaaccatgcatcatttttatggatgaaatagatgctattggtggtcgtcggttttctgagggtacttcagctgacagagagattcagagaacgttaatggagttactgaatcaaatggatggatttgatactctgcatagagttaaaatgatcatggctacaaacagaccagatacactggatcctgctttgctgcgtccaggaagattagatagaaaaatacatattgatttgccaaatgaacaagcaagattagacatactgaaaatccatgcaggtcccattacaaagcatggtgaaatagattatgaagcaattgtgaagctttcggatggctttaatggagcagatctgagaaatgtttgtactgaagcaggtatgttcgcaattcgtgctgatcatgattttgtagtacaggaagacttcatgaaagcagtcagaaaagtggctgattctaagaagctggagtctaaattggactacaaacctgtgtaatttactgtaagatttttgatggctgcatgacagatgttggcttattgtaaaaataaagttaaagaaaataatgtatgtattggcaatgatgtcattaaaagtatatgaataaaaatatgagtaacatcataaaaattagtaattcaacttttaagatacagaagaaatttgtatgtttgttaaagttgcatttattgcagcaagttacaaagggaaagtgttgaagcttttcatatttgctgcgtgagcattttgtaaaatattgaaagtggtttgagatagtggtataagaaagcatttcttatgacttattttgtatcatttgttttcctcatctaaaaagttgaataaaatctgtttgattcagttctcctacatatatattcttgtcttttctgagtatatttactgtggtcctttaggttctttagcaagtaaactatttgataacccagatggattgtggatttttgaatattattttaaaatagtacacatacttaatgttcataagatcatcttcttaaataaaacatggatgtgtgggtatgtctgtactcctcctttcagaaagtgtttacatattcttcatctactgtgattaagctcattgttggttaattgaaaatatacatgcacatccataactttttaaagagtatgattcaacgtaatatttgctaatatgtgactgggttttcttggtttatgtaagacgataggtccctgttgaggatgtggaggtctggaccctcttccaggaaaaattctaacatacaattttgcgtatactataatttcaggaaatttattgtttcccaagctcatccaaggactctttaggtatgtatggatacctggctaagagtgtatgatgtaggggatgtaggagtgtcagaaatgttcaaaacatgatttctgttacctatacatgattcttatatcatctggcaataaaagctataacaaagtaca

SEQ ID NO: 332774 - DNA, 1671 bp, Homo sapiens
ggccattcccggcatcccctatgagagacggcttctcatcatggcggaccctagagataaggcgcttcaggactaccgcaagaagttgcttgaacacaaggagatcgacggccgtcttaaggagttaagggaacaattaaaagaacttaccaagcagtatgaaaagtctgaaaatgatctgaaggccctacagagtgttgggcagatcgtgggtgaagtgcttaaacagttaactgaagaaaaattcattgttaaagctaccaatggaccaagatatgttgtgggttgtcgtcgacagcttgacaaaagtaagctgaagccaggaacaagagttgctttggatatgactacactaactatcatgagatatttgccgagagaggtggatccactggtttataacatgtctcatgaggaccctgggaatgtttcttattctgagattggagggctatcagaacagatccgggaattaagagaggtgatagaattacctcttacaaacccagagttatttcagcgtgtaggaataatacctccaaaaggctgtttgttatatggaccaccaggtacgggaaaaacactcttggcacgagccgttgctagccagctggactgcaatttcttaaaggtaaagggaagattattttgtacttattgaaatttaattttacttgaattatcttatatttaccttactgtttttcctttaatcaggttgtatctagttctattgtagacaagtacattggtgaaagtgctcgtttgatcagagaaatgtttaattatgctagagatcatcaaccatgcatcatttttatggatgaaatagatgctattggtggtcgtcggttttctgagggtacttcagctgacagagagattcagagaacgttaatggagttactgaatcaaatggatggatttgatactctgcatagagttaaaatgatcatggctacaaacagaccagatacactggatcctgctttgctgcgtccaggaagattagatagaaaaatacatattgatttgccaaatgaacaagcaagattagacatactgaaaatccatgcaggtcccattacaaagcatggtgaaatagattatgaagcaattgtgaagctttcggatggctttaatggagcagatctgagaaatgtttgtactgaagcaggtatgttcgcaattcgtgctgatcatgattttgtagtacaggaagacttcatgaaagcagtcagaaaagtggctgattctaagaagctggagtctaaattggactacaaacctgtgtaatttactgtaagatttttgatggctgcatgacagatgttggcttattgtaaaaataaagttaaagaaaataatgtatgtattggcaatgatgtcattaaaagtatatgaataaaaatatgagtaacatcataaaaattagtaattcaacttttaagatacagaagaaatttgtatgtttgttaaagttgcatttattgcagcaagttacaaagggaaagtgttgaagcttttcatatttgctgcgtgagcattttgtaaaatattgaaagtggtttgagatagtggtataagaaagcatttcttatgacttattttgtatcatttgttttcctcatctaaaaagttgaataaaatctgtttgattcagttctccta

SEQ ID NO: 332775 - DNA, 3106 bp, Homo sapiens
ggccattcccggcatcccctatgagagacggcttctcatcatggcggaccctagagataaggcgcttcaggactaccgcaagaagttgcttgaacacaaggagatcgacggccgtcttaaggagttaagggaacaattaaaagaacttaccaagcagtatgaaaagtctgaaaatgatctgaaggccctacagagtgttgggcagatcgtgggtgaagtgcttaaacagttaactgaagaaaaattcattgttaaagctaccaatggaccaagatatgttgtgggttgtcgtcgacagggctctgtggatgccgaaagttggcatttctaagatatttcaggttgcatgaggacaagactgtatttgaagactaaaaaacattagaaaagccgaagtatatataagttgagtatcccttatccaaaatgcttgagccagaaatgtgttttagatttggctttttttttttcaggttttagaatatttgtgttgtactggttgagcatccctaattaaaaaaaatcaaaagtttgaaatgctccgatgagcattttctttgagcatcatgtcagcattcaaaaaatttcacattgtggagcattttggattttcagattaagaatactcagcctgtatttcctatagatgtaaacattgaaatagcttcatattgatttctcctcttattttttcaagtaacctcacttcttagccgttttttccttaattgttatattaatcctagtgttttgcctatcttcctaaatttgaagctctttgtaaaatcctgtgacaagtggtcagtaatttatatgattccgaaattgtattggcacgcagttttttaaactattaaaaagtaacttgggtcgggcggggtggctcatgcctgtaatcccagcactttgggaggctgaggtgggcagatcacgaggtcaggagatcaagaccagcctgaccaacatggtgaaaccccgtctttactaaaaaatacaaaaaaaaattagccgggcatggtggcacacacctgtaatcccagctacttgaggctgaggcaggagaattgcctaaaccagggaggcagaggttgctgtgagccaagatggcgccactgcactccagcctgggcgacagagtgagactccgtactccatctcaaaaaaaaaagtaactttatctttggtaacaacatcctgagagtgaggcagatctagtagattctaattttagccagataagccaagaaattatttagtatgattcaacctaatgtgtaatgtgttcagcatgtgcctgtcatgtagcaaaggcatgagtgatggttgctgggttttggggctttaaatttaaagcattttaataaaaatctctaaggggaaaccgtgcatttttctctactctcatgagcatttaacacattcttcccagaagctgtacatttcaaaataaatctgatgagcacacctttaaaatgcttccctttcctttccctaaaatgttcactaagggatttttctataaatgctttggtagcaattcccaaagtcactgtaccattgctgcctcaagctttgtgtgttagtcatttcacattttacactgagattacacaaaggggcatgcttttaaggagcaggtggaaatcactttgaattacttattttataagccattttgttagcatagagtttataatctgatatttgtgttctctctggagggtaaaaatgagtgtttggcttctaaatattaaactctcgttagagtgttattccgtttttaagtgttgatgtaatatcttttgttttacaaaactagcttgacaaaagtaagctgaagccaggaacaagagttgctttggatatgactacactaactatcatgagatatttgccgagagaggtggatccactggtttataacatgtctcatgaggaccctgggaatgtttcttattctgagattggagggctatcagaacagatccgggaattaagagaggtgatagaattacctcttacaaacccagagttatttcagcgtgtaggaataatacctccaaaaggctgtttgttatatggaccaccaggtacgggaaaaacactcttggcacgagccgttgctagccagctggactgcaatttcttaaaggttgtatctagttctattgtagacaagtacattggtgaaagtgctcgtttgatcagagaaatgtttaattatgctagagatcatcaaccatgcatcatttttatggatgaaatagatgctattggtggtcgtcggttttctgagggtacttcagctgacagagagattcagagaacgttaatggagttactgaatcaaatggatggatttgatactctgcatagagttaaaatgatcatggctacaaacagaccagatacactggatcctgctttgctgcgtccaggaagattagatagaaaaatacatattgatttgccaaatgaacaagcaagattagacatactgaaaatccatgcaggtcccattacaaagcatggtgaaatagattatgaagcaattgtgaagctttcggatggctttaatggagcagatctgagaaatgtttgtactgaagcaggtatgttcgcaattcgtgctgatcatgattttgtagtacaggaagacttcatgaaagcagtcagaaaagtggctgattctaagaagctggagtctaaattggactacaaacctgtgtaatttactgtaagatttttgatggctgcatgacagatgttggcttattgtaaaaataaagttaaagaaaataatgtatgtattggcaatgatgtcattaaaagtatatgaataaaaatatgagtaacatcataaaaattagtaattcaacttttaagatacagaagaaatttgtatgtttgttaaagttgcatttattgcagcaagttacaaagggaaagtgttgaagcttttcatatttgctgcgtgagcattttgtaaaatattgaaagtggtttgagatagtggtataagaaagcatttcttatgacttattttgtatcatttgttttcctcatctaaaaagttgaataaaatctgtttgattcagttctccta

SEQ ID NO: 332776 - DNA, 1438 bp, Homo sapiens
ttagcctccagagagacacaatatcagagttataactctagtgctaacaaaatggcttataatctgatatttgtgttctctctagagggtaaaaatgagtgttattccgtttttaagtgttgatgtaatatcttttgttttacaaaactagcttgacaaaagtaagctgaagccaggaacaagagttgctttggatatgactacactaactatcatgagatatttgccgagagaggtggatccactggtttataacatgtctcatgaggaccctgggaatgtttcttattctgagattggagggctatcagaacagatccgggaattaagagaggtgatagaattacctcttacaaacccagagttatttcagcgtgtaggaataatacctccaaaaggctgtttgttatatggaccaccaggtacgggaaaaacactcttggcacgagccgttgctagccagctggactgcaatttcttaaaggttgtatctagttctattgtagacaagtacattggtgaaagtgctcgtttgatcagagaaatgtttaattatgctagagatcatcaaccatgcatcatttttatggatgaaatagatgctattggtggtcgtcggttttctgagggtacttcagctgacagagagattcagagaacgttaatggagttactgaatcaaatggatggatttgatactctgcatagagttaaaatgatcatggctacaaacagaccagatacactggatcctgctttgctgcgtccaggaagattagatagaaaaatacatattgatttgccaaatgaacaagcaagattagacatactgaaaatccatgcaggtcccattacaaagcatggtgaaatagattatgaagcaattgtgaagctttcggatggctttaatggagcagatctgagaaatgtttgtactgaagcaggtatgttcgcaattcgtgctgatcatgattttgtagtacaggaagacttcatgaaagcagtcagaaaagtggctgattctaagaagctggagtctaaattggactacaaacctgtgtaatttactgtaagatttttgatggctgcatgacagatgttggcttattgtaaaaataaagttaaagaaaataatgtatgtattggcaatgatgtcattaaaagtatatgaataaaaatatgagtaacatcataaaaattagtaattcaacttttaagatacagaagaaatttgtatgtttgttaaagttgcatttattgcagcaagttacaaagggaaagtgttgaagcttttcatatttgctgcgtgagcattttgtaaaatattgaaagtggtttgagatagtggtataagaaagcatttcttatgacttattttgtatcatttgttttcctcatctaaaaagttgaataaaatctgtttgattcagttctccta

SEQ ID NO: 332777 - DNA, 1591 bp, Homo sapiens
ggccattcccggcatcccctatgagagacggcttctcatcatggcggaccctagagataaggcgcttcaggactaccgcaagaagttgcttgaacacaaggagatcgacggccgtcttaaggagtatcgtgggtgaagtgcttaaacagttaactgaagaaaaattcattgttaaagctaccaatggaccaagatatgttgtgggttgtcgtcgacagcttgacaaaagtaagctgaagccaggaacaagagttgctttggatatgactacactaactatcatgagatatttgccgagagaggtggatccactggtttataacatgtctcatgaggaccctgggaatgtttcttattctgagattggagggctatcagaacagatccgggaattaagagaggtgatagaattacctcttacaaacccagagttatttcagcgtgtaggaataatacctccaaaaggctgtttgttatatggaccaccaggtacgggaaaaacactcttggcacgagccgttgctagccagctggactgcaatttcttaaaggtaaagggaagattattttgtacttattgaaatttaattttacttgaattatcttatatttaccttactgtttttcctttaatcaggttgtatctagttctattgtagacaagtacattggtgaaagtgctcgtttgatcagagaaatgtttaattatgctagagatcatcaaccatgcatcatttttatggatgaaatagatgctattggtggtcgtcggttttctgagggtacttcagctgacagagagattcagagaacgttaatggagttactgaatcaaatggatggatttgatactctgcatagagttaaaatgatcatggctacaaacagaccagatacactggatcctgctttgctgcgtccaggaagattagatagaaaaatacatattgatttgccaaatgaacaagcaagattagacatactgaaaatccatgcaggtcccattacaaagcatggtgaaatagattatgaagcaattgtgaagctttcggatggctttaatggagcagatctgagaaatgtttgtactgaagcaggtatgttcgcaattcgtgctgatcatgattttgtagtacaggaagacttcatgaaagcagtcagaaaagtggctgattctaagaagctggagtctaaattggactacaaacctgtgtaatttactgtaagatttttgatggctgcatgacagatgttggcttattgtaaaaataaagttaaagaaaataatgtatgtattggcaatgatgtcattaaaagtatatgaataaaaatatgagtaacatcataaaaattagtaattcaacttttaagatacagaagaaatttgtatgtttgttaaagttgcatttattgcagcaagttacaaagggaaagtgttgaagcttttcatatttgctgcgtgagcattttgtaaaatattgaaagtggtttgagatagtggtataagaaagcatttcttatgacttattttgtatcatttgttttcctcatctaaaaagttgaataaaatctgtttgattcagttctccta

SEQ ID NO: 332778 - DNA, 2144 bp, Homo sapiens
ggccattcccggcatcccctatgagagacggcttctcatcatggcggaccctagagataaggcgcttcaggactaccgcaagaagttgcttgaacacaaggagatcgacggccgtcttaaggagttaagggaacaattaaaagaacttaccaagcagtatgaaaagtctgaaaatgatctgaaggccctacagagtgttgggcagatcgtgggtgaagtgcttaaacagttaactgaagaaaaattcattgttaaagctaccaatggaccaagatatgttgtgggttgtcgtcgacagggctctgtggatgccgaaagttggcatttctaagatatttcaggttgcatgaggacaagactgtatttgaagactaaaaaacattagaaaagccgaagtatatataagttgagtatcccttatccaaaatgcttgagccagaaatgtgttttagatttggctttttttttttcaggttttagaatatttgtgttgtactggttgagcatccctaattaaaaaaaatcaaaagtttgaaatgctccgatgagcattttctttgagcatcatgtcagcattcaaaaaatttcacattgtggagcattttggattttcagattaagaatactcagcctgtatttcctatagatgtaaacattgaaatagcttcatattgatttctcctcttattttttcaagtaacctcacttcttagccgttttttccttaattgttatattaatcctagtgttttgcctatcttcctaaatttgaagctctttgtaaaatcctgtgacaagtggtcagtaatttatatgattccgaaattgtattggcacgcagttttttaaactattaaaaagtaacttgggtcgggcggggtggctcatgcctgtaatcccagcactttgggaggctgaggtgggcagatcacgaggtcaggagatcaagaccagcctgaccaacatggtgaaaccccgtctttactaaaaaatacaaaaaaaaattagccgggcatggtggcacacacctgtaatcccagctacttgaggctgaggcaggagaattgcctaaaccagggaggcagaggttgctgtgagccaagatggcgccactgcactccagcctgggcgacagagtgagactccgtactccatctcaaaaaaaaaagtaactttatctttggtaacaacatcctgagagtgaggcagatctagtagattctaattttagccagataagccaagaaattatttagtatgattcaacctaatgtgtaatgtgttcagcatgtgcctgtcatgtagcaaaggcatgagtgatggttgctgggttttggggctttaaatttaaagcattttaataaaaatctctaaggggaaaccgtgcatttttctctactctcatgagcatttaacacattcttcccagaagctgtacatttcaaaataaatctgatgagcacacctttaaaatgcttccctttcctttccctaaaatgttcactaagggatttttctataaatgctttggtagcaattcccaaagtcactgtaccattgctgcctcaagctttgtgtgttagtcatttcacattttacactgagattacacaaaggggcatgcttttaaggagcaggtggaaatcactttgaattacttattttataagccattttgttagcatagagtttataatctgatatttgtgttctctctggagggtaaaaatgagtgtttggcttctaaatattaaactctcgttagagtgttattccgtttttaagtgttgatgtaatatcttttgttttacaaaactagcttgacaaaagtaagctgaagccaggaacaagagttgctttggatatgactacactaactatcatgagatatttgccgagagaggtggatccactggtttataacatgtctcatgaggaccctgggaatgtttcttattctgagattggagggctatcagaacagatccgggaattaagagaggtgatagaattacctcttacaaacccagagttatttcagcgtgtaggaataatacctccaaaaggctgtttgttatatggaccaccaggttggtattgaattatttctactccaccaataagataaatgaattaaggaatta

SEQ ID NO: 332779 - DNA, 148 bp, Homo sapiens
cgcctactcggcaaacctcagccaccctcataaaagatggcacccaatgggtggggctggaacagaccattacatccaatgcaacccacagtcattcagctttgcctcgccccatctgccaccaatcaaccagaacagcgcctgcgcg

SEQ ID NO: 332780 - DNA, 749 bp, Homo sapiens
tcttctgtgtgggttctgtgctggtgtggttcttgccctggtgaattacatcttctttaaaggcaaatgggagagaccctttgaagtcaaggacaccgaggaagaggacttccacgtggaccaggtgaccaccgtgaaggtgcctatgatgaagcgtttaggcatgtttaacatccagcactgtaagaagctgtccagctgggtgctgctgatgaaatacctgggcaatgccaccgccatcttcttcctgcctgatgaggggaaactacagcacctggaaaatgaactcacccacgatatcatcaccaagttcctggaaaatgaagacagaaggtctgccagcttacatttacccaaactgtccattactggaacctatgatctgaagagcgtcctgggtcaactgggcatcactaaggtcttcagcaatggggctgacctctccggggtcacagaggaggcacccctgaagctctccaaggccgtgcataaggctgtgctgaccatcgacgagaaagggactgaagctgctggggccatgtttttagaggccatacccatgtctatcccccccgaggtcaagttcaacaaaccctttgtcttcttaatgattgaacaaaataccaagtctcccctcttcatgggaaaagtggtgaatcccacccaaaaataactgcctctcgctcctcaacccctcccctccatccctggccccctccctggatgacattaaagaagggttgagctgg

SEQ ID NO: 332781 - DNA, 146 bp, Homo sapiens
ggctaatcagctcggtacctttcaaagcatacatcccaccatgatcaggatcacccaaccttcaacaagatcacccccaacctggctgagttcgccttcagcctataccgccagctggcatctccgctttggaaaggtgccgagct

SEQ ID NO: 332782 - DNA, 573 bp, Homo sapiens
ggaaccggggaccacccggaaagtgtacatatgatcgacgcgaggcaatgagaatcacagccgctgaacaagcctgtcaagctgggacctgcatgattaaaagccttggccgaatgcagcgagccatcttcttcgtgcctgattaaggggcacctccaaccacctggaaaatgtactcacgccaattccttactggaacctatgatctgaagagcgtcctgggtcaactgggcatcactaaggtcttcagcaatggggctgacctctccggggtcacagaggaggcacccctgaagctctccaaggccgtgcataaggctgtgctgaccatcgacgagaaagggactgaagctgctggggccatgtttttagaggccatacccatgtctatcccccccgaggtcaagttcaacaaaccctttgtcttcttaatgattgaacaaaataccaagtctcccctcttcatgggaaaagtggtgaatcccacccaaaaataactgcctctcgctcctcaacccctcccctccatccctggccccctccctggatgacattaaagaagggttgagctgg

SEQ ID NO: 332783 - DNA, 2435 bp, Homo sapiens
  misc_feature (510)..(510): n is a, c, g, or t
  misc_feature (512)..(512): n is a, c, g, or t
  misc_feature (518)..(518): n is a, c, g, or t
  misc_feature (522)..(522): n is a, c, g, or t
  misc_feature (527)..(527): n is a, c, g, or t
  misc_feature (533)..(534): n is a, c, g, or t
  misc_feature (539)..(539): n is a, c, g, or t
  misc_feature (543)..(543): n is a, c, g, or t
  misc_feature (563)..(563): n is a, c, g, or t
  misc_feature (567)..(568): n is a, c, g, or t
  misc_feature (571)..(572): n is a, c, g, or t
  misc_feature (577)..(578): n is a, c, g, or t
  misc_feature (593)..(593): n is a, c, g, or t
  misc_feature (599)..(599): n is a, c, g, or t
  misc_feature (605)..(605): n is a, c, g, or t
  misc_feature (607)..(607): n is a, c, g, or t
  misc_feature (623)..(623): n is a, c, g, or t
  misc_feature (630)..(630): n is a, c, g, or t
  misc_feature (637)..(637): n is a, c, g, or t
  misc_feature (639)..(639): n is a, c, g, or t
  misc_feature (647)..(647): n is a, c, g, or t
  misc_feature (650)..(650): n is a, c, g, or t
  misc_feature (655)..(655): n is a, c, g, or t
  misc_feature (662)..(662): n is a, c, g, or t
  misc_feature (666)..(666): n is a, c, g, or t
  misc_feature (691)..(691): n is a, c, g, or t
  misc_feature (698)..(698): n is a, c, g, or t
  misc_feature (702)..(702): n is a, c, g, or t
  misc_feature (708)..(709): n is a, c, g, or t
  misc_feature (711)..(711): n is a, c, g, or t
  misc_feature (719)..(719): n is a, c, g, or t
  misc_feature (731)..(731): n is a, c, g, or t
  misc_feature (733)..(733): n is a, c, g, or t
  misc_feature (750)..(750): n is a, c, g, or t
  misc_feature (765)..(765): n is a, c, g, or t
ctttaccattcttccatggaagaagacaaaattcatctgagtgtagaaactaactatgctatggctcaggcccctctgggtatttctcctcaggaactgctcacctgtggggagagtgacttgtggtctgcttacccaaaataattcaatactcaaggctgggtggactctacagggcaatggtgtgactgaccagctctttcattgaagacatagaaagtacaagcagacccttctggcaggagctctaacatcaggcttccaatctagatttcatcagtaataaacattttggtttctatctcaggactcccaaatcgttcaattggacttgaactcagaagggaaactggatgttacttattgaactccaggtacacattatgtttcattaaaaaatatctatacaattatgacatcaagtagatgtcattggctactagaattatgtgggaaaacccttgtttgagtaagaggacttactatgtaaatatttttgaaaaagtggantnctggcngggngcagnggctcnngcctntaancccagcactttgggaggccnaggnnggnngatcnngaggtcaggagttcnagaccngcctgncnaacacggtgaaacccngctctantaaaaananaaaaattngcnaggcntggtggnacangcctgtaatcccagctatttgggangctgagncagnagaatnncntgaacccnggaggtggaggntncagtgagccgagatcangccactgcactccancctggactacaagagtgaaagcccgttctcaaaaaaaaaaaaaaaaaaaaaaaagtcctttcttcagtgaactctcatagggagggccaacagataaagtcagtaagagtgacactaacctggttaaggaagtgtgtggtttctcagagcacaccctgttctcatgctcctcccactcactgcccaatctttcctctccttcacttccaggctatctttagagaacttcagaatacaataatgaaaaccatgtctttgatcattaaacaccaaaaagtaactctgctactctcctcagcttcaggcaccaccactgacctgggacagtgaatcgacaatgccgtcttctgtctcgtggggcatcctcctgctggcaggcctgtgctgcctggtccctgtctccctggctgaggatccccagggagatgctgcccagaagacagatacatcccaccatgatcaggatcacccaaccttcaacaagatcacccccaacctggctgagttcgccttcagcctataccgccagctggcacaccagtccaacagcaccaatatcttcttctccccagtgagcatcgctacagcctttgcaatgctctccctggggaccaaggctgacactcacgatgaaatcctggagggcctgaatttcaacctcacggagattccggaggctcagatccatgaaggcttccaggaactcctccgtaccctcaaccagccagacagccagctccagctgaccaccggcaatggcctgttcctcagcgagggcctgaagctagtggataagtttttggaggatgttaaaaagttgtaccactcagaagccttcactgtcaacttcggggacaccgaagaggccaagaaacagatcaacgattacgtggagaagggtactcaagggaaaattgtggatttggtcaaggagcttgacagagacacagtttttgctctggtgaattacatcttctttaaaggcaaatgggagagaccctttgaagtcaaggacaccgaggaagaggacttccacgtggaccaggtgaccaccgtgaaggtgcctatgatgaagcgtttaggcatgtttaacatccagcactgtaagaagctgtccagctgggtgctgctgatgaaatacctgggcaatgccaccgccatcttcttcctgcctgatgaggggaaactacagcacctggaaaatgaactcacccacgatatcatcaccaagttcctggaaaatgaagacagaaggtctgccagcttacatttacccaaactgtccattactggaacctatgatctgaagagcgtcctgggtcaactgggcatcactaaggtcttcagcaatggggctgacctctccggggtcacagaggaggcacccctgaagctctccaaggccgtgcataaggctgtgctgaccatcgacgagaaagggactgaagctgctggggccatgtttttagaggccatacccatgtctatcccccccgaggtcaagttcaacaaaccctttgtcttcttaatgattgaacaaaataccaagtctcccctcttcatgggaaaagtggtgaatcccacccaaaaataactgcctctcgctcctcaacccctcccctccatccctggccccctccctggatgacattaaagaagggttgagctgg

SEQ ID NO: 332784 - DNA, 4065 bp, Homo sapiens
  misc_feature (510)..(510): n is a, c, g, or t
  misc_feature (512)..(512): n is a, c, g, or t
  misc_feature (518)..(518): n is a, c, g, or t
  misc_feature (522)..(522): n is a, c, g, or t
  misc_feature (527)..(527): n is a, c, g, or t
  misc_feature (533)..(534): n is a, c, g, or t
  misc_feature (539)..(539): n is a, c, g, or t
  misc_feature (543)..(543): n is a, c, g, or t
  misc_feature (563)..(563): n is a, c, g, or t
  misc_feature (567)..(568): n is a, c, g, or t
  misc_feature (571)..(572): n is a, c, g, or t
  misc_feature (577)..(578): n is a, c, g, or t
  misc_feature (593)..(593): n is a, c, g, or t
  misc_feature (599)..(599): n is a, c, g, or t
  misc_feature (605)..(605): n is a, c, g, or t
  misc_feature (607)..(607): n is a, c, g, or t
  misc_feature (623)..(623): n is a, c, g, or t
  misc_feature (630)..(630): n is a, c, g, or t
  misc_feature (637)..(637): n is a, c, g, or t
  misc_feature (639)..(639): n is a, c, g, or t
  misc_feature (647)..(647): n is a, c, g, or t
  misc_feature (650)..(650): n is a, c, g, or t
  misc_feature (655)..(655): n is a, c, g, or t
  misc_feature (662)..(662): n is a, c, g, or t
  misc_feature (666)..(666): n is a, c, g, or t
  misc_feature (691)..(691): n is a, c, g, or t
  misc_feature (698)..(698): n is a, c, g, or t
  misc_feature (702)..(702): n is a, c, g, or t
  misc_feature (708)..(709): n is a, c, g, or t
  misc_feature (711)..(711): n is a, c, g, or t
  misc_feature (719)..(719): n is a, c, g, or t
  misc_feature (731)..(731): n is a, c, g, or t
  misc_feature (733)..(733): n is a, c, g, or t
  misc_feature (750)..(750): n is a, c, g, or t
  misc_feature (765)..(765): n is a, c, g, or t
ctttaccattcttccatggaagaagacaaaattcatctgagtgtagaaactaactatgctatggctcaggcccctctgggtatttctcctcaggaactgctcacctgtggggagagtgacttgtggtctgcttacccaaaataattcaatactcaaggctgggtggactctacagggcaatggtgtgactgaccagctctttcattgaagacatagaaagtacaagcagacccttctggcaggagctctaacatcaggcttccaatctagatttcatcagtaataaacattttggtttctatctcaggactcccaaatcgttcaattggacttgaactcagaagggaaactggatgttacttattgaactccaggtacacattatgtttcattaaaaaatatctatacaattatgacatcaagtagatgtcattggctactagaattatgtgggaaaacccttgtttgagtaagaggacttactatgtaaatatttttgaaaaagtggantnctggcngggngcagnggctcnngcctntaancccagcactttgggaggccnaggnnggnngatcnngaggtcaggagttcnagaccngcctgncnaacacggtgaaacccngctctantaaaaananaaaaattngcnaggcntggtggnacangcctgtaatcccagctatttgggangctgagncagnagaatnncntgaacccnggaggtggaggntncagtgagccgagatcangccactgcactccancctggactacaagagtgaaagcccgttctcaaaaaaaaaaaaaaaaaaaaaaaagtcctttcttcagtgaactctcatagggagggccaacagataaagtcagtaagagtgacactaacctggttaaggaagtgtgtggtttctcagagcacaccctgttctcatgctcctcccactcactgcccaatctttcctctccttcacttccaggctatctttagagaacttcagaatacaataatgaaaaccatgtctttgatcattaaacaccaaaaagtaactctgctactctcctcagcttcaggcaccaccactgacctgggacagtgaatcgacaatgccgtcttctgtctcgtggggcatcctcctgctggcaggcctgtgctgcctggtccctgtctccctggctgaggatccccagggagatgctgcccagaagacagatacatcccaccatgatcaggatcacccaaccttcaacaagatcacccccaacctggctgagttcgccttcagcctataccgccagctggcacaccagtccaacagcaccaatatcttcttctccccagtgagcatcgctacagcctttgcaatgctctccctggggaccaaggctgacactcacgatgaaatcctggagggcctgaatttcaacctcacggagattccggaggctcagatccatgaaggcttccaggaactcctccgtaccctcaaccagccagacagccagctccagctgaccaccggcaatggcctgttcctcagcgagggcctgaagctagtggataagtttttggaggatgttaaaaagttgtaccactcagaagccttcactgtcaacttcggggacaccgaagaggccaagaaacagatcaacgattacgtggagaagggtactcaagggaaaattgtggatttggtcaaggagcttgacagagacacagtttttgctctggtgaattacatcttctttaaaggcaaatgggagagaccctttgaagtcaaggacaccgaggaagaggacttccacgtggaccaggtgaccaccgtgaaggtgcctatgatgaagcgtttaggcatgtttaacatccagcactgtaagaagctgtccagctgggtgctgctgatgaaatacctgggcaatgccaccgccatcttcttcctgcctgatgaggggaaactacagcacctggaaaatgaactcacccacgatatcatcaccaagttcctggaaaatgaagacagaaggtctgccagcttacatttacccaaactgtccattactggaacctatgatctgaagagcgtcctgggtcaactgggcatcactaaggtcttcagcaatggggctgacctctccggggtcacagaggaggcacccctgaagctctccaaggccgtgcataaggctgtgctgaccatcgacgagaaagggactgaagctgctggggccatgtttttagaggccatacccatgtctatcccccccgaggtcaagttcaacaaaccctttgtcttcttaatgattgaacaaaataccaagtctcccctcttcatgggaaaagtggtgaatcccacccaaaaataactgcctctcgctcctcaacccctcccctccatccctggccccctccctggatgacattaaagaagggttgagctggccctgcctgcatgtgactgtaaatccctcccatgttttctctgagtctccctttgcctgctgaggctgtatgtgggctccaggtaacagtgctgtcttcgggccccctgaactgtgttcatggagcatctggctgggtaggcacatgctgggcttgaatccaggggggactgaatcctcagcttacggacctgggcccatctgtttctggagggctccagtcttccttgtcctgtcttggagtccccaagaaggaatcacaggggaggaaccagataccagccatgaccccaggctccaccaagcatcttcatgtccccctgctcatcccccactcccccccacccagagttgctcatcctgccagggctggctgtgcccaccccaaggctgccctcctgggggccccagaactgcctgatcgtgccgtggcccagttttgtggcatctgcagcaacacaagagagaggacaatgtcctcctcttgacccgctgtcacctaaccagactcgggccctgcacctctcaggcacttctggaaaatgactgaggcagattcttcctgaagcccattctccatggggcaacaaggacacctattctgtccttgtccttccatcgctgccccagaaagcctcacatatctccgtttagaatcaggtcccttctccccagatgaagaggagggtctctgctttgttttctctatctcctcctcagacttgaccaggcccagcaggccccagaagaccattaccctatatcccttctcctccctagtcacatggccataggctggctgatggctcaggaaggccattgcaaggactcctcagctatgggagaggaagcacatcacccattgacccccgcaacccctccctttcctcctctgagtcccgactggggccacatgcagcctgacttctttgtgcctgttgctgtccctgcagtcttcagagggccaccgcagctccagtgccacggcaggaggctgttcctgaatagcccctgtggtaagggccaggagagtccttccatcctccaaggccctgctaaaggacacagcagccaggaagtcccctgggcccctagctgaaggacagcctgctccctccgtctctaccaggaatggccttgtcctatggaaggcactgccccatcccaaactaatctaggaatcactgtctaaccactcactgtcatgaatgtgtacttaaaggatgaggttgagtcataccaaatagtgatttcgatagttcaaaatggtgaaattagcaattctacatgattcagtctaatcaatggataccgactgtttcccacacaagtctcctgttctcttaagcttactcactgacagcctttcactctccacaaatacattaaagatatggccatcaccaagccccctaggatgacaccagacctgagagtctgaagacctggatccaagttctgacttttccccctgacagctgtgtgaccttcgtgaagtcgccaaacctctctgagccccagtcattgctagtaagacctgcctttgagttggtatgatgttcaagttagataacaaaatgtttatacccattagaacagagaataaatagaactacatttcttgcacttat

SEQ ID NO: 332785 - DNA, 4011 bp, Homo sapiens
  misc_feature (510)..(510): n is a, c, g, or t
  misc_feature (512)..(512): n is a, c, g, or t
  misc_feature (518)..(518): n is a, c, g, or t
  misc_feature (522)..(522): n is a, c, g, or t
  misc_feature (527)..(527): n is a, c, g, or t
  misc_feature (533)..(534): n is a, c, g, or t
  misc_feature (539)..(539): n is a, c, g, or t
  misc_feature (543)..(543): n is a, c, g, or t
  misc_feature (563)..(563): n is a, c, g, or t
  misc_feature (567)..(568): n is a, c, g, or t
  misc_feature (571)..(572): n is a, c, g, or t
  misc_feature (577)..(578): n is a, c, g, or t
  misc_feature (593)..(593): n is a, c, g, or t
  misc_feature (599)..(599): n is a, c, g, or t
  misc_feature (605)..(605): n is a, c, g, or t
  misc_feature (607)..(607): n is a, c, g, or t
  misc_feature (623)..(623): n is a, c, g, or t
  misc_feature (630)..(630): n is a, c, g, or t
  misc_feature (637)..(637): n is a, c, g, or t
  misc_feature (639)..(639): n is a, c, g, or t
  misc_feature (647)..(647): n is a, c, g, or t
  misc_feature (650)..(650): n is a, c, g, or t
  misc_feature (655)..(655): n is a, c, g, or t
  misc_feature (662)..(662): n is a, c, g, or t
  misc_feature (666)..(666): n is a, c, g, or t
  misc_feature (691)..(691): n is a, c, g, or t
  misc_feature (698)..(698): n is a, c, g, or t
  misc_feature (702)..(702): n is a, c, g, or t
  misc_feature (708)..(709): n is a, c, g, or t
  misc_feature (711)..(711): n is a, c, g, or t
  misc_feature (719)..(719): n is a, c, g, or t
  misc_feature (731)..(731): n is a, c, g, or t
  misc_feature (733)..(733): n is a, c, g, or t
  misc_feature (750)..(750): n is a, c, g, or t
  misc_feature (765)..(765): n is a, c, g, or t
ctttaccattcttccatggaagaagacaaaattcatctgagtgtagaaactaactatgctatggctcaggcccctctgggtatttctcctcaggaactgctcacctgtggggagagtgacttgtggtctgcttacccaaaataattcaatactcaaggctgggtggactctacagggcaatggtgtgactgaccagctctttcattgaagacatagaaagtacaagcagacccttctggcaggagctctaacatcaggcttccaatctagatttcatcagtaataaacattttggtttctatctcaggactcccaaatcgttcaattggacttgaactcagaagggaaactggatgttacttattgaactccaggtacacattatgtttcattaaaaaatatctatacaattatgacatcaagtagatgtcattggctactagaattatgtgggaaaacccttgtttgagtaagaggacttactatgtaaatatttttgaaaaagtggantnctggcngggngcagnggctcnngcctntaancccagcactttgggaggccnaggnnggnngatcnngaggtcaggagttcnagaccngcctgncnaacacggtgaaacccngctctantaaaaananaaaaattngcnaggcntggtggnacangcctgtaatcccagctatttgggangctgagncagnagaatnncntgaacccnggaggtggaggntncagtgagccgagatcangccactgcactccancctggactacaagagtgaaagcccgttctcaaaaaaaaaaaaaaaaaaaaaaaagtcctttcttcagtgaactctcatagggagggccaacagataaagtcagtaagagtgacactaacctggttaaggaagtgtgtggtttctcagagcacaccctgttctcatgctcctcccactcactgcccaatctttcctctccttcacttccaggctatctttagagaacttcagaatacaataatgaaaaccatgtctttgatcattaaacaccaaaaagtaactctgctactctcctcagcttcaggcaccaccactgacctgggacagtgaatcgacaatgccgtcttctgtctcgtggggcatcctcctgctggcaggcctgtgctgcctggtccctgtctccctggctgaggatccccagggagatgctgcccagaagacagatacatcccaccatgatcaggatcacccaaccttcaacaagatcacccccaacctggctgagttcgccttcagcctataccgccagctggcacaccagtccaacagcaccaatatcttcttctccccagtgagcatcgctacagcctttgcaatgctctccctggggaccaaggctgacactcacgatgaaatcctggagggcctgaatttcaacctcacggagattccggaggctcagatccatgaaggcttccaggaactcctccgtaccctcaaccagccagacagccagctccagctgaccaccggcaatggcctgttcctcagcgagggcctgaagctagtggataagtttttggaggatgttaaaaagttgtaccactcagaagccttcactgtcaacttcggggacaccgaagaggccaagaaacagatcaacgattacgtggagaagggtactcaagggaaaattgtggatttggtcaaggagcttgacagagacacagtttttgctctggtgaattacatcttctttaaaggcaaatgggagagaccctttgaagtcaaggacaccgaggaagaggacttccacgtggaccaggtgaccaccgtgaaggtgcctatgatgaagcgtttaggcatgtttaacatccagcactgtaagaagctgtccagctgggtgctgctgatgaaatacctgggcaatgccaccgccatcttcttcctgcctgatgaggggaaactacagcacctggaaaatgaactcacccacgatatcatcaccaagttcctggaaaatgaagacagaaggtctgccagcttacatttacccaaactgtccattactggaacctatgatctgaagagcgtcctgggtcaactgggcatcactaaggtcttcagcaatggggctgacctctccggggtcacagaggaggcacccctgaagctctccaaggccgtgcataaggctgtgctgaccatcgacgagaaagggactgaagctgctggggccatgtttttagaggccatacccatgtctatcccccccgaggtcaagttcaacaaaccctttgtcttcttaatgattgaacaaaataccaagtctcccctcttcatgggaaaagtggtgaatcccacccaaaaataactgcctctcgctcctcaacccctcccctccatccctggccccctccctggatgacattaaagaagggttgagctggccctgcctgcatgtgactgtaaatccctcccatgttttctctgagtctccctttgcctgctgaggctgtatgtgggctccaggtaacagtgctgtcttcgggccccctgaactgtgttcatggagcatctggctgggtaggcacatgctgggcttgaatccaggggggactgaatcctcagcttacggacctgggcccatctgtttctggagggctccagtcttccttgtcctgtcttggagtccccaagaaggaatcacaggggaggaaccagataccagccatgaccccaggctccaccaagcatcttcatgtccccctgctcatcccccactcccccccacccagagttgctcatcctgccagggctggctgtgcccaccccaaggctgccctcctgggggccccagaactgcctgatcgtgccgtggcccagttttgtggcatctgcagcaacacaagagagaggacaatgtcctcctcttgacccgctgtcacctaaccagactcgggccctgcacctctcaggcacttctggcacctattctgtccttgtccttccatcgctgccccagaaagcctcacatatctccgtttagaatcaggtcccttctccccagatgaagaggagggtctctgctttgttttctctatctcctcctcagacttgaccaggcccagcaggccccagaagaccattaccctatatcccttctcctccctagtcacatggccataggctggctgatggctcaggaaggccattgcaaggactcctcagctatgggagaggaagcacatcacccattgacccccgcaacccctccctttcctcctctgagtcccgactggggccacatgcagcctgacttctttgtgcctgttgctgtccctgcagtcttcagagggccaccgcagctccagtgccacggcaggaggctgttcctgaatagcccctgtggtaagggccaggagagtccttccatcctccaaggccctgctaaaggacacagcagccaggaagtcccctgggcccctagctgaaggacagcctgctccctccgtctctaccaggaatggccttgtcctatggaaggcactgccccatcccaaactaatctaggaatcactgtctaaccactcactgtcatgaatgtgtacttaaaggatgaggttgagtcataccaaatagtgatttcgatagttcaaaatggtgaaattagcaattctacatgattcagtctaatcaatggataccgactgtttcccacacaagtctcctgttctcttaagcttactcactgacagcctttcactctccacaaatacattaaagatatggccatcaccaagccccctaggatgacaccagacctgagagtctgaagacctggatccaagttctgacttttccccctgacagctgtgtgaccttcgtgaagtcgccaaacctctctgagccccagtcattgctagtaagacctgcctttgagttggtatgatgttcaagttagataacaaaatgtttatacccattagaacagagaataaatagaactacatttcttgcacttat

SEQ ID NO: 332786 - DNA, 3090 bp, Homo sapiens
  misc_feature (510)..(510): n is a, c, g, or t
  misc_feature (512)..(512): n is a, c, g, or t
  misc_feature (518)..(518): n is a, c, g, or t
  misc_feature (522)..(522): n is a, c, g, or t
  misc_feature (527)..(527): n is a, c, g, or t
  misc_feature (533)..(534): n is a, c, g, or t
  misc_feature (539)..(539): n is a, c, g, or t
  misc_feature (543)..(543): n is a, c, g, or t
  misc_feature (563)..(563): n is a, c, g, or t
  misc_feature (567)..(568): n is a, c, g, or t
  misc_feature (571)..(572): n is a, c, g, or t
  misc_feature (577)..(578): n is a, c, g, or t
  misc_feature (593)..(593): n is a, c, g, or t
  misc_feature (599)..(599): n is a, c, g, or t
  misc_feature (605)..(605): n is a, c, g, or t
  misc_feature (607)..(607): n is a, c, g, or t
  misc_feature (623)..(623): n is a, c, g, or t
  misc_feature (630)..(630): n is a, c, g, or t
  misc_feature (637)..(637): n is a, c, g, or t
  misc_feature (639)..(639): n is a, c, g, or t
  misc_feature (647)..(647): n is a, c, g, or t
  misc_feature (650)..(650): n is a, c, g, or t
  misc_feature (655)..(655): n is a, c, g, or t
  misc_feature (662)..(662): n is a, c, g, or t
  misc_feature (666)..(666): n is a, c, g, or t
  misc_feature (691)..(691): n is a, c, g, or t
  misc_feature (698)..(698): n is a, c, g, or t
  misc_feature (702)..(702): n is a, c, g, or t
  misc_feature (708)..(709): n is a, c, g, or t
  misc_feature (711)..(711): n is a, c, g, or t
  misc_feature (719)..(719): n is a, c, g, or t
  misc_feature (731)..(731): n is a, c, g, or t
  misc_feature (733)..(733): n is a, c, g, or t
  misc_feature (750)..(750): n is a, c, g, or t
  misc_feature (765)..(765): n is a, c, g, or t
ctttaccattcttccatggaagaagacaaaattcatctgagtgtagaaactaactatgctatggctcaggcccctctgggtatttctcctcaggaactgctcacctgtggggagagtgacttgtggtctgcttacccaaaataattcaatactcaaggctgggtggactctacagggcaatggtgtgactgaccagctctttcattgaagacatagaaagtacaagcagacccttctggcaggagctctaacatcaggcttccaatctagatttcatcagtaataaacattttggtttctatctcaggactcccaaatcgttcaattggacttgaactcagaagggaaactggatgttacttattgaactccaggtacacattatgtttcattaaaaaatatctatacaattatgacatcaagtagatgtcattggctactagaattatgtgggaaaacccttgtttgagtaagaggacttactatgtaaatatttttgaaaaagtggantnctggcngggngcagnggctcnngcctntaancccagcactttgggaggccnaggnnggnngatcnngaggtcaggagttcnagaccngcctgncnaacacggtgaaacccngctctantaaaaananaaaaattngcnaggcntggtggnacangcctgtaatcccagctatttgggangctgagncagnagaatnncntgaacccnggaggtggaggntncagtgagccgagatcangccactgcactccancctggactacaagagtgaaagcccgttctcaaaaaaaaaaaaaaaaaaaaaaaagtcctttcttcagtgaactctcatagggagggccaacagataaagtcagtaagagtgacactaacctggttaaggaagtgtgtggtttctcagagcacaccctgttctcatgctcctcccactcactgcccaatctttcctctccttcacttccaggctatctttagagaacttcagaatacaataatgaaaaccatgtctttgatcattaaacaccaaaaagtaactctgctactctcctcagcttcaggcaccaccactgacctgggacagtgaatcgacaatgccgtcttctgtctcgtggggcatcctcctgctggcaggcctgtgctgcctggtccctgtctccctggctgaggatccccagggagatgctgcccagaagacagatacatcccaccatgatcaggatcacccaaccttcaacaagatcacccccaacctggctgagttcgccttcagcctataccgccagctggcacaccagtccaacagcaccaatatcttcttctccccagtgagcatcgctacagcctttgcaatgctctccctggggaccaaggctgacactcacgatgaaatcctggagggcctgaatttcaacctcacggagattccggaggctcagatccatgaaggcttccaggaactcctccgtaccctcaaccagccagacagccagctccagctgaccaccggcaatggcctgttcctcagcgagggcctgaagctagtggataagtttttggaggatgttaaaaagttgtaccactcagaagccttcactgtcaacttcggggacaccgaagaggccaagaaacagatcaacgattacgtggagaagggtactcaagggaaaattgtggatttggtcaaggagcttgacagagacacagtttttgctctggtgaattacatcttctttaaaggcaaatgggagagaccctttgaagtcaaggacaccgaggaagaggacttccacgtggaccaggtgaccaccgtgaaggtgcctatgatgaagcgtttaggcatgtttaacatccagcactgtaagaagctgtccagctgggtgctgctgatgaaatacctgggcaatgccaccgccatcttcttcctgcctgatgaggggaaactacagcacctggaaaatgaactcacccacgatatcatcaccaagttcctggaaaatgaagacagaaggtctgccagcttacatttacccaaactgtccattactggaacctatgatctgaagagcgtcctgggtcaactgggcatcactaaggtcttcagcaatggggctgacctctccggggtcacagaggaggcacccctgaagctctccaaggccgtgcataaggctgtgctgaccatcgacgagaaagggactgaagctgctggggccatgtttttagaggccatacccatgtctatcccccccgaggtcaagttcaacaaaccctttgtcttcttaatgattgaacaaaataccaagtctcccctcttcatgggaaaagtggtgaatcccacccaaaaataactgcctctcgctcctcaacccctcccctccatccctggccccctccctggatgacattaaagaagggttgagctggaaaaaaaaaaaaaaaaaacggagaaaagaagaaaccaacaagaagaagaaagaaaaagcagaagaagaaaagacaacaaaaaaacaagaaacaagcaaaaaacaaacacgggtggggggccggcggccgcgcacaagacatgacatcaacccacagtgggggggccgcgcgcaccacacatggaaaacacagacagcgacaacaagagcacacagacagagcccggcgcgaaaaacaacgagggagagagcaacgcccaaaaacaaaagcccggagagaaacacaagagtgagaaaaaacacacagaggggatattaagaagaacaacaggaggagaaacaaacgaagcggagatacgcaaacgcaagcaaaataaaataccgcccccagacagaggaagacagcaaaaagacaaagaaaaagcaacagacgcaaacacaaagcaacaaaagacgacgaaaagtagcggaagaaaaaaacagaaagaagaagggagcggaacgagaaagcagtgagacgtagagaaagacagaaggcgaggagagagaaaggagaaagagaaagaccgaagaaagaaaggcaagcagaagcgagacaaacgaggagacaggaaagagagaaggacagaaggacgacagagacaaagcaaaaaaga

SEQ ID NO: 332787 - DNA, 2807 bp, Homo sapiens
  misc_feature (510)..(510): n is a, c, g, or t
  misc_feature (512)..(512): n is a, c, g, or t
  misc_feature (518)..(518): n is a, c, g, or t
  misc_feature (522)..(522): n is a, c, g, or t
  misc_feature (527)..(527): n is a, c, g, or t
  misc_feature (533)..(534): n is a, c, g, or t
  misc_feature (539)..(539): n is a, c, g, or t
  misc_feature (543)..(543): n is a, c, g, or t
  misc_feature (563)..(563): n is a, c, g, or t
  misc_feature (567)..(568): n is a, c, g, or t
  misc_feature (571)..(572): n is a, c, g, or t
  misc_feature (577)..(578): n is a, c, g, or t
  misc_feature (593)..(593): n is a, c, g, or t
  misc_feature (599)..(599): n is a, c, g, or t
  misc_feature (605)..(605): n is a, c, g, or t
  misc_feature (607)..(607): n is a, c, g, or t
  misc_feature (623)..(623): n is a, c, g, or t
  misc_feature (630)..(630): n is a, c, g, or t
  misc_feature (637)..(637): n is a, c, g, or t
  misc_feature (639)..(639): n is a, c, g, or t
  misc_feature (647)..(647): n is a, c, g, or t
  misc_feature (650)..(650): n is a, c, g, or t
  misc_feature (655)..(655): n is a, c, g, or t
  misc_feature (662)..(662): n is a, c, g, or t
  misc_feature (666)..(666): n is a, c, g, or t
  misc_feature (691)..(691): n is a, c, g, or t
  misc_feature (698)..(698): n is a, c, g, or t
  misc_feature (702)..(702): n is a, c, g, or t
  misc_feature (708)..(709): n is a, c, g, or t
  misc_feature (711)..(711): n is a, c, g, or t
  misc_feature (719)..(719): n is a, c, g, or t
  misc_feature (731)..(731): n is a, c, g, or t
  misc_feature (733)..(733): n is a, c, g, or t
  misc_feature (750)..(750): n is a, c, g, or t
  misc_feature (765)..(765): n is a, c, g, or t
  misc_feature (2576)..(2576): n is a, c, g, or t
ctttaccattcttccatggaagaagacaaaattcatctgagtgtagaaactaactatgctatggctcaggcccctctgggtatttctcctcaggaactgctcacctgtggggagagtgacttgtggtctgcttacccaaaataattcaatactcaaggctgggtggactctacagggcaatggtgtgactgaccagctctttcattgaagacatagaaagtacaagcagacccttctggcaggagctctaacatcaggcttccaatctagatttcatcagtaataaacattttggtttctatctcaggactcccaaatcgttcaattggacttgaactcagaagggaaactggatgttacttattgaactccaggtacacattatgtttcattaaaaaatatctatacaattatgacatcaagtagatgtcattggctactagaattatgtgggaaaacccttgtttgagtaagaggacttactatgtaaatatttttgaaaaagtggantnctggcngggngcagnggctcnngcctntaancccagcactttgggaggccnaggnnggnngatcnngaggtcaggagttcnagaccngcctgncnaacacggtgaaacccngctctantaaaaananaaaaattngcnaggcntggtggnacangcctgtaatcccagctatttgggangctgagncagnagaatnncntgaacccnggaggtggaggntncagtgagccgagatcangccactgcactccancctggactacaagagtgaaagcccgttctcaaaaaaaaaaaaaaaaaaaaaaaagtcctttcttcagtgaactctcatagggagggccaacagataaagtcagtaagagtgacactaacctggttaaggaagtgtgtggtttctcagagcacaccctgttctcatgctcctcccactcactgcccaatctttcctctccttcacttccaggctatctttagagaacttcagaatacaataatgaaaaccatgtctttgatcattaaacaccaaaaagtaactctgctactctcctcagcttcaggcaccaccactgacctgggacagtgaatcgacaatgccgtcttctgtctcgtggggcatcctcctgctggcaggcctgtgctgcctggtccctgtctccctggctgaggatccccagggagatgctgcccagaagacagatacatcccaccatgatcaggatcacccaaccttcaacaagatcacccccaacctggctgagttcgccttcagcctataccgccagctggcacaccagtccaacagcaccaatatcttcttctccccagtgagcatcgctacagcctttgcaatgctctccctggggaccaaggctgacactcacgatgaaatcctggagggcctgaatttcaacctcacggagattccggaggctcagatccatgaaggcttccaggaactcctccgtaccctcaaccagccagacagccagctccagctgaccaccggcaatggcctgttcctcagcgagggcctgaagctagtggataagtttttggaggatgttaaaaagttgtaccactcagaagccttcactgtcaacttcggggacaccgaagaggccaagaaacagatcaacgattacgtggagaagggtactcaagggaaaattgtggatttggtcaaggagcttgacagagacacagtttttgctctggtgaattacatcttctttaaaggcaaatgggagagaccctttgaagtcaaggacaccgaggaagaggacttccacgtggaccaggtgaccaccgtgaaggtgcctatgatgaagcgtttaggcatgtttaacatccagcactgtaagaagctgtccagctgggtgctgctgatgaaatacctgggcaatgccaccgccatcttcttcctgcctgatgaggggaaactacagcacctggaaaatgaactcacccacgatatcatcaccaagttcctggaaaatgaagacagaaggtctgccagcttacatttacccaaactgtccattactggaacctatgatctgaagagcgtcctgggtcaactgggcatcactaaggtcttcagcaatggggctgacctctccggggtcacagaggaggcacccctgaagctctccaaggccgtgcataaggctgtgctgaccatcgacgagaaagggactgaagctgctggggccatgtttttagaggccatacccatgtctatcccccccgaggtcaagttcaacaaaccctttgtcttcttaatgattgaacaaaataccaagtctcccctcttcatgggaaaagtggtgaatcccacccaaaaataactgcctctcgctcctcaacccctcccctccatccctggccccctccctggatgacattaaagaagggttgagctggaaaaaaaaaaaaaaaaaaaaaaaaaaaaaaaaaaaaaaaaaaaaaaaaaaaaaaaaaaaaaaaaaaaaacctcgaaactgggggaaaagccccatttttttttagatgagactgggaatagaaatatccaaacaaccttgngggggcttggtcaaatccgggaaaaccggaaaagcaaaatccaaaggttagaatctgatgtctaagctgggaatattgccgcaccccatgcactgccagtggcaatattcctgggggggtctggcaaagattggtgaggaaattatcaggaaaggaggggaaccttctgaaaggtttctaattaaccggacagttctgcaaacccgcaagagggagtgtggctttgcgtgg

SEQ ID NO: 332788 - DNA, 2706 bp, Homo sapiens
  misc_feature (510)..(510): n is a, c, g, or t
  misc_feature (512)..(512): n is a, c, g, or t
  misc_feature (518)..(518): n is a, c, g, or t
  misc_feature (522)..(522): n is a, c, g, or t
  misc_feature (527)..(527): n is a, c, g, or t
  misc_feature (533)..(534): n is a, c, g, or t
  misc_feature (539)..(539): n is a, c, g, or t
  misc_feature (543)..(543): n is a, c, g, or t
  misc_feature (563)..(563): n is a, c, g, or t
  misc_feature (567)..(568): n is a, c, g, or t
  misc_feature (571)..(572): n is a, c, g, or t
  misc_feature (577)..(578): n is a, c, g, or t
  misc_feature (593)..(593): n is a, c, g, or t
  misc_feature (599)..(599): n is a, c, g, or t
  misc_feature (605)..(605): n is a, c, g, or t
  misc_feature (607)..(607): n is a, c, g, or t
  misc_feature (623)..(623): n is a, c, g, or t
  misc_feature (630)..(630): n is a, c, g, or t
  misc_feature (637)..(637): n is a, c, g, or t
  misc_feature (639)..(639): n is a, c, g, or t
  misc_feature (647)..(647): n is a, c, g, or t
  misc_feature (650)..(650): n is a, c, g, or t
  misc_feature (655)..(655): n is a, c, g, or t
  misc_feature (662)..(662): n is a, c, g, or t
  misc_feature (666)..(666): n is a, c, g, or t
  misc_feature (691)..(691): n is a, c, g, or t
  misc_feature (698)..(698): n is a, c, g, or t
  misc_feature (702)..(702): n is a, c, g, or t
  misc_feature (708)..(709): n is a, c, g, or t
  misc_feature (711)..(711): n is a, c, g, or t
  misc_feature (719)..(719): n is a, c, g, or t
  misc_feature (731)..(731): n is a, c, g, or t
  misc_feature (733)..(733): n is a, c, g, or t
  misc_feature (750)..(750): n is a, c, g, or t
  misc_feature (765)..(765): n is a, c, g, or t
ctttaccattcttccatggaagaagacaaaattcatctgagtgtagaaactaactatgctatggctcaggcccctctgggtatttctcctcaggaactgctcacctgtggggagagtgacttgtggtctgcttacccaaaataattcaatactcaaggctgggtggactctacagggcaatggtgtgactgaccagctctttcattgaagacatagaaagtacaagcagacccttctggcaggagctctaacatcaggcttccaatctagatttcatcagtaataaacattttggtttctatctcaggactcccaaatcgttcaattggacttgaactcagaagggaaactggatgttacttattgaactccaggtacacattatgtttcattaaaaaatatctatacaattatgacatcaagtagatgtcattggctactagaattatgtgggaaaacccttgtttgagtaagaggacttactatgtaaatatttttgaaaaagtggantnctggcngggngcagnggctcnngcctntaancccagcactttgggaggccnaggnnggnngatcnngaggtcaggagttcnagaccngcctgncnaacacggtgaaacccngctctantaaaaananaaaaattngcnaggcntggtggnacangcctgtaatcccagctatttgggangctgagncagnagaatnncntgaacccnggaggtggaggntncagtgagccgagatcangccactgcactccancctggactacaagagtgaaagcccgttctcaaaaaaaaaaaaaaaaaaaaaaaagtcctttcttcagtgaactctcatagggagggccaacagataaagtcagtaagagtgacactaacctggttaaggaagtgtgtggtttctcagagcacaccctgttctcatgctcctcccactcactgcccaatctttcctctccttcacttccaggctatctttagagaacttcagaatacaataatgaaaaccatgtctttgatcattaaacaccaaaaagtaactctgctactctcctcagcttcaggcaccaccactgacctgggacagtgaatcgacaatgccgtcttctgtctcgtggggcatcctcctgctggcaggcctgtgctgcctggtccctgtctccctggctgaggatccccagggagatgctgcccagaagacagatacatcccaccatgatcaggatcacccaaccttcaacaagatcacccccaacctggctgagttcgccttcagcctataccgccagctggcacaccagtccaacagcaccaatatcttcttctccccagtgagcatcgctacagcctttgcaatgctctccctggggaccaaggctgacactcacgatgaaatcctggagggcctgaatttcaacctcacggagattccggaggctcagatccatgaaggcttccaggaactcctccgtaccctcaaccagccagacagccagctccagctgaccaccggcaatggcctgttcctcagcgagggcctgaagctagtggataagtttttggaggatgttaaaaagttgtaccactcagaagccttcactgtcaacttcggggacaccgaagaggccaagaaacagatcaacgattacgtggagaagggtactcaagggaaaattgtggatttggtcaaggagcttgacagagacacagtttttgctctggtgaattacatcttctttaaaggcaaatgggagagaccctttgaagtcaaggacaccgaggaagaggacttccacgtggaccaggtgaccaccgtgaaggtgcctatgatgaagcgtttaggcatgtttaacatccagcactgtaagaagctgtccagctgggtgctgctgatgaaatacctgggcaatgccaccgccatcttcttcctgcctgatgaggggaaactacagcacctggaaaatgaactcacccacgatatcatcaccaagttcctggaaaatgaagacagaaggtctgccagcttacatttacccaaactgtccattactggaacctatgatctgaagagcgtcctgggtcaactgggcatcactaaggtcttcagcaatggggctgacctctccggggtcacagaggaggcacccctgaagctctccaaggccgtgcataaggctgtgctgaccatcgacgagaaagggactgaagctgctggggccatgtttttagaggccatacccatgtctatcccccccgaggtcaagttcaacaaaccctttgtcttcttaatgattgaacaaaataccaagtctcccctcttcatgggaaaagtggtgaatcccacccaaaaataactgcctctcgctcctcaacccctcccctccatccctggccccctccctggatgacattaaagaagggttgagctggaaaaaaaaaaaagctaatagaaactataattatggacgaaagactgttcaggtgataaaagactgatgaaagacatccctaactggtagtcaggacgcaggattcatcattgcgaacaagggctcatgaaaagtacaggaggttccctaatcagggatcggcttgaaaaggccttgtctaactgtgtcgtgaaattaagtaattgtgagtgcctttaggctgatcatgggccctgccagatttccccccattcgtgtcccattgtgggctt

SEQ ID NO: 332789 - DNA, 2315 bp, Homo sapiens
  misc_feature (510)..(510): n is a, c, g, or t
  misc_feature (512)..(512): n is a, c, g, or t
  misc_feature (518)..(518): n is a, c, g, or t
  misc_feature (522)..(522): n is a, c, g, or t
  misc_feature (527)..(527): n is a, c, g, or t
  misc_feature (533)..(534): n is a, c, g, or t
  misc_feature (539)..(539): n is a, c, g, or t
  misc_feature (543)..(543): n is a, c, g, or t
  misc_feature (563)..(563): n is a, c, g, or t
  misc_feature (567)..(568): n is a, c, g, or t
  misc_feature (571)..(572): n is a, c, g, or t
  misc_feature (577)..(578): n is a, c, g, or t
  misc_feature (593)..(593): n is a, c, g, or t
  misc_feature (599)..(599): n is a, c, g, or t
  misc_feature (605)..(605): n is a, c, g, or t
  misc_feature (607)..(607): n is a, c, g, or t
  misc_feature (623)..(623): n is a, c, g, or t
  misc_feature (630)..(630): n is a, c, g, or t
  misc_feature (637)..(637): n is a, c, g, or t
  misc_feature (639)..(639): n is a, c, g, or t
  misc_feature (647)..(647): n is a, c, g, or t
  misc_feature (650)..(650): n is a, c, g, or t
  misc_feature (655)..(655): n is a, c, g, or t
  misc_feature (662)..(662): n is a, c, g, or t
  misc_feature (666)..(666): n is a, c, g, or t
  misc_feature (691)..(691): n is a, c, g, or t
  misc_feature (698)..(698): n is a, c, g, or t
  misc_feature (702)..(702): n is a, c, g, or t
  misc_feature (708)..(709): n is a, c, g, or t
  misc_feature (711)..(711): n is a, c, g, or t
  misc_feature (719)..(719): n is a, c, g, or t
  misc_feature (731)..(731): n is a, c, g, or t
  misc_feature (733)..(733): n is a, c, g, or t
  misc_feature (750)..(750): n is a, c, g, or t
  misc_feature (765)..(765): n is a, c, g, or t
ctttaccattcttccatggaagaagacaaaattcatctgagtgtagaaactaactatgctatggctcaggcccctctgggtatttctcctcaggaactgctcacctgtggggagagtgacttgtggtctgcttacccaaaataattcaatactcaaggctgggtggactctacagggcaatggtgtgactgaccagctctttcattgaagacatagaaagtacaagcagacccttctggcaggagctctaacatcaggcttccaatctagatttcatcagtaataaacattttggtttctatctcaggactcccaaatcgttcaattggacttgaactcagaagggaaactggatgttacttattgaactccaggtacacattatgtttcattaaaaaatatctatacaattatgacatcaagtagatgtcattggctactagaattatgtgggaaaacccttgtttgagtaagaggacttactatgtaaatatttttgaaaaagtggantnctggcngggngcagnggctcnngcctntaancccagcactttgggaggccnaggnnggnngatcnngaggtcaggagttcnagaccngcctgncnaacacggtgaaacccngctctantaaaaananaaaaattngcnaggcntggtggnacangcctgtaatcccagctatttgggangctgagncagnagaatnncntgaacccnggaggtggaggntncagtgagccgagatcangccactgcactccancctggactacaagagtgaaagcccgttctcaaaaaaaaaaaaaaaaaaaaaaaagtcctttcttcagtgaactctcatagggagggccaacagataaagtcagtaagagtgacactaacctggttaaggaagtgtgtggtttctcagagcacaccctgttctcatgctcctcccactcactgcccaatctttcctctccttcacttccaggctatctttagagaacttcagaatacaataatgaaaaccatgtctttgatcattaaacaccaaaaagtaactctgctactctcctcagcttcaggcaccaccactgacctgggacagtgaatcgacaatgccgtcttctgtctcgtggggcatcctcctgctggcaggcctgtgctgcctggtccctgtctccctggctgaggatccccagggagatgctgcccagaagacagatacatcccaccatgatcaggatcacccaaccttcaacaagatcacccccaacctggctgagttcgccttcagcctataccgccagctggcacaccagtccaacagcaccaatatcttcttctccccagtgagcatcgctacagcctttgcaatgctctccctggggaccaaggctgacactcacgatgaaatcctggagggcctgaatttcaacctcacggagattccggaggctcagatccatgaaggcttccaggaactcctccgtaccctcaaccagccagacagccagctccagctgaccaccggcaatggcctgttcctcagcgagggcctgaagctagtggataagtttttggaggatgttaaaaagttgtaccactcagaagccttcactgtcaacttcggggacaccgaagaggccaagaaacagatcaacgattacgtggagaagggtactcaagggaaaattgtggatttggtcaaggagcttgacagagacacagtttttgctctggtgaattacatcttctttaaaggcaaatgggagagaccctttgaagtcaaggacaccgaggaagaggacttccacgtggaccaggtgaccaccgtgaaggtgcctatgatgaagcgtttaggcatgtttaacatccagcactgtaagaagctgtccagctgggtgctgctgatgaaatacctgggcaatgccaccgccatcttcttcctgcctgatgaggggaaactacagcacctggaaaatgaactcacccacgatatcatcaccaagttcctggaaaatgaagacagaaggtctgccagcttacatttacccaaactgtccattactggaacctatgatctgaagagcgtcctgggtcaactgggcatcactaaggtcttcagcaatggggctgacctctccggggtcacagaggaggcacccctgaagctctccaaggccgtgcataaggctgtgctgaccatcgacgagaaagggactgaagctgctggggccatgtttttagaggccatacccatgtctatcccccccgaggtcaccatccctggccccctccctggatgacattaaagaagggttgagctgg

SEQ ID NO: 332790 - DNA, 2403 bp, Homo sapiens
  misc_feature (510)..(510): n is a, c, g, or t
  misc_feature (512)..(512): n is a, c, g, or t
  misc_feature (518)..(518): n is a, c, g, or t
  misc_feature (522)..(522): n is a, c, g, or t
  misc_feature (527)..(527): n is a, c, g, or t
  misc_feature (533)..(534): n is a, c, g, or t
  misc_feature (539)..(539): n is a, c, g, or t
  misc_feature (543)..(543): n is a, c, g, or t
  misc_feature (563)..(563): n is a, c, g, or t
  misc_feature (567)..(568): n is a, c, g, or t
  misc_feature (571)..(572): n is a, c, g, or t
  misc_feature (577)..(578): n is a, c, g, or t
  misc_feature (593)..(593): n is a, c, g, or t
  misc_feature (599)..(599): n is a, c, g, or t
  misc_feature (605)..(605): n is a, c, g, or t
  misc_feature (607)..(607): n is a, c, g, or t
  misc_feature (623)..(623): n is a, c, g, or t
  misc_feature (630)..(630): n is a, c, g, or t
  misc_feature (637)..(637): n is a, c, g, or t
  misc_feature (639)..(639): n is a, c, g, or t
  misc_feature (647)..(647): n is a, c, g, or t
  misc_feature (650)..(650): n is a, c, g, or t
  misc_feature (655)..(655): n is a, c, g, or t
  misc_feature (662)..(662): n is a, c, g, or t
  misc_feature (666)..(666): n is a, c, g, or t
  misc_feature (691)..(691): n is a, c, g, or t
  misc_feature (698)..(698): n is a, c, g, or t
  misc_feature (702)..(702): n is a, c, g, or t
  misc_feature (708)..(709): n is a, c, g, or t
  misc_feature (711)..(711): n is a, c, g, or t
  misc_feature (719)..(719): n is a, c, g, or t
  misc_feature (731)..(731): n is a, c, g, or t
  misc_feature (733)..(733): n is a, c, g, or t
  misc_feature (750)..(750): n is a, c, g, or t
  misc_feature (765)..(765): n is a, c, g, or t
ctttaccattcttccatggaagaagacaaaattcatctgagtgtagaaactaactatgctatggctcaggcccctctgggtatttctcctcaggaactgctcacctgtggggagagtgacttgtggtctgcttacccaaaataattcaatactcaaggctgggtggactctacagggcaatggtgtgactgaccagctctttcattgaagacatagaaagtacaagcagacccttctggcaggagctctaacatcaggcttccaatctagatttcatcagtaataaacattttggtttctatctcaggactcccaaatcgttcaattggacttgaactcagaagggaaactggatgttacttattgaactccaggtacacattatgtttcattaaaaaatatctatacaattatgacatcaagtagatgtcattggctactagaattatgtgggaaaacccttgtttgagtaagaggacttactatgtaaatatttttgaaaaagtggantnctggcngggngcagnggctcnngcctntaancccagcactttgggaggccnaggnnggnngatcnngaggtcaggagttcnagaccngcctgncnaacacggtgaaacccngctctantaaaaananaaaaattngcnaggcntggtggnacangcctgtaatcccagctatttgggangctgagncagnagaatnncntgaacccnggaggtggaggntncagtgagccgagatcangccactgcactccancctggactacaagagtgaaagcccgttctcaaaaaaaaaaaaaaaaaaaaaaaagtcctttcttcagtgaactctcatagggagggccaacagataaagtcagtaagagtgacactaacctggttaaggaagtgtgtggtttctcagagcacaccctgttctcatgctcctcccactcactgcccaatctttcctctccttcacttccaggctatctttagagaacttcagaatacaataatgaaaaccatgtctttgatcattaaacaccaaaaagtaactctgctactctcctcagcttcaggcaccaccactgacctgggacagtgaatcgacaatgccgtcttctgtctcgtggggcatcctcctgctggcaggcctgtgctgcctggtccctgtctccctggctgaggatccccagggagatgctgcccagaagacagatacatcccaccatgatcaggatcacccaaccttcaacaagatcacccccaacctggctgagttcgccttcagcctataccgccagctggcacaccagtccaacagcaccaatatcttcttctccccagtgagcatcgctacagcctttgcaatgctctccctggggaccaaggctgacactcacgatgaaatcctggagggcctgaatttcaacctcacggagattccggaggctcagatccatgaaggcttccaggaactcctccgtaccctcaaccagccagacagccagctccagctgaccaccggcaatggcctgttcctcagcgagggcctgaagctagtggataagtttttggaggatgttaaaaagttgtaccactcagaagccttcactgtcaacttcggggacaccgaagaggccaagaaacagatcaacgattacgtggagaagggtactcaagggaaaattgtggatttggtcaaggagcttgacagagacacagtttttgctctggtgaattacatcttctttaaaggcaaatgggagagaccctttgaagtcaaggacaccgaggaagaggacttccacgtggaccaggtgaccaccgtgaaggtgcctatgatgaagcgtttaggcatgtttaacatccagcactgtaagaagctgtccagctgggtgctgctgatgaaatacctgggcaatgccaccgccatcttcttcctgcctgatgaggggaaactacagcacctggaaaatgaactcacccacgatatcatcaccaagttcctggaaaatgaagacagaagttactggaacctatgatctgaagagcgtcctgggtcaactgggcatcactaaggtcttcagcaatggggctgacctctccggggtcacagaggaggcacccctgaagctctccaaggccgtgcataaggctgtgctgaccatcgacgagaaagggactgaagctgctggggccatgtttttagaggccatacccatgtctatcccccccgaggtcaagttcaacaaaccctttgtcttcttaatgattgaacaaaataccaagtctcccctcttcatgggaaaagtggtgaatcccacccaaaaataactgcctctcgctcctcaacccctcccctccatccctggccccctccctggatgacattaaagaagggttgagctgg

SEQ ID NO: 332791 - DNA, 2335 bp, Homo sapiens
  misc_feature (510)..(510): n is a, c, g, or t
  misc_feature (512)..(512): n is a, c, g, or t
  misc_feature (518)..(518): n is a, c, g, or t
  misc_feature (522)..(522): n is a, c, g, or t
  misc_feature (527)..(527): n is a, c, g, or t
  misc_feature (533)..(534): n is a, c, g, or t
  misc_feature (539)..(539): n is a, c, g, or t
  misc_feature (543)..(543): n is a, c, g, or t
  misc_feature (563)..(563): n is a, c, g, or t
  misc_feature (567)..(568): n is a, c, g, or t
  misc_feature (571)..(572): n is a, c, g, or t
  misc_feature (577)..(578): n is a, c, g, or t
  misc_feature (593)..(593): n is a, c, g, or t
  misc_feature (599)..(599): n is a, c, g, or t
  misc_feature (605)..(605): n is a, c, g, or t
  misc_feature (607)..(607): n is a, c, g, or t
  misc_feature (623)..(623): n is a, c, g, or t
  misc_feature (630)..(630): n is a, c, g, or t
  misc_feature (637)..(637): n is a, c, g, or t
  misc_feature (639)..(639): n is a, c, g, or t
  misc_feature (647)..(647): n is a, c, g, or t
  misc_feature (650)..(650): n is a, c, g, or t
  misc_feature (655)..(655): n is a, c, g, or t
  misc_feature (662)..(662): n is a, c, g, or t
  misc_feature (666)..(666): n is a, c, g, or t
  misc_feature (691)..(691): n is a, c, g, or t
  misc_feature (698)..(698): n is a, c, g, or t
  misc_feature (702)..(702): n is a, c, g, or t
  misc_feature (708)..(709): n is a, c, g, or t
  misc_feature (711)..(711): n is a, c, g, or t
  misc_feature (719)..(719): n is a, c, g, or t
  misc_feature (731)..(731): n is a, c, g, or t
  misc_feature (733)..(733): n is a, c, g, or t
  misc_feature (750)..(750): n is a, c, g, or t
  misc_feature (765)..(765): n is a, c, g, or t
ctttaccattcttccatggaagaagacaaaattcatctgagtgtagaaactaactatgctatggctcaggcccctctgggtatttctcctcaggaactgctcacctgtggggagagtgacttgtggtctgcttacccaaaataattcaatactcaaggctgggtggactctacagggcaatggtgtgactgaccagctctttcattgaagacatagaaagtacaagcagacccttctggcaggagctctaacatcaggcttccaatctagatttcatcagtaataaacattttggtttctatctcaggactcccaaatcgttcaattggacttgaactcagaagggaaactggatgttacttattgaactccaggtacacattatgtttcattaaaaaatatctatacaattatgacatcaagtagatgtcattggctactagaattatgtgggaaaacccttgtttgagtaagaggacttactatgtaaatatttttgaaaaagtggantnctggcngggngcagnggctcnngcctntaancccagcactttgggaggccnaggnnggnngatcnngaggtcaggagttcnagaccngcctgncnaacacggtgaaacccngctctantaaaaananaaaaattngcnaggcntggtggnacangcctgtaatcccagctatttgggangctgagncagnagaatnncntgaacccnggaggtggaggntncagtgagccgagatcangccactgcactccancctggactacaagagtgaaagcccgttctcaaaaaaaaaaaaaaaaaaaaaaaagtcctttcttcagtgaactctcatagggagggccaacagataaagtcagtaagagtgacactaacctggttaaggaagtgtgtggtttctcagagcacaccctgttctcatgctcctcccactcactgcccaatctttcctctccttcacttccaggctatctttagagaacttcagaatacaataatgaaaaccatgtctttgatcattaaacaccaaaaagtaactctgctactctcctcagcttcaggcaccaccactgacctgggacagtgaatcgacaatgccgtcttctgtctcgtggggcatcctcctgctggcaggcctgtgctgcctggtccctgtctccctggctgaggatccccagggagatgctgcccagaagacagatacatcccaccatgatcaggatcacccaaccttcaacaagatcacccccaacctggctgagttcgccttcagcctataccgccagctggcacaccagtccaacagcaccaatatcttcttctccccagtgagcatcgctacagcctttgcaatgctctccctggggaccaaggctgacactcacgatgaaatcctggagggcctgaatttcaacctcacggagattccggaggctcagatccatgaaggcttccaggaactcctccgtaccctcaaccagccagacagccagctccagctgaccaccggcaatggcctgttcctcagcgagggcctgaagctagtggataagtttttggaggatgttaaaaagttgtaccactcagaagccttcactgtcaacttcggggacaccgaagaggccaagaaacagatcaacgattacgtggagaagggtactcaagggaaaattgtggatttggtcaaggagcttgacagagacacagtttttgctctggtgaattacatcttctttaaaggcaaatgggagagaccctttgaagtcaaggacaccgaggaagaggacttccacgtggaccaggtgaccaccgtgaaggtgcctatgatgaagcgtttaggcatgtttaacatccagcactgtaagaagctgtccagctgggtgctgctgatgaaatacctgggcaatgccaccgccatcttcttcctgcctgatgaggggaaactacagcacctggaaaatgaactcacccacgatatcatcaccaagttcctggaaaatgaagacagaaggtctgccagcttacatttacccaaactgtccattactggaacctatgatctgaagagcgtcctgggtcaactgggcatcactaaggtcttcagcaatggggctgacctctccggggtcacagaggaggcacccctgaagctctccaagagttcaacaaaccctttgtcttcttaatgattgaacaaaataccaagtctcccctcttcatgggaaaagtggtgaatcccacccaaaaataactgcctctcgctcctcaacccctcccctccatccctggccccctccctggatgacattaaagaagggttgagctgg

SEQ ID NO: 332792 - DNA, 2322 bp, Homo sapiens
  misc_feature (510)..(510): n is a, c, g, or t
  misc_feature (512)..(512): n is a, c, g, or t
  misc_feature (518)..(518): n is a, c, g, or t
  misc_feature (522)..(522): n is a, c, g, or t
  misc_feature (527)..(527): n is a, c, g, or t
  misc_feature (533)..(534): n is a, c, g, or t
  misc_feature (539)..(539): n is a, c, g, or t
  misc_feature (543)..(543): n is a, c, g, or t
  misc_feature (563)..(563): n is a, c, g, or t
  misc_feature (567)..(568): n is a, c, g, or t
  misc_feature (571)..(572): n is a, c, g, or t
  misc_feature (577)..(578): n is a, c, g, or t
  misc_feature (593)..(593): n is a, c, g, or t
  misc_feature (599)..(599): n is a, c, g, or t
  misc_feature (605)..(605): n is a, c, g, or t
  misc_feature (607)..(607): n is a, c, g, or t
  misc_feature (623)..(623): n is a, c, g, or t
  misc_feature (630)..(630): n is a, c, g, or t
  misc_feature (637)..(637): n is a, c, g, or t
  misc_feature (639)..(639): n is a, c, g, or t
  misc_feature (647)..(647): n is a, c, g, or t
  misc_feature (650)..(650): n is a, c, g, or t
  misc_feature (655)..(655): n is a, c, g, or t
  misc_feature (662)..(662): n is a, c, g, or t
  misc_feature (666)..(666): n is a, c, g, or t
  misc_feature (691)..(691): n is a, c, g, or t
  misc_feature (698)..(698): n is a, c, g, or t
  misc_feature (702)..(702): n is a, c, g, or t
  misc_feature (708)..(709): n is a, c, g, or t
  misc_feature (711)..(711): n is a, c, g, or t
  misc_feature (719)..(719): n is a, c, g, or t
  misc_feature (731)..(731): n is a, c, g, or t
  misc_feature (733)..(733): n is a, c, g, or t
  misc_feature (750)..(750): n is a, c, g, or t
  misc_feature (765)..(765): n is a, c, g, or t
  misc_feature (2265)..(2265): n is a, c, g, or t
  misc_feature (2306)..(2306): n is a, c, g, or t
ctttaccattcttccatggaagaagacaaaattcatctgagtgtagaaactaactatgctatggctcaggcccctctgggtatttctcctcaggaactgctcacctgtggggagagtgacttgtggtctgcttacccaaaataattcaatactcaaggctgggtggactctacagggcaatggtgtgactgaccagctctttcattgaagacatagaaagtacaagcagacccttctggcaggagctctaacatcaggcttccaatctagatttcatcagtaataaacattttggtttctatctcaggactcccaaatcgttcaattggacttgaactcagaagggaaactggatgttacttattgaactccaggtacacattatgtttcattaaaaaatatctatacaattatgacatcaagtagatgtcattggctactagaattatgtgggaaaacccttgtttgagtaagaggacttactatgtaaatatttttgaaaaagtggantnctggcngggngcagnggctcnngcctntaancccagcactttgggaggccnaggnnggnngatcnngaggtcaggagttcnagaccngcctgncnaacacggtgaaacccngctctantaaaaananaaaaattngcnaggcntggtggnacangcctgtaatcccagctatttgggangctgagncagnagaatnncntgaacccnggaggtggaggntncagtgagccgagatcangccactgcactccancctggactacaagagtgaaagcccgttctcaaaaaaaaaaaaaaaaaaaaaaaagtcctttcttcagtgaactctcatagggagggccaacagataaagtcagtaagagtgacactaacctggttaaggaagtgtgtggtttctcagagcacaccctgttctcatgctcctcccactcactgcccaatctttcctctccttcacttccaggctatctttagagaacttcagaatacaataatgaaaaccatgtctttgatcattaaacaccaaaaagtaactctgctactctcctcagcttcaggcaccaccactgacctgggacagtgaatcgacaatgccgtcttctgtctcgtggggcatcctcctgctggcaggcctgtgctgcctggtccctgtctccctggctgaggatccccagggagatgctgcccagaagacagatacatcccaccatgatcaggatcacccaaccttcaacaagatcacccccaacctggctgagttcgccttcagcctataccgccagctggcacaccagtccaacagcaccaatatcttcttctccccagtgagcatcgctacagcctttgcaatgctctccctggggaccaaggctgacactcacgatgaaatcctggagggcctgaatttcaacctcacggagattccggaggctcagatccatgaaggcttccaggaactcctccgtaccctcaaccagccagacagccagctccagctgaccaccggcaatggcctgttcctcagcgagggcctgaagctagtggataagtttttggaggatgttaaaaagttgtaccactcagaagccttcactgtcaacttcggggacaccgaagaggccaagaaacagatcaacgattacgtggagaagggtactcaagggaaaattgtggatttggtcaaggagcttgacagagacacagtttttgctctggtgaattacatcttctttaaaggcaaatgggagagaccctttgaagtcaaggacaccgaggaagaggacttccacgtggaccaggtgaccaccgtgaaggtgcctatgatgaagcgtttaggcatgtttaacatccagcactgtaagaagctgtccagctgggtgctgctgatgaaatacctgggcaatgccaccgccatcttcttcctgcctgatgaggggaaactacagcacctggaaaatgaactcacccacgatatcatcaccaagttcctggaaaatgaagacagaaggtctgccagcttacatttacccaaactgtccattactggaacctatgatctgaagagcgtcctgggtcaactgggcatcactaaggtcttcagcaatggggctgacctctccggggtcacagaggaggcacccctgaagctctccaaggtctcaaggcgtgctaagctgtctgacatcgcgagaaggactgactgtgtgcatgtttagagcataccatgttatcccccgagcaagtcacaaccttngctctaatgatgcaaatacaagctccctttatggaaagggngatcaccaaatactgc

SEQ ID NO: 332793 - DNA, 2245 bp, Homo sapiens
  misc_feature (510)..(510): n is a, c, g, or t
  misc_feature (512)..(512): n is a, c, g, or t
  misc_feature (518)..(518): n is a, c, g, or t
  misc_feature (522)..(522): n is a, c, g, or t
  misc_feature (527)..(527): n is a, c, g, or t
  misc_feature (533)..(534): n is a, c, g, or t
  misc_feature (539)..(539): n is a, c, g, or t
  misc_feature (543)..(543): n is a, c, g, or t
  misc_feature (563)..(563): n is a, c, g, or t
  misc_feature (567)..(568): n is a, c, g, or t
  misc_feature (571)..(572): n is a, c, g, or t
  misc_feature (577)..(578): n is a, c, g, or t
  misc_feature (593)..(593): n is a, c, g, or t
  misc_feature (599)..(599): n is a, c, g, or t
  misc_feature (605)..(605): n is a, c, g, or t
  misc_feature (607)..(607): n is a, c, g, or t
  misc_feature (623)..(623): n is a, c, g, or t
  misc_feature (630)..(630): n is a, c, g, or t
  misc_feature (637)..(637): n is a, c, g, or t
  misc_feature (639)..(639): n is a, c, g, or t
  misc_feature (647)..(647): n is a, c, g, or t
  misc_feature (650)..(650): n is a, c, g, or t
  misc_feature (655)..(655): n is a, c, g, or t
  misc_feature (662)..(662): n is a, c, g, or t
  misc_feature (666)..(666): n is a, c, g, or t
  misc_feature (691)..(691): n is a, c, g, or t
  misc_feature (698)..(698): n is a, c, g, or t
  misc_feature (702)..(702): n is a, c, g, or t
  misc_feature (708)..(709): n is a, c, g, or t
  misc_feature (711)..(711): n is a, c, g, or t
  misc_feature (719)..(719): n is a, c, g, or t
  misc_feature (731)..(731): n is a, c, g, or t
  misc_feature (733)..(733): n is a, c, g, or t
  misc_feature (750)..(750): n is a, c, g, or t
  misc_feature (765)..(765): n is a, c, g, or t
ctttaccattcttccatggaagaagacaaaattcatctgagtgtagaaactaactatgctatggctcaggcccctctgggtatttctcctcaggaactgctcacctgtggggagagtgacttgtggtctgcttacccaaaataattcaatactcaaggctgggtggactctacagggcaatggtgtgactgaccagctctttcattgaagacatagaaagtacaagcagacccttctggcaggagctctaacatcaggcttccaatctagatttcatcagtaataaacattttggtttctatctcaggactcccaaatcgttcaattggacttgaactcagaagggaaactggatgttacttattgaactccaggtacacattatgtttcattaaaaaatatctatacaattatgacatcaagtagatgtcattggctactagaattatgtgggaaaacccttgtttgagtaagaggacttactatgtaaatatttttgaaaaagtggantnctggcngggngcagnggctcnngcctntaancccagcactttgggaggccnaggnnggnngatcnngaggtcaggagttcnagaccngcctgncnaacacggtgaaacccngctctantaaaaananaaaaattngcnaggcntggtggnacangcctgtaatcccagctatttgggangctgagncagnagaatnncntgaacccnggaggtggaggntncagtgagccgagatcangccactgcactccancctggactacaagagtgaaagcccgttctcaaaaaaaaaaaaaaaaaaaaaaaagtcctttcttcagtgaactctcatagggagggccaacagataaagtcagtaagagtgacactaacctggttaaggaagtgtgtggtttctcagagcacaccctgttctcatgctcctcccactcactgcccaatctttcctctccttcacttccaggctatctttagagaacttcagaatacaataatgaaaaccatgtctttgatcattaaacaccaaaaagtaactctgctactctcctcagcttcaggcaccaccactgacctgggacagtgaatcgacaatgccgtcttctgtctcgtggggcatcctcctgctggcaggcctgtgctgcctggtccctgtctccctggctgaggatccccagggagatgctgcccagaagacagatacatcccaccatgatcaggatcacccaaccttcaacaagatcacccccaacctggctgagttcgccttcagcctataccgccagctggcacaccagtccaacagcaccaatatcttcttctccccagtgagcatcgctacagcctttgcaatgctctccctggggaccaaggctgacactcacgatgaaatcctggagggcctgaatttcaacctcacggagattccggaggctcagatccatgaaggcttccaggaactcctccgtaccctcaaccagccagacagccagctccagctgaccaccggcaatggcctgttcctcagcgagggcctgaagctagtggataagtttttggaggatgttaaaaagttgtaccactcagaagccttcactgtcaacttcggggacaccgaagaggccaagaaacagatcaacgattacgtggagaagggtactcaagggaaaattgtggatttggtcaaggagcttgacagagacacagtttttgctctggtgaattacatcttctttaaaggcaaatgggagagaccctttgaagtcaaggacaccgaggaagaggacttccacgtggaccaggtgaccaccgtgaaggtgcctatgatgaagcgtttaggcatgtttaacatccagcactgtaagaagctgtccagctgggtgctgctgatgaaatacctgggcaatgccaccgccatcttcttcctgcctgatgaggggaaactacagcacctggaaaatgaactcacccacgatatcatcaccaagttcctggaaaatgaagacagaaggtctgccagcttacatttacccaaactgtccattactggaacctatgatctgaagagcgtcctgggtcaactgggcatcactaaggtcttcagcaatggggctgacctctccggggtcacagaggaggcacccctgaagctctccaagccgtgcataaggctgtgctgaccatcgacgagaaaggacaggaagctcgacggggtcccctatcagccagattcacac

SEQ ID NO: 332794 - DNA, 4012 bp, Homo sapiens
  misc_feature (510)..(510): n is a, c, g, or t
  misc_feature (512)..(512): n is a, c, g, or t
  misc_feature (518)..(518): n is a, c, g, or t
  misc_feature (522)..(522): n is a, c, g, or t
  misc_feature (527)..(527): n is a, c, g, or t
  misc_feature (533)..(534): n is a, c, g, or t
  misc_feature (539)..(539): n is a, c, g, or t
  misc_feature (543)..(543): n is a, c, g, or t
  misc_feature (563)..(563): n is a, c, g, or t
  misc_feature (567)..(568): n is a, c, g, or t
  misc_feature (571)..(572): n is a, c, g, or t
  misc_feature (577)..(578): n is a, c, g, or t
  misc_feature (593)..(593): n is a, c, g, or t
  misc_feature (599)..(599): n is a, c, g, or t
  misc_feature (605)..(605): n is a, c, g, or t
  misc_feature (607)..(607): n is a, c, g, or t
  misc_feature (623)..(623): n is a, c, g, or t
  misc_feature (630)..(630): n is a, c, g, or t
  misc_feature (637)..(637): n is a, c, g, or t
  misc_feature (639)..(639): n is a, c, g, or t
  misc_feature (647)..(647): n is a, c, g, or t
  misc_feature (650)..(650): n is a, c, g, or t
  misc_feature (655)..(655): n is a, c, g, or t
  misc_feature (662)..(662): n is a, c, g, or t
  misc_feature (666)..(666): n is a, c, g, or t
  misc_feature (691)..(691): n is a, c, g, or t
  misc_feature (698)..(698): n is a, c, g, or t
  misc_feature (702)..(702): n is a, c, g, or t
  misc_feature (708)..(709): n is a, c, g, or t
  misc_feature (711)..(711): n is a, c, g, or t
  misc_feature (719)..(719): n is a, c, g, or t
  misc_feature (731)..(731): n is a, c, g, or t
  misc_feature (733)..(733): n is a, c, g, or t
  misc_feature (750)..(750): n is a, c, g, or t
  misc_feature (765)..(765): n is a, c, g, or t
ctttaccattcttccatggaagaagacaaaattcatctgagtgtagaaactaactatgctatggctcaggcccctctgggtatttctcctcaggaactgctcacctgtggggagagtgacttgtggtctgcttacccaaaataattcaatactcaaggctgggtggactctacagggcaatggtgtgactgaccagctctttcattgaagacatagaaagtacaagcagacccttctggcaggagctctaacatcaggcttccaatctagatttcatcagtaataaacattttggtttctatctcaggactcccaaatcgttcaattggacttgaactcagaagggaaactggatgttacttattgaactccaggtacacattatgtttcattaaaaaatatctatacaattatgacatcaagtagatgtcattggctactagaattatgtgggaaaacccttgtttgagtaagaggacttactatgtaaatatttttgaaaaagtggantnctggcngggngcagnggctcnngcctntaancccagcactttgggaggccnaggnnggnngatcnngaggtcaggagttcnagaccngcctgncnaacacggtgaaacccngctctantaaaaananaaaaattngcnaggcntggtggnacangcctgtaatcccagctatttgggangctgagncagnagaatnncntgaacccnggaggtggaggntncagtgagccgagatcangccactgcactccancctggactacaagagtgaaagcccgttctcaaaaaaaaaaaaaaaaaaaaaaaagtcctttcttcagtgaactctcatagggagggccaacagataaagtcagtaagagtgacactaacctggttaaggaagtgtgtggtttctcagagcacaccctgttctcatgctcctcccactcactgcccaatctttcctctccttcacttccaggctatctttagagaacttcagaatacaataatgaaaaccatgtctttgatcattaaacaccaaaaagtaactctgctactctcctcagcttcaggcaccaccactgacctgggacagtgaatcgacaatgccgtcttctgtctcgtggggcatcctcctgctggcaggcctgtgctgcctggtccctgtctccctggctgaggatccccagggagatgctgcccagaagacagatacatcccaccatgatcaggatcacccaaccttcaacaagatcacccccaacctggctgagttcgccttcagcctataccgccagctggcacaccagtccaacagcaccaatatcttcttctccccagtgagcatcgctacagcctttgcaatgctctccctggggaccaaggctgacactcacgatgaaatcctggagggcctgaatttcaacctcacggagattccggaggctcagatccatgaaggcttccaggaactcctccgtaccctcaaccagccagacagccagctccagctgaccaccggcaatggcctgttcctcagcgagggcctgaagctagtggataagtttttggaggatgttaaaaagttgtaccactcagaagccttcactgtcaacttcggggacaccgaagaggccaagaaacagatcaacgattacgtggagaagggtactcaagggaaaattgtggatttggtcaaggagcttgacagagacacagtttttgctctggtgaattacatcttctttaaaggcaaatgggagagaccctttgaagtcaaggacaccgaggaagaggacttccacgtggaccaggtgaccaccgtgaaggtgcctatgatgaagcgtttaggcatgtttaacatccagcactgtaagaagctgtccagctgggtgctgctgatgaaatacctgggcaatgccaccgccatcttcttcctgcctgatgaggggaaactacagcacctggaaaatgaactcacccacgatatcatcaccaagttcctggaaaatgaagacagaaggtctgccagcttacatttacccaaactgtccattactggaacctatgatctgaagagcgtcctgggtcaactgggcatcactaaggtcttcagaggccgtgcataaggctgtgctgaccatcgacgagaaagggactgaagctgctggggccatgtttttagaggccatacccatgtctatcccccccgaggtcaagttcaacaaaccctttgtcttcttaatgattgaacaaaataccaagtctcccctcttcatgggaaaagtggtgaatcccacccaaaaataactgcctctcgctcctcaacccctcccctccatccctggccccctccctggatgacattaaagaagggttgagctggccctgcctgcatgtgactgtaaatccctcccatgttttctctgagtctccctttgcctgctgaggctgtatgtgggctccaggtaacagtgctgtcttcgggccccctgaactgtgttcatggagcatctggctgggtaggcacatgctgggcttgaatccaggggggactgaatcctcagcttacggacctgggcccatctgtttctggagggctccagtcttccttgtcctgtcttggagtccccaagaaggaatcacaggggaggaaccagataccagccatgaccccaggctccaccaagcatcttcatgtccccctgctcatcccccactcccccccacccagagttgctcatcctgccagggctggctgtgcccaccccaaggctgccctcctgggggccccagaactgcctgatcgtgccgtggcccagttttgtggcatctgcagcaacacaagagagaggacaatgtcctcctcttgacccgctgtcacctaaccagactcgggccctgcacctctcaggcacttctggaaaatgactgaggcagattcttcctgaagcccattctccatggggcaacaaggacacctattctgtccttgtccttccatcgctgccccagaaagcctcacatatctccgtttagaatcaggtcccttctccccagatgaagaggagggtctctgctttgttttctctatctcctcctcagacttgaccaggcccagcaggccccagaagaccattaccctatatcccttctcctccctagtcacatggccataggctggctgatggctcaggaaggccattgcaaggactcctcagctatgggagaggaagcacatcacccattgacccccgcaacccctccctttcctcctctgagtcccgactggggccacatgcagcctgacttctttgtgcctgttgctgtccctgcagtcttcagagggccaccgcagctccagtgccacggcaggaggctgttcctgaatagcccctgtggtaagggccaggagagtccttccatcctccaaggccctgctaaaggacacagcagccaggaagtcccctgggcccctagctgaaggacagcctgctccctccgtctctaccaggaatggccttgtcctatggaaggcactgccccatcccaaactaatctaggaatcactgtctaaccactcactgtcatgaatgtgtacttaaaggatgaggttgagtcataccaaatagtgatttcgatagttcaaaatggtgaaattagcaattctacatgattcagtctaatcaatggataccgactgtttcccacacaagtctcctgttctcttaagcttactcactgacagcctttcactctccacaaatacattaaagatatggccatcaccaagccccctaggatgacaccagacctgagagtctgaagacctggatccaagttctgacttttccccctgacagctgtgtgaccttcgtgaagtcgccaaacctctctgagccccagtcattgctagtaagacctgcctttgagttggtatgatgttcaagttagataacaaaatgtttatacccattagaacagagaataaatagaactacatttcttgcacttat

SEQ ID NO: 332795 - DNA, 2867 bp, Homo sapiens
  misc_feature (510)..(510): n is a, c, g, or t
  misc_feature (512)..(512): n is a, c, g, or t
  misc_feature (518)..(518): n is a, c, g, or t
  misc_feature (522)..(522): n is a, c, g, or t
  misc_feature (527)..(527): n is a, c, g, or t
  misc_feature (533)..(534): n is a, c, g, or t
  misc_feature (539)..(539): n is a, c, g, or t
  misc_feature (543)..(543): n is a, c, g, or t
  misc_feature (563)..(563): n is a, c, g, or t
  misc_feature (567)..(568): n is a, c, g, or t
  misc_feature (571)..(572): n is a, c, g, or t
  misc_feature (577)..(578): n is a, c, g, or t
  misc_feature (593)..(593): n is a, c, g, or t
  misc_feature (599)..(599): n is a, c, g, or t
  misc_feature (605)..(605): n is a, c, g, or t
  misc_feature (607)..(607): n is a, c, g, or t
  misc_feature (623)..(623): n is a, c, g, or t
  misc_feature (630)..(630): n is a, c, g, or t
  misc_feature (637)..(637): n is a, c, g, or t
  misc_feature (639)..(639): n is a, c, g, or t
  misc_feature (647)..(647): n is a, c, g, or t
  misc_feature (650)..(650): n is a, c, g, or t
  misc_feature (655)..(655): n is a, c, g, or t
  misc_feature (662)..(662): n is a, c, g, or t
  misc_feature (666)..(666): n is a, c, g, or t
  misc_feature (691)..(691): n is a, c, g, or t
  misc_feature (698)..(698): n is a, c, g, or t
  misc_feature (702)..(702): n is a, c, g, or t
  misc_feature (708)..(709): n is a, c, g, or t
  misc_feature (711)..(711): n is a, c, g, or t
  misc_feature (719)..(719): n is a, c, g, or t
  misc_feature (731)..(731): n is a, c, g, or t
  misc_feature (733)..(733): n is a, c, g, or t
  misc_feature (750)..(750): n is a, c, g, or t
  misc_feature (765)..(765): n is a, c, g, or t
ctttaccattcttccatggaagaagacaaaattcatctgagtgtagaaactaactatgctatggctcaggcccctctgggtatttctcctcaggaactgctcacctgtggggagagtgacttgtggtctgcttacccaaaataattcaatactcaaggctgggtggactctacagggcaatggtgtgactgaccagctctttcattgaagacatagaaagtacaagcagacccttctggcaggagctctaacatcaggcttccaatctagatttcatcagtaataaacattttggtttctatctcaggactcccaaatcgttcaattggacttgaactcagaagggaaactggatgttacttattgaactccaggtacacattatgtttcattaaaaaatatctatacaattatgacatcaagtagatgtcattggctactagaattatgtgggaaaacccttgtttgagtaagaggacttactatgtaaatatttttgaaaaagtggantnctggcngggngcagnggctcnngcctntaancccagcactttgggaggccnaggnnggnngatcnngaggtcaggagttcnagaccngcctgncnaacacggtgaaacccngctctantaaaaananaaaaattngcnaggcntggtggnacangcctgtaatcccagctatttgggangctgagncagnagaatnncntgaacccnggaggtggaggntncagtgagccgagatcangccactgcactccancctggactacaagagtgaaagcccgttctcaaaaaaaaaaaaaaaaaaaaaaaagtcctttcttcagtgaactctcatagggagggccaacagataaagtcagtaagagtgacactaacctggttaaggaagtgtgtggtttctcagagcacaccctgttctcatgctcctcccactcactgcccaatctttcctctccttcacttccaggctatctttagagaacttcagaatacaataatgaaaaccatgtctttgatcattaaacaccaaaaagtaactctgctactctcctcagcttcaggcaccaccactgacctgggacagtgaatcgacaatgccgtcttctgtctcgtggggcatcctcctgctggcaggcctgtgctgcctggtccctgtctccctggctgaggatccccagggagatgctgcccagaagacagatacatcccaccatgatcaggatcacccaaccttcaacaagatcacccccaacctggctgagttcgccttcagcctataccgccagctggcacaccagtccaacagcaccaatatcttcttctccccagtgagcatcgctacagcctttgcaatgctctccctggggaccaaggctgacactcacgatgaaatcctggagggcctgaatttcaacctcacggagattccggaggctcagatccatgaaggcttccaggaactcctccgtaccctcaaccagccagacagccagctccagctgaccaccggcaatggcctgttcctcagcgagggcctgaagctagtggataagtttttggaggatgttaaaaagttgtaccactcagaagccttcactgtcaacttcggggacaccgaagaggccaagaaacagatcaacgattacgtggagaagggtactcaagggaaaattgtggatttggtcaaggagcttgacagagacacagtttttgctctggtgaattacatcttctttaaaggcaaatgggagagaccctttgaagtcaaggacaccgaggaagaggacttccacgtggaccaggtgaccaccgtgaaggtgcctatgatgaagcgtttaggcatgtttaacatccagcactgtaagaagctgtccagctgggtgctgctgatgaaatacctgggcaatgccaccgccatcttcttcctgcctgatgaggggaaactacagcacctggaaaatgaactcacccacgatatcatcaccaagttcctggaaaatgaagacagaaggtctgccagcttacatttacccaaactgtccattactggaacctatgatctgaagagcgtcctgggtcaactgggcatcactaaggtcttcagccctccctttcctcctctgagtcccgactggggccacatgcagcctgacttctttgtgcctgttgctgtccctgcagtcttcagagggccaccgcagctccagtgccacggcaggaggctgttcctgaatagcccctgtggtaagggccaggagagtccttccatcctccaaggccctgctaaaggacacagcagccaggaagtcccctgggcccctagctgaaggacagcctgctccctccgtctctaccaggaatggccttgtcctatggaaggcactgccccatcccaaactaatctaggaatcactgtctaaccactcactgtcatgaatgtgtacttaaaggatgaggttgagtcataccaaatagtgatttcgatagttcaaaatggtgaaattagcaattctacatgattcagtctaatcaatggataccgactgtttcccacacaagtctcctgttctcttaagcttactcactgacagcctttcactctccacaaatacattaaagatatggccatcaccaagccccctaggatgacaccagacctgagagtctgaagacctggatccaagttctgacttttccccctgacagctgtgtgaccttcgtgaagtcgccaaacctctctgagccccagtcattgctagtaagacctgcctttgagttggtatgatgttcaagttagataacaaaatgtttatacccattagaacagagaataaatagaactacatttcttgcacttat

SEQ ID NO: 332796 - DNA, 2400 bp, Homo sapiens
  misc_feature (510)..(510): n is a, c, g, or t
  misc_feature (512)..(512): n is a, c, g, or t
  misc_feature (518)..(518): n is a, c, g, or t
  misc_feature (522)..(522): n is a, c, g, or t
  misc_feature (527)..(527): n is a, c, g, or t
  misc_feature (533)..(534): n is a, c, g, or t
  misc_feature (539)..(539): n is a, c, g, or t
  misc_feature (543)..(543): n is a, c, g, or t
  misc_feature (563)..(563): n is a, c, g, or t
  misc_feature (567)..(568): n is a, c, g, or t
  misc_feature (571)..(572): n is a, c, g, or t
  misc_feature (577)..(578): n is a, c, g, or t
  misc_feature (593)..(593): n is a, c, g, or t
  misc_feature (599)..(599): n is a, c, g, or t
  misc_feature (605)..(605): n is a, c, g, or t
  misc_feature (607)..(607): n is a, c, g, or t
  misc_feature (623)..(623): n is a, c, g, or t
  misc_feature (630)..(630): n is a, c, g, or t
  misc_feature (637)..(637): n is a, c, g, or t
  misc_feature (639)..(639): n is a, c, g, or t
  misc_feature (647)..(647): n is a, c, g, or t
  misc_feature (650)..(650): n is a, c, g, or t
  misc_feature (655)..(655): n is a, c, g, or t
  misc_feature (662)..(662): n is a, c, g, or t
  misc_feature (666)..(666): n is a, c, g, or t
  misc_feature (691)..(691): n is a, c, g, or t
  misc_feature (698)..(698): n is a, c, g, or t
  misc_feature (702)..(702): n is a, c, g, or t
  misc_feature (708)..(709): n is a, c, g, or t
  misc_feature (711)..(711): n is a, c, g, or t
  misc_feature (719)..(719): n is a, c, g, or t
  misc_feature (731)..(731): n is a, c, g, or t
  misc_feature (733)..(733): n is a, c, g, or t
  misc_feature (750)..(750): n is a, c, g, or t
  misc_feature (765)..(765): n is a, c, g, or t
ctttaccattcttccatggaagaagacaaaattcatctgagtgtagaaactaactatgctatggctcaggcccctctgggtatttctcctcaggaactgctcacctgtggggagagtgacttgtggtctgcttacccaaaataattcaatactcaaggctgggtggactctacagggcaatggtgtgactgaccagctctttcattgaagacatagaaagtacaagcagacccttctggcaggagctctaacatcaggcttccaatctagatttcatcagtaataaacattttggtttctatctcaggactcccaaatcgttcaattggacttgaactcagaagggaaactggatgttacttattgaactccaggtacacattatgtttcattaaaaaatatctatacaattatgacatcaagtagatgtcattggctactagaattatgtgggaaaacccttgtttgagtaagaggacttactatgtaaatatttttgaaaaagtggantnctggcngggngcagnggctcnngcctntaancccagcactttgggaggccnaggnnggnngatcnngaggtcaggagttcnagaccngcctgncnaacacggtgaaacccngctctantaaaaananaaaaattngcnaggcntggtggnacangcctgtaatcccagctatttgggangctgagncagnagaatnncntgaacccnggaggtggaggntncagtgagccgagatcangccactgcactccancctggactacaagagtgaaagcccgttctcaaaaaaaaaaaaaaaaaaaaaaaagtcctttcttcagtgaactctcatagggagggccaacagataaagtcagtaagagtgacactaacctggttaaggaagtgtgtggtttctcagagcacaccctgttctcatgctcctcccactcactgcccaatctttcctctccttcacttccaggctatctttagagaacttcagaatacaataatgaaaaccatgtctttgatcattaaacaccaaaaagtaactctgctactctcctcagcttcaggcaccaccactgacctgggacagtgaatcgacaatgccgtcttctgtctcgtggggcatcctcctgctggcaggcctgtgctgcctggtccctgtctccctggctgaggatccccagggagatgctgcccagaagacagatacatcccaccatgatcaggatcacccaaccttcaacaagatcacccccaacctggctgagttcgccttcagcctataccgccagctggcacaccagtccaacagcaccaatatcttcttctccccagtgagcatcgctacagcctttgcaatgctctccctggggaccaaggctgacactcacgatgaaatcctggagggcctgaatttcaacctcacggagattccggaggctcagatccatgaaggcttccaggaactcctccgtaccctcaaccagccagacagccagctccagctgaccaccggcaatggcctgttcctcagcgagggcctgaagctagtggataagtttttggaggatgttaaaaagttgtaccactcagaagccttcactgtcaacttcggggacaccgaagaggccaagaaacagatcaacgattacgtggagaagggtactcaagggaaaattgtggatttggtcaaggagcttgacagagacacagtttttgctctggtgaattacatcttctttaaaggcaaatgggagagaccctttgaagtcaaggacaccgaggaagaggacttccacgtggaccaggtgaccaccgtgaaggtgcctatgatgaagcgtttaggcatgtttaacatccagcactgtaagaagctgtccagctgggtgctgctgatgaaatacctgggcaatgccaccgccatcttcttcctgcctgatgaggggaaactacagcacctggaaaatgaactcacccacgatatcatcaccaagttcctggaaaatgaagacagaaggtctgccagcttacatttacccaaactgtccattactggaacctatgatctgaagagcgtcctgggtcaactgggcatcactaaggtcttcaggagggagccaacacgagaaaaggcgaacggaggcaaccaaggaatgtagaaaaacacagaacaacagaggaacagagagagtggcaacagcgacataaacacacaaccaaaaaagaaagcgagcacaacaaggaaacacaagagagaaagaaaacggaaaacaacggcaagaaggaccctttgtcttcttaatgattgaacaaaatacgagattcataacagaaggaggagagaaaggaaagaagcacgcccagaagtagactgcctctcgctcctcaacccctcccc

SEQ ID NO: 332797 - DNA, 3058 bp, Homo sapiens
  misc_feature (510)..(510): n is a, c, g, or t
  misc_feature (512)..(512): n is a, c, g, or t
  misc_feature (518)..(518): n is a, c, g, or t
  misc_feature (522)..(522): n is a, c, g, or t
  misc_feature (527)..(527): n is a, c, g, or t
  misc_feature (533)..(534): n is a, c, g, or t
  misc_feature (539)..(539): n is a, c, g, or t
  misc_feature (543)..(543): n is a, c, g, or t
  misc_feature (563)..(563): n is a, c, g, or t
  misc_feature (567)..(568): n is a, c, g, or t
  misc_feature (571)..(572): n is a, c, g, or t
  misc_feature (577)..(578): n is a, c, g, or t
  misc_feature (593)..(593): n is a, c, g, or t
  misc_feature (599)..(599): n is a, c, g, or t
  misc_feature (605)..(605): n is a, c, g, or t
  misc_feature (607)..(607): n is a, c, g, or t
  misc_feature (623)..(623): n is a, c, g, or t
  misc_feature (630)..(630): n is a, c, g, or t
  misc_feature (637)..(637): n is a, c, g, or t
  misc_feature (639)..(639): n is a, c, g, or t
  misc_feature (647)..(647): n is a, c, g, or t
  misc_feature (650)..(650): n is a, c, g, or t
  misc_feature (655)..(655): n is a, c, g, or t
  misc_feature (662)..(662): n is a, c, g, or t
  misc_feature (666)..(666): n is a, c, g, or t
  misc_feature (691)..(691): n is a, c, g, or t
  misc_feature (698)..(698): n is a, c, g, or t
  misc_feature (702)..(702): n is a, c, g, or t
  misc_feature (708)..(709): n is a, c, g, or t
  misc_feature (711)..(711): n is a, c, g, or t
  misc_feature (719)..(719): n is a, c, g, or t
  misc_feature (731)..(731): n is a, c, g, or t
  misc_feature (733)..(733): n is a, c, g, or t
  misc_feature (750)..(750): n is a, c, g, or t
  misc_feature (765)..(765): n is a, c, g, or t
ctttaccattcttccatggaagaagacaaaattcatctgagtgtagaaactaactatgctatggctcaggcccctctgggtatttctcctcaggaactgctcacctgtggggagagtgacttgtggtctgcttacccaaaataattcaatactcaaggctgggtggactctacagggcaatggtgtgactgaccagctctttcattgaagacatagaaagtacaagcagacccttctggcaggagctctaacatcaggcttccaatctagatttcatcagtaataaacattttggtttctatctcaggactcccaaatcgttcaattggacttgaactcagaagggaaactggatgttacttattgaactccaggtacacattatgtttcattaaaaaatatctatacaattatgacatcaagtagatgtcattggctactagaattatgtgggaaaacccttgtttgagtaagaggacttactatgtaaatatttttgaaaaagtggantnctggcngggngcagnggctcnngcctntaancccagcactttgggaggccnaggnnggnngatcnngaggtcaggagttcnagaccngcctgncnaacacggtgaaacccngctctantaaaaananaaaaattngcnaggcntggtggnacangcctgtaatcccagctatttgggangctgagncagnagaatnncntgaacccnggaggtggaggntncagtgagccgagatcangccactgcactccancctggactacaagagtgaaagcccgttctcaaaaaaaaaaaaaaaaaaaaaaaagtcctttcttcagtgaactctcatagggagggccaacagataaagtcagtaagagtgacactaacctggttaaggaagtgtgtggtttctcagagcacaccctgttctcatgctcctcccactcactgcccaatctttcctctccttcacttccaggctatctttagagaacttcagaatacaataatgaaaaccatgtctttgatcattaaacaccaaaaagtaactctgctactctcctcagcttcaggcaccaccactgacctgggacagtgaatcgacaatgccgtcttctgtctcgtggggcatcctcctgctggcaggcctgtgctgcctggtccctgtctccctggctgaggatccccagggagatgctgcccagaagacagatacatcccaccatgatcaggatcacccaaccttcaacaagatcacccccaacctggctgagttcgccttcagcctataccgccagctggcacaccagtccaacagcaccaatatcttcttctccccagtgagcatcgctacagcctttgcaatgctctccctggggaccaaggctgacactcacgatgaaatcctggagggcctgaatttcaacctcacggagattccggaggctcagatccatgaaggcttccaggaactcctccgtaccctcaaccagccagacagccagctccagctgaccaccggcaatggcctgttcctcagcgagggcctgaagctagtggataagtttttggaggatgttaaaaagttgtaccactcagaagccttcactgtcaacttcggggacaccgaagaggccaagaaacagatcaacgattacgtggagaagggtactcaagggaaaattgtggatttggtcaaggagcttgacagagacacagtttttgctctggtgaattacatcttctttaaaggcaaatgggagagaccctttgaagtcaaggacaccgaggaagaggacttccacgtggaccaggtgaccaccgtgaaggtgcctatgatgaagcgtttaggcatgtttaacatccagcactgtaagaagctgtccagctgggtgctgctgatgaaatacctgggcaatgccaccgccatcttcttcctgcctgatgaggggaaactacagcacctggaaaatgaactcacccacgatatcatcaccaagttcctggaaaatgaagacagaagttactggaacctatgatctgaagagcgtcctgggtcaactgggcatcactaaggtcttcagcaatggggctgacctctccggggtcacagaggaggcacccctgaagctctccaaggccgtgcataaggctgtgctgaccatcgacgagaaagggactgaagctgctggggccatgtttttagaggccatacccatgtctatcccccccgaggtcaagttcaacaaaccctttgtcttcttaatgattgaacaaaataccaagtctcccctcttcatgggaaaagtggtgaatcccacccaaaaataactgcctctcgctcctcaacccctcccctccatccctggccccctccctggatgacattaaagaagggttgagctggaaaaaaaaaaaaaaaaaacggagaaaagaagaaaccaacaagaagaagaaagaaaaagcagaagaagaaaagacaacaaaaaaacaagaaacaagcaaaaaacaaacacgggtggggggccggcggccgcgcacaagacatgacatcaacccacagtgggggggccgcgcgcaccacacatggaaaacacagacagcgacaacaagagcacacagacagagcccggcgcgaaaaacaacgagggagagagcaacgcccaaaaacaaaagcccggagagaaacacaagagtgagaaaaaacacacagaggggatattaagaagaacaacaggaggagaaacaaacgaagcggagatacgcaaacgcaagcaaaataaaataccgcccccagacagaggaagacagcaaaaagacaaagaaaaagcaacagacgcaaacacaaagcaacaaaagacgacgaaaagtagcggaagaaaaaaacagaaagaagaagggagcggaacgagaaagcagtgagacgtagagaaagacagaaggcgaggagagagaaaggagaaagagaaagaccgaagaaagaaaggcaagcagaagcgagacaaacgaggagacaggaaagagagaaggacagaaggacgacagagacaaagcaaaaaaga

SEQ ID NO: 332798 - DNA, 3933 bp, Homo sapiens
  misc_feature (510)..(510): n is a, c, g, or t
  misc_feature (512)..(512): n is a, c, g, or t
  misc_feature (518)..(518): n is a, c, g, or t
  misc_feature (522)..(522): n is a, c, g, or t
  misc_feature (527)..(527): n is a, c, g, or t
  misc_feature (533)..(534): n is a, c, g, or t
  misc_feature (539)..(539): n is a, c, g, or t
  misc_feature (543)..(543): n is a, c, g, or t
  misc_feature (563)..(563): n is a, c, g, or t
  misc_feature (567)..(568): n is a, c, g, or t
  misc_feature (571)..(572): n is a, c, g, or t
  misc_feature (577)..(578): n is a, c, g, or t
  misc_feature (593)..(593): n is a, c, g, or t
  misc_feature (599)..(599): n is a, c, g, or t
  misc_feature (605)..(605): n is a, c, g, or t
  misc_feature (607)..(607): n is a, c, g, or t
  misc_feature (623)..(623): n is a, c, g, or t
  misc_feature (630)..(630): n is a, c, g, or t
  misc_feature (637)..(637): n is a, c, g, or t
  misc_feature (639)..(639): n is a, c, g, or t
  misc_feature (647)..(647): n is a, c, g, or t
  misc_feature (650)..(650): n is a, c, g, or t
  misc_feature (655)..(655): n is a, c, g, or t
  misc_feature (662)..(662): n is a, c, g, or t
  misc_feature (666)..(666): n is a, c, g, or t
  misc_feature (691)..(691): n is a, c, g, or t
  misc_feature (698)..(698): n is a, c, g, or t
  misc_feature (702)..(702): n is a, c, g, or t
  misc_feature (708)..(709): n is a, c, g, or t
  misc_feature (711)..(711): n is a, c, g, or t
  misc_feature (719)..(719): n is a, c, g, or t
  misc_feature (731)..(731): n is a, c, g, or t
  misc_feature (733)..(733): n is a, c, g, or t
  misc_feature (750)..(750): n is a, c, g, or t
  misc_feature (765)..(765): n is a, c, g, or t
ctttaccattcttccatggaagaagacaaaattcatctgagtgtagaaactaactatgctatggctcaggcccctctgggtatttctcctcaggaactgctcacctgtggggagagtgacttgtggtctgcttacccaaaataattcaatactcaaggctgggtggactctacagggcaatggtgtgactgaccagctctttcattgaagacatagaaagtacaagcagacccttctggcaggagctctaacatcaggcttccaatctagatttcatcagtaataaacattttggtttctatctcaggactcccaaatcgttcaattggacttgaactcagaagggaaactggatgttacttattgaactccaggtacacattatgtttcattaaaaaatatctatacaattatgacatcaagtagatgtcattggctactagaattatgtgggaaaacccttgtttgagtaagaggacttactatgtaaatatttttgaaaaagtggantnctggcngggngcagnggctcnngcctntaancccagcactttgggaggccnaggnnggnngatcnngaggtcaggagttcnagaccngcctgncnaacacggtgaaacccngctctantaaaaananaaaaattngcnaggcntggtggnacangcctgtaatcccagctatttgggangctgagncagnagaatnncntgaacccnggaggtggaggntncagtgagccgagatcangccactgcactccancctggactacaagagtgaaagcccgttctcaaaaaaaaaaaaaaaaaaaaaaaagtcctttcttcagtgaactctcatagggagggccaacagataaagtcagtaagagtgacactaacctggttaaggaagtgtgtggtttctcagagcacaccctgttctcatgctcctcccactcactgcccaatctttcctctccttcacttccaggctatctttagagaacttcagaatacaataatgaaaaccatgtctttgatcattaaacaccaaaaagtaactctgctactctcctcagcttcaggcaccaccactgacctgggacagtgaatcgacaatgccgtcttctgtctcgtggggcatcctcctgctggcaggcctgtgctgcctggtccctgtctccctggctgaggatccccagggagatgctgcccagaagacagatacatcccaccatgatcaggatcacccaaccttcaacaagatcacccccaacctggctgagttcgccttcagcctataccgccagctggcacaccagtccaacagcaccaatatcttcttctccccagtgagcatcgctacagcctttgcaatgctctccctggggaccaaggctgacactcacgatgaaatcctggagggcctgaatttcaacctcacggagattccggaggctcagatccatgaaggcttccaggaactcctccgtaccctcaaccagccagacagccagctccagctgaccaccggcaatggcctgttcctcagcgagggcctgaagctagtggataagtttttggaggatgttaaaaagttgtaccactcagaagccttcactgtcaacttcggggacaccgaagaggccaagaaacagatcaacgattacgtggagaagggtactcaagggaaaattgtggatttggtcaaggagcttgacagagacacagtttttgctctggtgaattacatcttctttaaaggcaaatgggagagaccctttgaagtcaaggacaccgaggaagaggacttccacgtggaccaggtgaccaccgtgaaggtgcctatgatgaagcgtttaggcatgtttaacatccagcactgtaagaagctgtccagctgggtgctgctgatgaaatacctgggcaatgccaccgccatcttcttcctgcctgatgaggggaaactacagcacctggaaaatgaactcacccacgatatcatcaccaagttcctggaaaatgaagacagaagttactggaacctatgatctgaagagcgtcctgggtcaactgggcatcactaaggtcttcagcaatggggctgacctctccggggtcacagaggaggcacccctgaagctctccaagagttcaacaaaccctttgtcttcttaatgattgaacaaaataccaagtctcccctcttcatgggaaaagtggtgaatcccacccaaaaataactgcctctcgctcctcaacccctcccctccatccctggccccctccctggatgacattaaagaagggttgagctggccctgcctgcatgtgactgtaaatccctcccatgttttctctgagtctccctttgcctgctgaggctgtatgtgggctccaggtaacagtgctgtcttcgggccccctgaactgtgttcatggagcatctggctgggtaggcacatgctgggcttgaatccaggggggactgaatcctcagcttacggacctgggcccatctgtttctggagggctccagtcttccttgtcctgtcttggagtccccaagaaggaatcacaggggaggaaccagataccagccatgaccccaggctccaccaagcatcttcatgtccccctgctcatcccccactcccccccacccagagttgctcatcctgccagggctggctgtgcccaccccaaggctgccctcctgggggccccagaactgcctgatcgtgccgtggcccagttttgtggcatctgcagcaacacaagagagaggacaatgtcctcctcttgacccgctgtcacctaaccagactcgggccctgcacctctcaggcacttctggaaaatgactgaggcagattcttcctgaagcccattctccatggggcaacaaggacacctattctgtccttgtccttccatcgctgccccagaaagcctcacatatctccgtttagaatcaggtcccttctccccagatgaagaggagggtctctgctttgttttctctatctcctcctcagacttgaccaggcccagcaggccccagaagaccattaccctatatcccttctcctccctagtcacatggccataggctggctgatggctcaggaaggccattgcaaggactcctcagctatgggagaggaagcacatcacccattgacccccgcaacccctccctttcctcctctgagtcccgactggggccacatgcagcctgacttctttgtgcctgttgctgtccctgcagtcttcagagggccaccgcagctccagtgccacggcaggaggctgttcctgaatagcccctgtggtaagggccaggagagtccttccatcctccaaggccctgctaaaggacacagcagccaggaagtcccctgggcccctagctgaaggacagcctgctccctccgtctctaccaggaatggccttgtcctatggaaggcactgccccatcccaaactaatctaggaatcactgtctaaccactcactgtcatgaatgtgtacttaaaggatgaggttgagtcataccaaatagtgatttcgatagttcaaaatggtgaaattagcaattctacatgattcagtctaatcaatggataccgactgtttcccacacaagtctcctgttctcttaagcttactcactgacagcctttcactctccacaaatacattaaagatatggccatcaccaagccccctaggatgacaccagacctgagagtctgaagacctggatccaagttctgacttttccccctgacagctgtgtgaccttcgtgaagtcgccaaacctctctgagccccagtcattgctagtaagacctgcctttgagttggtatgatgttcaagttagataacaaaatgtttatacccattagaacagagaataaatagaactacatttcttgcacttat

SEQ ID NO: 332799 - DNA, 2187 bp, Homo sapiens
  misc_feature (510)..(510): n is a, c, g, or t
  misc_feature (512)..(512): n is a, c, g, or t
  misc_feature (518)..(518): n is a, c, g, or t
  misc_feature (522)..(522): n is a, c, g, or t
  misc_feature (527)..(527): n is a, c, g, or t
  misc_feature (533)..(534): n is a, c, g, or t
  misc_feature (539)..(539): n is a, c, g, or t
  misc_feature (543)..(543): n is a, c, g, or t
  misc_feature (563)..(563): n is a, c, g, or t
  misc_feature (567)..(568): n is a, c, g, or t
  misc_feature (571)..(572): n is a, c, g, or t
  misc_feature (577)..(578): n is a, c, g, or t
  misc_feature (593)..(593): n is a, c, g, or t
  misc_feature (599)..(599): n is a, c, g, or t
  misc_feature (605)..(605): n is a, c, g, or t
  misc_feature (607)..(607): n is a, c, g, or t
  misc_feature (623)..(623): n is a, c, g, or t
  misc_feature (630)..(630): n is a, c, g, or t
  misc_feature (637)..(637): n is a, c, g, or t
  misc_feature (639)..(639): n is a, c, g, or t
  misc_feature (647)..(647): n is a, c, g, or t
  misc_feature (650)..(650): n is a, c, g, or t
  misc_feature (655)..(655): n is a, c, g, or t
  misc_feature (662)..(662): n is a, c, g, or t
  misc_feature (666)..(666): n is a, c, g, or t
  misc_feature (691)..(691): n is a, c, g, or t
  misc_feature (698)..(698): n is a, c, g, or t
  misc_feature (702)..(702): n is a, c, g, or t
  misc_feature (708)..(709): n is a, c, g, or t
  misc_feature (711)..(711): n is a, c, g, or t
  misc_feature (719)..(719): n is a, c, g, or t
  misc_feature (731)..(731): n is a, c, g, or t
  misc_feature (733)..(733): n is a, c, g, or t
  misc_feature (750)..(750): n is a, c, g, or t
  misc_feature (765)..(765): n is a, c, g, or t
ctttaccattcttccatggaagaagacaaaattcatctgagtgtagaaactaactatgctatggctcaggcccctctgggtatttctcctcaggaactgctcacctgtggggagagtgacttgtggtctgcttacccaaaataattcaatactcaaggctgggtggactctacagggcaatggtgtgactgaccagctctttcattgaagacatagaaagtacaagcagacccttctggcaggagctctaacatcaggcttccaatctagatttcatcagtaataaacattttggtttctatctcaggactcccaaatcgttcaattggacttgaactcagaagggaaactggatgttacttattgaactccaggtacacattatgtttcattaaaaaatatctatacaattatgacatcaagtagatgtcattggctactagaattatgtgggaaaacccttgtttgagtaagaggacttactatgtaaatatttttgaaaaagtggantnctggcngggngcagnggctcnngcctntaancccagcactttgggaggccnaggnnggnngatcnngaggtcaggagttcnagaccngcctgncnaacacggtgaaacccngctctantaaaaananaaaaattngcnaggcntggtggnacangcctgtaatcccagctatttgggangctgagncagnagaatnncntgaacccnggaggtggaggntncagtgagccgagatcangccactgcactccancctggactacaagagtgaaagcccgttctcaaaaaaaaaaaaaaaaaaaaaaaagtcctttcttcagtgaactctcatagggagggccaacagataaagtcagtaagagtgacactaacctggttaaggaagtgtgtggtttctcagagcacaccctgttctcatgctcctcccactcactgcccaatctttcctctccttcacttccaggctatctttagagaacttcagaatacaataatgaaaaccatgtctttgatcattaaacaccaaaaagtaactctgctactctcctcagcttcaggcaccaccactgacctgggacagtgaatcgacaatgccgtcttctgtctcgtggggcatcctcctgctggcaggcctgtgctgcctggtccctgtctccctggctgaggatccccagggagatgctgcccagaagacagatacatcccaccatgatcaggatcacccaaccttcaacaagatcacccccaacctggctgagttcgccttcagcctataccgccagctggcacaccagtccaacagcaccaatatcttcttctccccagtgagcatcgctacagcctttgcaatgctctccctggggaccaaggctgacactcacgatgaaatcctggagggcctgaatttcaacctcacggagattccggaggctcagatccatgaaggcttccaggaactcctccgtaccctcaaccagccagacagccagctccagctgaccaccggcaatggcctgttcctcagcgagggcctgaagctagtggataagtttttggaggatgttaaaaagttgtaccactcagaagccttcactgtcaacttcggggacaccgaagaggccaagaaacagatcaacgattacgtggagaagggtactcaagggaaaattgtggatttggtcaaggagcttgacagagacacagtttttgctctggtgaattacatcttctttaaaggcaaatgggagagaccctttgaagtcaaggacaccgaggaagaggacttccacgtggaccaggtgaccaccgtgaaggtgcctatgatgaagcgtttaggcatgtttaacatccagcactgtaagaagctgtccagctgggtgctgctgatgaaatacctgggcaatgccaccgccatcttcttcctgcctgatgaggggaaactacagcacctggaaaatgaactcacccacgatatcatcaccaagttcctggaaaatgaagacagaagagttcaacaaaccctttgtcttcttaatgattgaacaaaataccaagtctcccctcttcatgggaaaagtggtgaatcccacccaaaaataactgcctctcgctcctcaacccctcccctccatccctggccccctccctggatgacattaaagaagggttgagctgg

SEQ ID NO: 332800 - DNA, 3770 bp, Homo sapiens
  misc_feature (510)..(510): n is a, c, g, or t
  misc_feature (512)..(512): n is a, c, g, or t
  misc_feature (518)..(518): n is a, c, g, or t
  misc_feature (522)..(522): n is a, c, g, or t
  misc_feature (527)..(527): n is a, c, g, or t
  misc_feature (533)..(534): n is a, c, g, or t
  misc_feature (539)..(539): n is a, c, g, or t
  misc_feature (543)..(543): n is a, c, g, or t
  misc_feature (563)..(563): n is a, c, g, or t
  misc_feature (567)..(568): n is a, c, g, or t
  misc_feature (571)..(572): n is a, c, g, or t
  misc_feature (577)..(578): n is a, c, g, or t
  misc_feature (593)..(593): n is a, c, g, or t
  misc_feature (599)..(599): n is a, c, g, or t
  misc_feature (605)..(605): n is a, c, g, or t
  misc_feature (607)..(607): n is a, c, g, or t
  misc_feature (623)..(623): n is a, c, g, or t
  misc_feature (630)..(630): n is a, c, g, or t
  misc_feature (637)..(637): n is a, c, g, or t
  misc_feature (639)..(639): n is a, c, g, or t
  misc_feature (647)..(647): n is a, c, g, or t
  misc_feature (650)..(650): n is a, c, g, or t
  misc_feature (655)..(655): n is a, c, g, or t
  misc_feature (662)..(662): n is a, c, g, or t
  misc_feature (666)..(666): n is a, c, g, or t
  misc_feature (691)..(691): n is a, c, g, or t
  misc_feature (698)..(698): n is a, c, g, or t
  misc_feature (702)..(702): n is a, c, g, or t
  misc_feature (708)..(709): n is a, c, g, or t
  misc_feature (711)..(711): n is a, c, g, or t
  misc_feature (719)..(719): n is a, c, g, or t
  misc_feature (731)..(731): n is a, c, g, or t
  misc_feature (733)..(733): n is a, c, g, or t
  misc_feature (750)..(750): n is a, c, g, or t
  misc_feature (765)..(765): n is a, c, g, or t
ctttaccattcttccatggaagaagacaaaattcatctgagtgtagaaactaactatgctatggctcaggcccctctgggtatttctcctcaggaactgctcacctgtggggagagtgacttgtggtctgcttacccaaaataattcaatactcaaggctgggtggactctacagggcaatggtgtgactgaccagctctttcattgaagacatagaaagtacaagcagacccttctggcaggagctctaacatcaggcttccaatctagatttcatcagtaataaacattttggtttctatctcaggactcccaaatcgttcaattggacttgaactcagaagggaaactggatgttacttattgaactccaggtacacattatgtttcattaaaaaatatctatacaattatgacatcaagtagatgtcattggctactagaattatgtgggaaaacccttgtttgagtaagaggacttactatgtaaatatttttgaaaaagtggantnctggcngggngcagnggctcnngcctntaancccagcactttgggaggccnaggnnggnngatcnngaggtcaggagttcnagaccngcctgncnaacacggtgaaacccngctctantaaaaananaaaaattngcnaggcntggtggnacangcctgtaatcccagctatttgggangctgagncagnagaatnncntgaacccnggaggtggaggntncagtgagccgagatcangccactgcactccancctggactacaagagtgaaagcccgttctcaaaaaaaaaaaaaaaaaaaaaaaagtcctttcttcagtgaactctcatagggagggccaacagataaagtcagtaagagtgacactaacctggttaaggaagtgtgtggtttctcagagcacaccctgttctcatgctcctcccactcactgcccaatctttcctctccttcacttccaggctatctttagagaacttcagaatacaataatgaaaaccatgtctttgatcattaaacaccaaaaagtaactctgctactctcctcagcttcaggcaccaccactgacctgggacagtgaatcgacaatgccgtcttctgtctcgtggggcatcctcctgctggcaggcctgtgctgcctggtccctgtctccctggctgaggatccccagggagatgctgcccagaagacagatacatcccaccatgatcaggatcacccaaccttcaacaagatcacccccaacctggctgagttcgccttcagcctataccgccagctggcacaccagtccaacagcaccaatatcttcttctccccagtgagcatcgctacagcctttgcaatgctctccctggggaccaaggctgacactcacgatgaaatcctggagggcctgaatttcaacctcacggagattccggaggctcagatccatgaaggcttccaggaactcctccgtaccctcaaccagccagacagccagctccagctgaccaccggcaatggcctgttcctcagcgagggcctgaagctagtggataagtttttggaggatgttaaaaagttgtaccactcagaagccttcactgtcaacttcggggacaccgaagaggccaagaaacagatcaacgattacgtggagaagggtactcaagggaaaattgtggatttggtcaaggagcttgacagagacacagtttttgctctggtgaattacatcttctttaaaggcaaatgggagagaccctttgaagtcaaggacaccgaggaagaggacttccacgtggaccaggtgaccaccgtgaaggtgcctatgatgaagcgtttaggcatgtttaacatccagcactgtaagaagctgtccagctgggtgctgctgatgaaatacctgggcaatgccaccgccatcttcttcctgcctgatgaggggaaactacagcacctggaaaatgaaagttcaacaaaccctttgtcttcttaatgattgaacaaaataccaagtctcccctcttcatgggaaaagtggtgaatcccacccaaaaataactgcctctcgctcctcaacccctcccctccatccctggccccctccctggatgacattaaagaagggttgagctggccctgcctgcatgtgactgtaaatccctcccatgttttctctgagtctccctttgcctgctgaggctgtatgtgggctccaggtaacagtgctgtcttcgggccccctgaactgtgttcatggagcatctggctgggtaggcacatgctgggcttgaatccaggggggactgaatcctcagcttacggacctgggcccatctgtttctggagggctccagtcttccttgtcctgtcttggagtccccaagaaggaatcacaggggaggaaccagataccagccatgaccccaggctccaccaagcatcttcatgtccccctgctcatcccccactcccccccacccagagttgctcatcctgccagggctggctgtgcccaccccaaggctgccctcctgggggccccagaactgcctgatcgtgccgtggcccagttttgtggcatctgcagcaacacaagagagaggacaatgtcctcctcttgacccgctgtcacctaaccagactcgggccctgcacctctcaggcacttctggaaaatgactgaggcagattcttcctgaagcccattctccatggggcaacaaggacacctattctgtccttgtccttccatcgctgccccagaaagcctcacatatctccgtttagaatcaggtcccttctccccagatgaagaggagggtctctgctttgttttctctatctcctcctcagacttgaccaggcccagcaggccccagaagaccattaccctatatcccttctcctccctagtcacatggccataggctggctgatggctcaggaaggccattgcaaggactcctcagctatgggagaggaagcacatcacccattgacccccgcaacccctccctttcctcctctgagtcccgactggggccacatgcagcctgacttctttgtgcctgttgctgtccctgcagtcttcagagggccaccgcagctccagtgccacggcaggaggctgttcctgaatagcccctgtggtaagggccaggagagtccttccatcctccaaggccctgctaaaggacacagcagccaggaagtcccctgggcccctagctgaaggacagcctgctccctccgtctctaccaggaatggccttgtcctatggaaggcactgccccatcccaaactaatctaggaatcactgtctaaccactcactgtcatgaatgtgtacttaaaggatgaggttgagtcataccaaatagtgatttcgatagttcaaaatggtgaaattagcaattctacatgattcagtctaatcaatggataccgactgtttcccacacaagtctcctgttctcttaagcttactcactgacagcctttcactctccacaaatacattaaagatatggccatcaccaagccccctaggatgacaccagacctgagagtctgaagacctggatccaagttctgacttttccccctgacagctgtgtgaccttcgtgaagtcgccaaacctctctgagccccagtcattgctagtaagacctgcctttgagttggtatgatgttcaagttagataacaaaatgtttatacccattagaacagagaataaatagaactacatttcttgcacttat

SEQ ID NO: 332801 - DNA, 2335 bp, Homo sapiens
  misc_feature (510)..(510): n is a, c, g, or t
  misc_feature (512)..(512): n is a, c, g, or t
  misc_feature (518)..(518): n is a, c, g, or t
  misc_feature (522)..(522): n is a, c, g, or t
  misc_feature (527)..(527): n is a, c, g, or t
  misc_feature (533)..(534): n is a, c, g, or t
  misc_feature (539)..(539): n is a, c, g, or t
  misc_feature (543)..(543): n is a, c, g, or t
  misc_feature (563)..(563): n is a, c, g, or t
  misc_feature (567)..(568): n is a, c, g, or t
  misc_feature (571)..(572): n is a, c, g, or t
  misc_feature (577)..(578): n is a, c, g, or t
  misc_feature (593)..(593): n is a, c, g, or t
  misc_feature (599)..(599): n is a, c, g, or t
  misc_feature (605)..(605): n is a, c, g, or t
  misc_feature (607)..(607): n is a, c, g, or t
  misc_feature (623)..(623): n is a, c, g, or t
  misc_feature (630)..(630): n is a, c, g, or t
  misc_feature (637)..(637): n is a, c, g, or t
  misc_feature (639)..(639): n is a, c, g, or t
  misc_feature (647)..(647): n is a, c, g, or t
  misc_feature (650)..(650): n is a, c, g, or t
  misc_feature (655)..(655): n is a, c, g, or t
  misc_feature (662)..(662): n is a, c, g, or t
  misc_feature (666)..(666): n is a, c, g, or t
  misc_feature (691)..(691): n is a, c, g, or t
  misc_feature (698)..(698): n is a, c, g, or t
  misc_feature (702)..(702): n is a, c, g, or t
  misc_feature (708)..(709): n is a, c, g, or t
  misc_feature (711)..(711): n is a, c, g, or t
  misc_feature (719)..(719): n is a, c, g, or t
  misc_feature (731)..(731): n is a, c, g, or t
  misc_feature (733)..(733): n is a, c, g, or t
  misc_feature (750)..(750): n is a, c, g, or t
  misc_feature (765)..(765): n is a, c, g, or t
ctttaccattcttccatggaagaagacaaaattcatctgagtgtagaaactaactatgctatggctcaggcccctctgggtatttctcctcaggaactgctcacctgtggggagagtgacttgtggtctgcttacccaaaataattcaatactcaaggctgggtggactctacagggcaatggtgtgactgaccagctctttcattgaagacatagaaagtacaagcagacccttctggcaggagctctaacatcaggcttccaatctagatttcatcagtaataaacattttggtttctatctcaggactcccaaatcgttcaattggacttgaactcagaagggaaactggatgttacttattgaactccaggtacacattatgtttcattaaaaaatatctatacaattatgacatcaagtagatgtcattggctactagaattatgtgggaaaacccttgtttgagtaagaggacttactatgtaaatatttttgaaaaagtggantnctggcngggngcagnggctcnngcctntaancccagcactttgggaggccnaggnnggnngatcnngaggtcaggagttcnagaccngcctgncnaacacggtgaaacccngctctantaaaaananaaaaattngcnaggcntggtggnacangcctgtaatcccagctatttgggangctgagncagnagaatnncntgaacccnggaggtggaggntncagtgagccgagatcangccactgcactccancctggactacaagagtgaaagcccgttctcaaaaaaaaaaaaaaaaaaaaaaaagtcctttcttcagtgaactctcatagggagggccaacagataaagtcagtaagagtgacactaacctggttaaggaagtgtgtggtttctcagagcacaccctgttctcatgctcctcccactcactgcccaatctttcctctccttcacttccaggctatctttagagaacttcagaatacaataatgaaaaccatgtctttgatcattaaacaccaaaaagtaactctgctactctcctcagcttcaggcaccaccactgacctgggacagtgaatcgacaatgccgtcttctgtctcgtggggcatcctcctgctggcaggcctgtgctgcctggtccctgtctccctggctgaggatccccagggagatgctgcccagaagacagatacatcccaccatgatcaggatcacccaaccttcaacaagatcacccccaacctggctgagttcgccttcagcctataccgccagctggcacaccagtccaacagcaccaatatcttcttctccccagtgagcatcgctacagcctttgcaatgctctccctggggaccaaggctgacagccagacagccagctccagctgaccaccggcaatggcctgttcctcagcgagggcctgaagctagtggataagtttttggaggatgttaaaaagttgtaccactcagaagccttcactgtcaacttcggggacaccgaagaggccaagaaacagatcaacgattacgtggagaagggtactcaagggaaaattgtggatttggtcaaggagcttgacagagacacagtttttgctctggtgaattacatcttctttaaaggcaaatgggagagaccctttgaagtcaaggacaccgaggaagaggacttccacgtggaccaggtgaccaccgtgaaggtgcctatgatgaagcgtttaggcatgtttaacatccagcactgtaagaagctgtccagctgggtgctgctgatgaaatacctgggcaatgccaccgccatcttcttcctgcctgatgaggggaaactacagcacctggaaaatgaactcacccacgatatcatcaccaagttcctggaaaatgaagacagaaggtctgccagcttacatttacccaaactgtccattactggaacctatgatctgaagagcgtcctgggtcaactgggcatcactaaggtcttcagcaatggggctgacctctccggggtcacagaggaggcacccctgaagctctccaaggccgtgcataaggctgtgctgaccatcgacgagaaagggactgaagctgctggggccatgtttttagaggccatacccatgtctatcccccccgaggtcaagttcaacaaaccctttgtcttcttaatgattgaacaaaataccaagtctcccctcttcatgggaaaagtggtgaatcccacccaaaaataactgcctctcgctcctcaacccctcccctccatccctggccccctccctggatgacattaaagaagggttgagctgg

SEQ ID NO: 332802 - DNA, 2368 bp, Homo sapiens
  misc_feature (510)..(510): n is a, c, g, or t
  misc_feature (512)..(512): n is a, c, g, or t
  misc_feature (518)..(518): n is a, c, g, or t
  misc_feature (522)..(522): n is a, c, g, or t
  misc_feature (527)..(527): n is a, c, g, or t
  misc_feature (533)..(534): n is a, c, g, or t
  misc_feature (539)..(539): n is a, c, g, or t
  misc_feature (543)..(543): n is a, c, g, or t
  misc_feature (563)..(563): n is a, c, g, or t
  misc_feature (567)..(568): n is a, c, g, or t
  misc_feature (571)..(572): n is a, c, g, or t
  misc_feature (577)..(578): n is a, c, g, or t
  misc_feature (593)..(593): n is a, c, g, or t
  misc_feature (599)..(599): n is a, c, g, or t
  misc_feature (605)..(605): n is a, c, g, or t
  misc_feature (607)..(607): n is a, c, g, or t
  misc_feature (623)..(623): n is a, c, g, or t
  misc_feature (630)..(630): n is a, c, g, or t
  misc_feature (637)..(637): n is a, c, g, or t
  misc_feature (639)..(639): n is a, c, g, or t
  misc_feature (647)..(647): n is a, c, g, or t
  misc_feature (650)..(650): n is a, c, g, or t
  misc_feature (655)..(655): n is a, c, g, or t
  misc_feature (662)..(662): n is a, c, g, or t
  misc_feature (666)..(666): n is a, c, g, or t
  misc_feature (691)..(691): n is a, c, g, or t
  misc_feature (698)..(698): n is a, c, g, or t
  misc_feature (702)..(702): n is a, c, g, or t
  misc_feature (708)..(709): n is a, c, g, or t
  misc_feature (711)..(711): n is a, c, g, or t
  misc_feature (719)..(719): n is a, c, g, or t
  misc_feature (731)..(731): n is a, c, g, or t
  misc_feature (733)..(733): n is a, c, g, or t
  misc_feature (750)..(750): n is a, c, g, or t
  misc_feature (765)..(765): n is a, c, g, or t
ctttaccattcttccatggaagaagacaaaattcatctgagtgtagaaactaactatgctatggctcaggcccctctgggtatttctcctcaggaactgctcacctgtggggagagtgacttgtggtctgcttacccaaaataattcaatactcaaggctgggtggactctacagggcaatggtgtgactgaccagctctttcattgaagacatagaaagtacaagcagacccttctggcaggagctctaacatcaggcttccaatctagatttcatcagtaataaacattttggtttctatctcaggactcccaaatcgttcaattggacttgaactcagaagggaaactggatgttacttattgaactccaggtacacattatgtttcattaaaaaatatctatacaattatgacatcaagtagatgtcattggctactagaattatgtgggaaaacccttgtttgagtaagaggacttactatgtaaatatttttgaaaaagtggantnctggcngggngcagnggctcnngcctntaancccagcactttgggaggccnaggnnggnngatcnngaggtcaggagttcnagaccngcctgncnaacacggtgaaacccngctctantaaaaananaaaaattngcnaggcntggtggnacangcctgtaatcccagctatttgggangctgagncagnagaatnncntgaacccnggaggtggaggntncagtgagccgagatcangccactgcactccancctggactacaagagtgaaagcccgttctcaaaaaaaaaaaaaaaaaaaaaaaagtcctttcttcagtgaactctcatagggagggccaacagataaagtcagtaagagtgacactaacctggttaaggaagtgtgtggtttctcagagcacaccctgttctcatgctcctcccactcactgcccaatctttcctctccttcacttccaggctatctttagagaacttcagaatacaataatgaaaaccatgtctttgatcattaaacaccaaaaagtaactctgctactctcctcagcttcaggcaccaccactgacctgggacagtgaatcgacaatgccgtcttctgtctcgtggggcatcctcctgctggcaggcctgtgctgcctggtccctgtctccctggctgaggatccccagggagatgctgcccagaagacagatacatcccaccatgatcaggatcacccaaccttcaacaagatcacccccaacctggctgagttcgccttcagcctataccgccagctggcacaccagtccaacagcaccaatatcttcttctccccagtgagcatcgctacagcctttgcaatgctctccctggggaccaaggctgacactcacgatgaaatcctggagggcctgaatttcaacctcacggagattccggaggctcagatccatgaaggcttccaggaactcctccgtaccctcaaccagccagacagccagctccagctgaccaccggcaatggcctgttcctcagcgagggcctgaagctagtggataagtttttggaggatgttaaaaagttgtaccactcagaagccttcactgtcaacttcggggacaccgaagaggccaagaaacagatcaacgattacgtggagaagggtactcaagggaaaattgcaaatgggagagaccctttgaagtcaaggacaccgaggaagaggacttccacgtggaccaggtgaccaccgtgaaggtgcctatgatgaagcgtttaggcatgtttaacatccagcactgtaagaagctgtccagctgggtgctgctgatgaaatacctgggcaatgccaccgccatcttcttcctgcctgatgaggggaaactacagcacctggaaaatgaactcacccacgatatcatcaccaagttcctggaaaatgaagacagaaggtctgccagcttacatttacccaaactgtccattactggaacctatgatctgaagagcgtcctgggtcaactgggcatcactaaggtcttcagcaatggggctgacctctccggggtcacagaggaggcacccctgaagctctccaaggccgtgcataaggctgtgctgaccatcgacgagaaagggactgaagctgctggggccatgtttttagaggccatacccatgtctatcccccccgaggtcaagttcaacaaaccctttgtcttcttaatgattgaacaaaataccaagtctcccctcttcatgggaaaagtggtgaatcccacccaaaaataactgcctctcgctcctcaacccctcccctccatccctggccccctccctggatgacattaaagaagggttgagctgg

SEQ ID NO: 332803 - DNA, 2381 bp, Homo sapiens
  misc_feature (510)..(510): n is a, c, g, or t
  misc_feature (512)..(512): n is a, c, g, or t
  misc_feature (518)..(518): n is a, c, g, or t
  misc_feature (522)..(522): n is a, c, g, or t
  misc_feature (527)..(527): n is a, c, g, or t
  misc_feature (533)..(534): n is a, c, g, or t
  misc_feature (539)..(539): n is a, c, g, or t
  misc_feature (543)..(543): n is a, c, g, or t
  misc_feature (563)..(563): n is a, c, g, or t
  misc_feature (567)..(568): n is a, c, g, or t
  misc_feature (571)..(572): n is a, c, g, or t
  misc_feature (577)..(578): n is a, c, g, or t
  misc_feature (593)..(593): n is a, c, g, or t
  misc_feature (599)..(599): n is a, c, g, or t
  misc_feature (605)..(605): n is a, c, g, or t
  misc_feature (607)..(607): n is a, c, g, or t
  misc_feature (623)..(623): n is a, c, g, or t
  misc_feature (630)..(630): n is a, c, g, or t
  misc_feature (637)..(637): n is a, c, g, or t
  misc_feature (639)..(639): n is a, c, g, or t
  misc_feature (647)..(647): n is a, c, g, or t
  misc_feature (650)..(650): n is a, c, g, or t
  misc_feature (655)..(655): n is a, c, g, or t
  misc_feature (662)..(662): n is a, c, g, or t
  misc_feature (666)..(666): n is a, c, g, or t
  misc_feature (691)..(691): n is a, c, g, or t
  misc_feature (698)..(698): n is a, c, g, or t
  misc_feature (702)..(702): n is a, c, g, or t
  misc_feature (708)..(709): n is a, c, g, or t
  misc_feature (711)..(711): n is a, c, g, or t
  misc_feature (719)..(719): n is a, c, g, or t
  misc_feature (731)..(731): n is a, c, g, or t
  misc_feature (733)..(733): n is a, c, g, or t
  misc_feature (750)..(750): n is a, c, g, or t
  misc_feature (765)..(765): n is a, c, g, or t
ctttaccattcttccatggaagaagacaaaattcatctgagtgtagaaactaactatgctatggctcaggcccctctgggtatttctcctcaggaactgctcacctgtggggagagtgacttgtggtctgcttacccaaaataattcaatactcaaggctgggtggactctacagggcaatggtgtgactgaccagctctttcattgaagacatagaaagtacaagcagacccttctggcaggagctctaacatcaggcttccaatctagatttcatcagtaataaacattttggtttctatctcaggactcccaaatcgttcaattggacttgaactcagaagggaaactggatgttacttattgaactccaggtacacattatgtttcattaaaaaatatctatacaattatgacatcaagtagatgtcattggctactagaattatgtgggaaaacccttgtttgagtaagaggacttactatgtaaatatttttgaaaaagtggantnctggcngggngcagnggctcnngcctntaancccagcactttgggaggccnaggnnggnngatcnngaggtcaggagttcnagaccngcctgncnaacacggtgaaacccngctctantaaaaananaaaaattngcnaggcntggtggnacangcctgtaatcccagctatttgggangctgagncagnagaatnncntgaacccnggaggtggaggntncagtgagccgagatcangccactgcactccancctggactacaagagtgaaagcccgttctcaaaaaaaaaaaaaaaaaaaaaaaagtcctttcttcagtgaactctcatagggagggccaacagataaagtcagtaagagtgacactaacctggttaaggaagtgtgtggtttctcagagcacaccctgttctcatgctcctcccactcactgcccaatctttcctctccttcacttccaggctatctttagagaacttcagaatacaataatgaaaaccatgtctttgatcattaaacaccaaaaagtaactctgctactctcctcagcttcaggcaccaccactgacctgggacagtgaatcgacaatgccgtcttctgtctcgtggggcatcctcctgctggcaggcctgtgctgcctggtccctgtctccctggctgaggatccccagggagatgctgcccagaagacagatacatcccaccatgatcaggatcacccaaccttcaacaagatcacccccaacctggctgagttcgccttcagcctataccgccagctggcacaccagtccaacagcaccaatatcttcttctccccagtgagcatcgctacagcctttgcaatgctctccctggggaccaaggctgacactcacgatgaaatcctggagggcctgaatttcaacctcacggagattccggaggctcagatccatgaaggcttccaggaactcctccgtaccctcaaccagccagacagccagctccagctgaccaccggcaatggcctgttcctcagcgagggcctgaagctagtggataagtttttggaggatgttaccaagaaacagatcaacgattacgtggagaagggtactcaagggaaaattgtggatttggtcaaggagcttgacagagacacagtttttgctctggtgaattacatcttctttaaaggcaaatgggagagaccctttgaagtcaaggacaccgaggaagaggacttccacgtggaccaggtgaccaccgtgaaggtgcctatgatgaagcgtttaggcatgtttaacatccagcactgtaagaagctgtccagctgggtgctgctgatgaaatacctgggcaatgccaccgccatcttcttcctgcctgatgaggggaaactacagcacctggaaaatgaactcacccacgatatcatcaccaagttcctggaaaatgaagacagaaggtctgccagcttacatttacccaaactgtccattactggaacctatgatctgaagagcgtcctgggtcaactgggcatcactaaggtcttcagcaatggggctgacctctccggggtcacagaggaggcacccctgaagctctccaaggccgtgcataaggctgtgctgaccatcgacgagaaagggactgaagctgctggggccatgtttttagaggccatacccatgtctatcccccccgaggtcaagttcaacaaaccctttgtcttcttaatgattgaacaaaataccaagtctcccctcttcatgggaaaagtggtgaatcccacccaaaaataactgcctctcgctcctcaacccctcccctccatccctggccccctccctggatgacattaaagaagggttgagctgg

SEQ ID NO: 332804 - DNA, 2447 bp, Homo sapiens
  misc_feature (510)..(510): n is a, c, g, or t
  misc_feature (512)..(512): n is a, c, g, or t
  misc_feature (518)..(518): n is a, c, g, or t
  misc_feature (522)..(522): n is a, c, g, or t
  misc_feature (527)..(527): n is a, c, g, or t
  misc_feature (533)..(534): n is a, c, g, or t
  misc_feature (539)..(539): n is a, c, g, or t
  misc_feature (543)..(543): n is a, c, g, or t
  misc_feature (563)..(563): n is a, c, g, or t
  misc_feature (567)..(568): n is a, c, g, or t
  misc_feature (571)..(572): n is a, c, g, or t
  misc_feature (577)..(578): n is a, c, g, or t
  misc_feature (593)..(593): n is a, c, g, or t
  misc_feature (599)..(599): n is a, c, g, or t
  misc_feature (605)..(605): n is a, c, g, or t
  misc_feature (607)..(607): n is a, c, g, or t
  misc_feature (623)..(623): n is a, c, g, or t
  misc_feature (630)..(630): n is a, c, g, or t
  misc_feature (637)..(637): n is a, c, g, or t
  misc_feature (639)..(639): n is a, c, g, or t
  misc_feature (647)..(647): n is a, c, g, or t
  misc_feature (650)..(650): n is a, c, g, or t
  misc_feature (655)..(655): n is a, c, g, or t
  misc_feature (662)..(662): n is a, c, g, or t
  misc_feature (666)..(666): n is a, c, g, or t
  misc_feature (691)..(691): n is a, c, g, or t
  misc_feature (698)..(698): n is a, c, g, or t
  misc_feature (702)..(702): n is a, c, g, or t
  misc_feature (708)..(709): n is a, c, g, or t
  misc_feature (711)..(711): n is a, c, g, or t
  misc_feature (719)..(719): n is a, c, g, or t
  misc_feature (731)..(731): n is a, c, g, or t
  misc_feature (733)..(733): n is a, c, g, or t
  misc_feature (750)..(750): n is a, c, g, or t
  misc_feature (765)..(765): n is a, c, g, or t
ctttaccattcttccatggaagaagacaaaattcatctgagtgtagaaactaactatgctatggctcaggcccctctgggtatttctcctcaggaactgctcacctgtggggagagtgacttgtggtctgcttacccaaaataattcaatactcaaggctgggtggactctacagggcaatggtgtgactgaccagctctttcattgaagacatagaaagtacaagcagacccttctggcaggagctctaacatcaggcttccaatctagatttcatcagtaataaacattttggtttctatctcaggactcccaaatcgttcaattggacttgaactcagaagggaaactggatgttacttattgaactccaggtacacattatgtttcattaaaaaatatctatacaattatgacatcaagtagatgtcattggctactagaattatgtgggaaaacccttgtttgagtaagaggacttactatgtaaatatttttgaaaaagtggantnctggcngggngcagnggctcnngcctntaancccagcactttgggaggccnaggnnggnngatcnngaggtcaggagttcnagaccngcctgncnaacacggtgaaacccngctctantaaaaananaaaaattngcnaggcntggtggnacangcctgtaatcccagctatttgggangctgagncagnagaatnncntgaacccnggaggtggaggntncagtgagccgagatcangccactgcactccancctggactacaagagtgaaagcccgttctcaaaaaaaaaaaaaaaaaaaaaaaagtcctttcttcagtgaactctcatagggagggccaacagataaagtcagtaagagtgacactaacctggttaaggaagtgtgtggtttctcagagcacaccctgttctcatgctcctcccactcactgcccaatctttcctctccttcacttccaggctatctttagagaacttcagaatacaataatgaaaaccatgtctttgatcattaaacaccaaaaagtaactctgctactctcctcagcttcaggcaccaccactgacctgggacagtgaatcgacaatgccgtcttctgtctcgtggggcatcctcctgctggcaggcctgtgctgcctggtccctgtctccctggctgaggatccccagggagatgctgcccagaagacagatacatcccaccatgatcaggatcacccaaccttcaacaagatcacccccaacctggctgagttcgccttcagcctataccgccagctggcacaccagtccaacagcaccaatatcttcttctccccagtgagcatcgctacagcctttgcaatgctctccctggggaccaaggctgacactcacgatgaaatcctggagggcctgaatttcaacctcacggagattccggaggctcagatccatgaaggcttccaggaactcctccgtaccctcaaccagccagacagccagctccagctgaccaccggcaatggcctgttcctcagcgagggcctgaagctagtggataagtttttggaggatgttaaaaagttgtaccactcagaagccttcactgtcaacttcggggacaccgaagaggccaagaaacagatcaacgattacgtggagaagggtactcaagggaaaattgcaaatgggagagaccctttgaagtcaaggacaccgaggaagaggacttccacgtggaccaggtgaccaccgtgaaggtgcctatgatgaagcgtttaggcatgtttaacatccagcactgtaagaagctgtccagctgggtgctgctgatgaaatacctgggcaatgccaccgccatcttcttcctgcctgatgaggggaaactacagcacctggaaaatgaactcacccacgatatcatcaccaagttcctggaaaatgaagacagaaggtctgccagcttacatttacccaaactgtccattactggaacctatgatctgaagagcgtcctgggtcaactgggcatcactaaggtcttcagcaatggggctgacctctccggggtcacagaggaggcacccctgaagctctccaaggccgtgcataaggctgtgctgaccatcgacgagaaagggactgaagctgctggggccatgtttttagaggccatacccatgtctatcccccccgaggtcaagttcaacaaaccctttgtcttcttaatgattgaacaaaataccaagtctcccctcttcatgggaaaagtggtgaatcccacccaaaaataactgcctctcgctcctcaacccctcccctccatccctggccccctccctggatgacattaaagaagggttgagctggaaacaatcagattacaaaagaaaaaaaagagcaaaacaacgtatggtggtcgctcgagctgggaaaagttataacccgg

SEQ ID NO: 332805 - DNA, 3569 bp, Homo sapiens
  misc_feature (510)..(510): n is a, c, g, or t
  misc_feature (512)..(512): n is a, c, g, or t
  misc_feature (518)..(518): n is a, c, g, or t
  misc_feature (522)..(522): n is a, c, g, or t
  misc_feature (527)..(527): n is a, c, g, or t
  misc_feature (533)..(534): n is a, c, g, or t
  misc_feature (539)..(539): n is a, c, g, or t
  misc_feature (543)..(543): n is a, c, g, or t
  misc_feature (563)..(563): n is a, c, g, or t
  misc_feature (567)..(568): n is a, c, g, or t
  misc_feature (571)..(572): n is a, c, g, or t
  misc_feature (577)..(578): n is a, c, g, or t
  misc_feature (593)..(593): n is a, c, g, or t
  misc_feature (599)..(599): n is a, c, g, or t
  misc_feature (605)..(605): n is a, c, g, or t
  misc_feature (607)..(607): n is a, c, g, or t
  misc_feature (623)..(623): n is a, c, g, or t
  misc_feature (630)..(630): n is a, c, g, or t
  misc_feature (637)..(637): n is a, c, g, or t
  misc_feature (639)..(639): n is a, c, g, or t
  misc_feature (647)..(647): n is a, c, g, or t
  misc_feature (650)..(650): n is a, c, g, or t
  misc_feature (655)..(655): n is a, c, g, or t
  misc_feature (662)..(662): n is a, c, g, or t
  misc_feature (666)..(666): n is a, c, g, or t
  misc_feature (691)..(691): n is a, c, g, or t
  misc_feature (698)..(698): n is a, c, g, or t
  misc_feature (702)..(702): n is a, c, g, or t
  misc_feature (708)..(709): n is a, c, g, or t
  misc_feature (711)..(711): n is a, c, g, or t
  misc_feature (719)..(719): n is a, c, g, or t
  misc_feature (731)..(731): n is a, c, g, or t
  misc_feature (733)..(733): n is a, c, g, or t
  misc_feature (750)..(750): n is a, c, g, or t
  misc_feature (765)..(765): n is a, c, g, or t
ctttaccattcttccatggaagaagacaaaattcatctgagtgtagaaactaactatgctatggctcaggcccctctgggtatttctcctcaggaactgctcacctgtggggagagtgacttgtggtctgcttacccaaaataattcaatactcaaggctgggtggactctacagggcaatggtgtgactgaccagctctttcattgaagacatagaaagtacaagcagacccttctggcaggagctctaacatcaggcttccaatctagatttcatcagtaataaacattttggtttctatctcaggactcccaaatcgttcaattggacttgaactcagaagggaaactggatgttacttattgaactccaggtacacattatgtttcattaaaaaatatctatacaattatgacatcaagtagatgtcattggctactagaattatgtgggaaaacccttgtttgagtaagaggacttactatgtaaatatttttgaaaaagtggantnctggcngggngcagnggctcnngcctntaancccagcactttgggaggccnaggnnggnngatcnngaggtcaggagttcnagaccngcctgncnaacacggtgaaacccngctctantaaaaananaaaaattngcnaggcntggtggnacangcctgtaatcccagctatttgggangctgagncagnagaatnncntgaacccnggaggtggaggntncagtgagccgagatcangccactgcactccancctggactacaagagtgaaagcccgttctcaaaaaaaaaaaaaaaaaaaaaaaagtcctttcttcagtgaactctcatagggagggccaacagataaagtcagtaagagtgacactaacctggttaaggaagtgtgtggtttctcagagcacaccctgttctcatgctcctcccactcactgcccaatctttcctctccttcacttccaggctatctttagagaacttcagaatacaataatgaaaaccatgtctttgatcattaaacaccaaaaagtaactctgctactctcctcagcttcaggcaccaccactgacctgggacagtgaatcgacaatgccgtcttctgtctcgtggggcatcctcctgctggcaggcctgtgctgcctggtccctgtctccctggctgaggatccccagggagatgctgcccagaagacagatacatcccaccatgatcaggatcacccaaccttcaacaagatcacccccaacctggctgagttcgccttcagcctataccgccagctggcacaccagtccaacagcaccaatatcttcttctccccagtgagcatcgctacagcctttgcaatgctctccctggggaccaaggctgacactcacgatgaaatcctggagggcctgaatttcaacctcacggagattccggaggctcagatccatgaaggcttccaggaactcctccgtaccctcaaccagccagacagccagctccagctgaccaccggcaatggcctgttcctcagcgagggcctgaagctagtggataagtttttggaggatgttaaaaagttgtaccactcagaagccttcactgtcaacttcggggacaccgaagaggccaagaaacagatcaacgattacgtggagaagggtactcaagggaaaattgtggatttggtcaaggagcttgacagagacacagtttttgctctggtgaattacatcttctttaaaggcaaatgggagagaccctttgaaagttcaacaaaccctttgtcttcttaatgattgaacaaaataccaagtctcccctcttcatgggaaaagtggtgaatcccacccaaaaataactgcctctcgctcctcaacccctcccctccatccctggccccctccctggatgacattaaagaagggttgagctggccctgcctgcatgtgactgtaaatccctcccatgttttctctgagtctccctttgcctgctgaggctgtatgtgggctccaggtaacagtgctgtcttcgggccccctgaactgtgttcatggagcatctggctgggtaggcacatgctgggcttgaatccaggggggactgaatcctcagcttacggacctgggcccatctgtttctggagggctccagtcttccttgtcctgtcttggagtccccaagaaggaatcacaggggaggaaccagataccagccatgaccccaggctccaccaagcatcttcatgtccccctgctcatcccccactcccccccacccagagttgctcatcctgccagggctggctgtgcccaccccaaggctgccctcctgggggccccagaactgcctgatcgtgccgtggcccagttttgtggcatctgcagcaacacaagagagaggacaatgtcctcctcttgacccgctgtcacctaaccagactcgggccctgcacctctcaggcacttctggaaaatgactgaggcagattcttcctgaagcccattctccatggggcaacaaggacacctattctgtccttgtccttccatcgctgccccagaaagcctcacatatctccgtttagaatcaggtcccttctccccagatgaagaggagggtctctgctttgttttctctatctcctcctcagacttgaccaggcccagcaggccccagaagaccattaccctatatcccttctcctccctagtcacatggccataggctggctgatggctcaggaaggccattgcaaggactcctcagctatgggagaggaagcacatcacccattgacccccgcaacccctccctttcctcctctgagtcccgactggggccacatgcagcctgacttctttgtgcctgttgctgtccctgcagtcttcagagggccaccgcagctccagtgccacggcaggaggctgttcctgaatagcccctgtggtaagggccaggagagtccttccatcctccaaggccctgctaaaggacacagcagccaggaagtcccctgggcccctagctgaaggacagcctgctccctccgtctctaccaggaatggccttgtcctatggaaggcactgccccatcccaaactaatctaggaatcactgtctaaccactcactgtcatgaatgtgtacttaaaggatgaggttgagtcataccaaatagtgatttcgatagttcaaaatggtgaaattagcaattctacatgattcagtctaatcaatggataccgactgtttcccacacaagtctcctgttctcttaagcttactcactgacagcctttcactctccacaaatacattaaagatatggccatcaccaagccccctaggatgacaccagacctgagagtctgaagacctggatccaagttctgacttttccccctgacagctgtgtgaccttcgtgaagtcgccaaacctctctgagccccagtcattgctagtaagacctgcctttgagttggtatgatgttcaagttagataacaaaatgtttatacccattagaacagagaataaatagaactacatttcttgcacttat

SEQ ID NO: 332806 - DNA, 3546 bp, Homo sapiens
  misc_feature (510)..(510): n is a, c, g, or t
  misc_feature (512)..(512): n is a, c, g, or t
  misc_feature (518)..(518): n is a, c, g, or t
  misc_feature (522)..(522): n is a, c, g, or t
  misc_feature (527)..(527): n is a, c, g, or t
  misc_feature (533)..(534): n is a, c, g, or t
  misc_feature (539)..(539): n is a, c, g, or t
  misc_feature (543)..(543): n is a, c, g, or t
  misc_feature (563)..(563): n is a, c, g, or t
  misc_feature (567)..(568): n is a, c, g, or t
  misc_feature (571)..(572): n is a, c, g, or t
  misc_feature (577)..(578): n is a, c, g, or t
  misc_feature (593)..(593): n is a, c, g, or t
  misc_feature (599)..(599): n is a, c, g, or t
  misc_feature (605)..(605): n is a, c, g, or t
  misc_feature (607)..(607): n is a, c, g, or t
  misc_feature (623)..(623): n is a, c, g, or t
  misc_feature (630)..(630): n is a, c, g, or t
  misc_feature (637)..(637): n is a, c, g, or t
  misc_feature (639)..(639): n is a, c, g, or t
  misc_feature (647)..(647): n is a, c, g, or t
  misc_feature (650)..(650): n is a, c, g, or t
  misc_feature (655)..(655): n is a, c, g, or t
  misc_feature (662)..(662): n is a, c, g, or t
  misc_feature (666)..(666): n is a, c, g, or t
  misc_feature (691)..(691): n is a, c, g, or t
  misc_feature (698)..(698): n is a, c, g, or t
  misc_feature (702)..(702): n is a, c, g, or t
  misc_feature (708)..(709): n is a, c, g, or t
  misc_feature (711)..(711): n is a, c, g, or t
  misc_feature (719)..(719): n is a, c, g, or t
  misc_feature (731)..(731): n is a, c, g, or t
  misc_feature (733)..(733): n is a, c, g, or t
  misc_feature (750)..(750): n is a, c, g, or t
  misc_feature (765)..(765): n is a, c, g, or t
ctttaccattcttccatggaagaagacaaaattcatctgagtgtagaaactaactatgctatggctcaggcccctctgggtatttctcctcaggaactgctcacctgtggggagagtgacttgtggtctgcttacccaaaataattcaatactcaaggctgggtggactctacagggcaatggtgtgactgaccagctctttcattgaagacatagaaagtacaagcagacccttctggcaggagctctaacatcaggcttccaatctagatttcatcagtaataaacattttggtttctatctcaggactcccaaatcgttcaattggacttgaactcagaagggaaactggatgttacttattgaactccaggtacacattatgtttcattaaaaaatatctatacaattatgacatcaagtagatgtcattggctactagaattatgtgggaaaacccttgtttgagtaagaggacttactatgtaaatatttttgaaaaagtggantnctggcngggngcagnggctcnngcctntaancccagcactttgggaggccnaggnnggnngatcnngaggtcaggagttcnagaccngcctgncnaacacggtgaaacccngctctantaaaaananaaaaattngcnaggcntggtggnacangcctgtaatcccagctatttgggangctgagncagnagaatnncntgaacccnggaggtggaggntncagtgagccgagatcangccactgcactccancctggactacaagagtgaaagcccgttctcaaaaaaaaaaaaaaaaaaaaaaaagtcctttcttcagtgaactctcatagggagggccaacagataaagtcagtaagagtgacactaacctggttaaggaagtgtgtggtttctcagagcacaccctgttctcatgctcctcccactcactgcccaatctttcctctccttcacttccaggctatctttagagaacttcagaatacaataatgaaaaccatgtctttgatcattaaacaccaaaaagtaactctgctactctcctcagcttcaggcaccaccactgacctgggacagtgaatcgacaatgccgtcttctgtctcgtggggcatcctcctgctggcaggcctgtgctgcctggtccctgtctccctggctgaggatccccagggagatgctgcccagaagacagatacatcccaccatgatcaggatcacccaaccttcaacaagatcacccccaacctggctgagttcgccttcagcctataccgccagctggcacaccagtccaacagcaccaatatcttcttctccccagtgagcatcgctacagcctttgcaatgctctccctggggaccaaggctgacactcacgatgaaatcctggagggcctgaatttcaacctcacggagattccggaggctcagatccatgaaggcttccaggaactcctccgtaccctcaaccagccagacagccagctccagctgaccaccggcaatggcctgttcctcagcgagggcctgaagctagtggataagtttttggaggatgttaaaaagttgtaccactcagaagccttcactgtcaacttcggggacaccgaagaggccaagaaacagatcaacgattacgtggagaagggtactcaagggaaaattgtggatttggtcaaggagcttgacagagacacagtttttgctctggtgaattacatcttctttaaagagttcaacaaaccctttgtcttcttaatgattgaacaaaataccaagtctcccctcttcatgggaaaagtggtgaatcccacccaaaaataactgcctctcgctcctcaacccctcccctccatccctggccccctccctggatgacattaaagaagggttgagctggccctgcctgcatgtgactgtaaatccctcccatgttttctctgagtctccctttgcctgctgaggctgtatgtgggctccaggtaacagtgctgtcttcgggccccctgaactgtgttcatggagcatctggctgggtaggcacatgctgggcttgaatccaggggggactgaatcctcagcttacggacctgggcccatctgtttctggagggctccagtcttccttgtcctgtcttggagtccccaagaaggaatcacaggggaggaaccagataccagccatgaccccaggctccaccaagcatcttcatgtccccctgctcatcccccactcccccccacccagagttgctcatcctgccagggctggctgtgcccaccccaaggctgccctcctgggggccccagaactgcctgatcgtgccgtggcccagttttgtggcatctgcagcaacacaagagagaggacaatgtcctcctcttgacccgctgtcacctaaccagactcgggccctgcacctctcaggcacttctggaaaatgactgaggcagattcttcctgaagcccattctccatggggcaacaaggacacctattctgtccttgtccttccatcgctgccccagaaagcctcacatatctccgtttagaatcaggtcccttctccccagatgaagaggagggtctctgctttgttttctctatctcctcctcagacttgaccaggcccagcaggccccagaagaccattaccctatatcccttctcctccctagtcacatggccataggctggctgatggctcaggaaggccattgcaaggactcctcagctatgggagaggaagcacatcacccattgacccccgcaacccctccctttcctcctctgagtcccgactggggccacatgcagcctgacttctttgtgcctgttgctgtccctgcagtcttcagagggccaccgcagctccagtgccacggcaggaggctgttcctgaatagcccctgtggtaagggccaggagagtccttccatcctccaaggccctgctaaaggacacagcagccaggaagtcccctgggcccctagctgaaggacagcctgctccctccgtctctaccaggaatggccttgtcctatggaaggcactgccccatcccaaactaatctaggaatcactgtctaaccactcactgtcatgaatgtgtacttaaaggatgaggttgagtcataccaaatagtgatttcgatagttcaaaatggtgaaattagcaattctacatgattcagtctaatcaatggataccgactgtttcccacacaagtctcctgttctcttaagcttactcactgacagcctttcactctccacaaatacattaaagatatggccatcaccaagccccctaggatgacaccagacctgagagtctgaagacctggatccaagttctgacttttccccctgacagctgtgtgaccttcgtgaagtcgccaaacctctctgagccccagtcattgctagtaagacctgcctttgagttggtatgatgttcaagttagataacaaaatgtttatacccattagaacagagaataaatagaactacatttcttgcacttat

SEQ ID NO: 332807 - DNA, 1718 bp, Homo sapiens
  misc_feature (510)..(510): n is a, c, g, or t
  misc_feature (512)..(512): n is a, c, g, or t
  misc_feature (518)..(518): n is a, c, g, or t
  misc_feature (522)..(522): n is a, c, g, or t
  misc_feature (527)..(527): n is a, c, g, or t
  misc_feature (533)..(534): n is a, c, g, or t
  misc_feature (539)..(539): n is a, c, g, or t
  misc_feature (543)..(543): n is a, c, g, or t
  misc_feature (563)..(563): n is a, c, g, or t
  misc_feature (567)..(568): n is a, c, g, or t
  misc_feature (571)..(572): n is a, c, g, or t
  misc_feature (577)..(578): n is a, c, g, or t
  misc_feature (593)..(593): n is a, c, g, or t
  misc_feature (599)..(599): n is a, c, g, or t
  misc_feature (605)..(605): n is a, c, g, or t
  misc_feature (607)..(607): n is a, c, g, or t
  misc_feature (623)..(623): n is a, c, g, or t
  misc_feature (630)..(630): n is a, c, g, or t
  misc_feature (637)..(637): n is a, c, g, or t
  misc_feature (639)..(639): n is a, c, g, or t
  misc_feature (647)..(647): n is a, c, g, or t
  misc_feature (650)..(650): n is a, c, g, or t
  misc_feature (655)..(655): n is a, c, g, or t
  misc_feature (662)..(662): n is a, c, g, or t
  misc_feature (666)..(666): n is a, c, g, or t
  misc_feature (691)..(691): n is a, c, g, or t
  misc_feature (698)..(698): n is a, c, g, or t
  misc_feature (702)..(702): n is a, c, g, or t
  misc_feature (708)..(709): n is a, c, g, or t
  misc_feature (711)..(711): n is a, c, g, or t
  misc_feature (719)..(719): n is a, c, g, or t
  misc_feature (731)..(731): n is a, c, g, or t
  misc_feature (733)..(733): n is a, c, g, or t
  misc_feature (750)..(750): n is a, c, g, or t
  misc_feature (765)..(765): n is a, c, g, or t
ctttaccattcttccatggaagaagacaaaattcatctgagtgtagaaactaactatgctatggctcaggcccctctgggtatttctcctcaggaactgctcacctgtggggagagtgacttgtggtctgcttacccaaaataattcaatactcaaggctgggtggactctacagggcaatggtgtgactgaccagctctttcattgaagacatagaaagtacaagcagacccttctggcaggagctctaacatcaggcttccaatctagatttcatcagtaataaacattttggtttctatctcaggactcccaaatcgttcaattggacttgaactcagaagggaaactggatgttacttattgaactccaggtacacattatgtttcattaaaaaatatctatacaattatgacatcaagtagatgtcattggctactagaattatgtgggaaaacccttgtttgagtaagaggacttactatgtaaatatttttgaaaaagtggantnctggcngggngcagnggctcnngcctntaancccagcactttgggaggccnaggnnggnngatcnngaggtcaggagttcnagaccngcctgncnaacacggtgaaacccngctctantaaaaananaaaaattngcnaggcntggtggnacangcctgtaatcccagctatttgggangctgagncagnagaatnncntgaacccnggaggtggaggntncagtgagccgagatcangccactgcactccancctggactacaagagtgaaagcccgttctcaaaaaaaaaaaaaaaaaaaaaaaagtcctttcttcagtgaactctcatagggagggccaacagataaagtcagtaagagtgacactaacctggttaaggaagtgtgtggtttctcagagcacaccctgttctcatgctcctcccactcactgcccaatctttcctctccttcacttccaggctatctttagagaacttcagaatacaataatgaaaaccatgtctttgatcattaaacaccaaaaagtaactctgctactctcctcagcttcaggcaccaccactgacctgggacagtgaatcgacaatgccgtcttctgtctcgtggggcatcctcctgctggcaggcctgtgctgcctggtccctgtctccctggctgaggatccccagggagatgctgcccagaagacagatacatcccaccatgatcaggatcacccaaccttcaacaagatcaccctcacccacgatatcatcaccaagttcctggaaaatgaagacagaaggtctgccagcttacatttacccaaactgtccattactggaacctatgatctgaagagcgtcctgggtcaactgggcatcactaaggtcttcagcaatggggctgacctctccggggtcacagaggaggcacccctgaagctctccaaggccgtgcataaggctgtgctgaccatcgacgagaaagggactgaagctgctggggccatgtttttagaggccatacccatgtctatcccccccgaggtcaagttcaacaaaccctttgtcttcttaatgattgaacaaaataccaagtctcccctcttcatgggaaaagtggtgaatcccacccaaaaataactgcctctcgctcctcaacccctcccctccatccctggccccctccctggatgacattaaagaagggttgagctgg

SEQ ID NO: 332808 - DNA, 2404 bp, Homo sapiens
  misc_feature (510)..(510): n is a, c, g, or t
  misc_feature (512)..(512): n is a, c, g, or t
  misc_feature (518)..(518): n is a, c, g, or t
  misc_feature (522)..(522): n is a, c, g, or t
  misc_feature (527)..(527): n is a, c, g, or t
  misc_feature (533)..(534): n is a, c, g, or t
  misc_feature (539)..(539): n is a, c, g, or t
  misc_feature (543)..(543): n is a, c, g, or t
  misc_feature (563)..(563): n is a, c, g, or t
  misc_feature (567)..(568): n is a, c, g, or t
  misc_feature (571)..(572): n is a, c, g, or t
  misc_feature (577)..(578): n is a, c, g, or t
  misc_feature (593)..(593): n is a, c, g, or t
  misc_feature (599)..(599): n is a, c, g, or t
  misc_feature (605)..(605): n is a, c, g, or t
  misc_feature (607)..(607): n is a, c, g, or t
  misc_feature (623)..(623): n is a, c, g, or t
  misc_feature (630)..(630): n is a, c, g, or t
  misc_feature (637)..(637): n is a, c, g, or t
  misc_feature (639)..(639): n is a, c, g, or t
  misc_feature (647)..(647): n is a, c, g, or t
  misc_feature (650)..(650): n is a, c, g, or t
  misc_feature (655)..(655): n is a, c, g, or t
  misc_feature (662)..(662): n is a, c, g, or t
  misc_feature (666)..(666): n is a, c, g, or t
  misc_feature (691)..(691): n is a, c, g, or t
  misc_feature (698)..(698): n is a, c, g, or t
  misc_feature (702)..(702): n is a, c, g, or t
  misc_feature (708)..(709): n is a, c, g, or t
  misc_feature (711)..(711): n is a, c, g, or t
  misc_feature (719)..(719): n is a, c, g, or t
  misc_feature (731)..(731): n is a, c, g, or t
  misc_feature (733)..(733): n is a, c, g, or t
  misc_feature (750)..(750): n is a, c, g, or t
  misc_feature (765)..(765): n is a, c, g, or t
ctttaccattcttccatggaagaagacaaaattcatctgagtgtagaaactaactatgctatggctcaggcccctctgggtatttctcctcaggaactgctcacctgtggggagagtgacttgtggtctgcttacccaaaataattcaatactcaaggctgggtggactctacagggcaatggtgtgactgaccagctctttcattgaagacatagaaagtacaagcagacccttctggcaggagctctaacatcaggcttccaatctagatttcatcagtaataaacattttggtttctatctcaggactcccaaatcgttcaattggacttgaactcagaagggaaactggatgttacttattgaactccaggtacacattatgtttcattaaaaaatatctatacaattatgacatcaagtagatgtcattggctactagaattatgtgggaaaacccttgtttgagtaagaggacttactatgtaaatatttttgaaaaagtggantnctggcngggngcagnggctcnngcctntaancccagcactttgggaggccnaggnnggnngatcnngaggtcaggagttcnagaccngcctgncnaacacggtgaaacccngctctantaaaaananaaaaattngcnaggcntggtggnacangcctgtaatcccagctatttgggangctgagncagnagaatnncntgaacccnggaggtggaggntncagtgagccgagatcangccactgcactccancctggactacaagagtgaaagcccgttctcaaaaaaaaaaaaaaaaaaaaaaaagtcctttcttcagtgaactctcatagggagggccaacagataaagtcagtaagagtgacactaacctggttaaggaagtgtgtggtttctcagagcacaccctgttctcatgctcctcccactcactgcccaatctttcctctccttcacttccaggctatctttagagaacttcagaatacaataatgaaaaccatgtctttgatcattaaacaccaaaaagtaactctgctactctcctcagcttcaggcaccaccactgacctgggacagtgaatcgacaatgccgtcttctgtctcgtggggcatcctcctgctggcaggcctgtgctgcctggtccctgtctccctggctgaggatccccagggagatgctgcccagaagacagatacatcccaccatgatcaggatcacccaaccttcaacaagatcacccccaacctggctgagttcgccttcagcctataccgccagctggcacaccagtccaacagcaccaatatcttcttctccccagtgagcatcgctacagcctttgcaatgctctccctggggaccaaggctgacactcacgatgaaatcctggagggcctgaatttcaacctcacggagattccggaggctcagatccatgaaggcttccaggaactcctccgtaccctcaaccagccagacagccagctccagctgaccaccggcaatggcctgttcctcagcgagggcctgaagctagtggataagtttttggaggatgttaaaaagttgtaccactcagaagccttcactgtcaacttcggggacaccgaagaggccaagaaacagatcaacgattacgtggagaagggtactcaagggaaaattgtggatttggtcaaggagcttgacagagacacagtttttgctctggtgaattacatcttctttaaagggtaaggttgctcaaccagcctgagctgttcccatagaaacaagcaaaaatattctcaaaccatcagttcttgaactctccttggcaatgcattatgggccatagcaatgcttttcagcgtggattcttcagttttctacacacaaacactaaaatgttttccatcattgagtaatttgaggaaataatagattaaactgtcactgtatatgtagaatatataatgcttagaactatagaacaaattgtaatacactgcatgggatagtttcatggcatactttacacgactctagtgtcccagaatcagtatcagttttgcaatctgaaagacctgggttcaaatcctgcctctaacacaattagcttttgacaaaaacaatgcattctacctctttgaggtgctaatttctcatcttagcatggacaaaataccattcttgctgtcaggtttttttaggattaaacaaatgacaaagactgtggggatggtgtgtggcatacagcaggtgatggactcttctgtatctcaggctgccttcctgcccctgaggggttaaaatgccagggtcctgggggccccagggcattctaagccagctcccactgtcccaggaaaacagcataggggaggggaggtgggaggcaaggccagg

SEQ ID NO: 332809 - DNA, 2265 bp, Homo sapiens
  misc_feature (510)..(510): n is a, c, g, or t
  misc_feature (512)..(512): n is a, c, g, or t
  misc_feature (518)..(518): n is a, c, g, or t
  misc_feature (522)..(522): n is a, c, g, or t
  misc_feature (527)..(527): n is a, c, g, or t
  misc_feature (533)..(534): n is a, c, g, or t
  misc_feature (539)..(539): n is a, c, g, or t
  misc_feature (543)..(543): n is a, c, g, or t
  misc_feature (563)..(563): n is a, c, g, or t
  misc_feature (567)..(568): n is a, c, g, or t
  misc_feature (571)..(572): n is a, c, g, or t
  misc_feature (577)..(578): n is a, c, g, or t
  misc_feature (593)..(593): n is a, c, g, or t
  misc_feature (599)..(599): n is a, c, g, or t
  misc_feature (605)..(605): n is a, c, g, or t
  misc_feature (607)..(607): n is a, c, g, or t
  misc_feature (623)..(623): n is a, c, g, or t
  misc_feature (630)..(630): n is a, c, g, or t
  misc_feature (637)..(637): n is a, c, g, or t
  misc_feature (639)..(639): n is a, c, g, or t
  misc_feature (647)..(647): n is a, c, g, or t
  misc_feature (650)..(650): n is a, c, g, or t
  misc_feature (655)..(655): n is a, c, g, or t
  misc_feature (662)..(662): n is a, c, g, or t
  misc_feature (666)..(666): n is a, c, g, or t
  misc_feature (691)..(691): n is a, c, g, or t
  misc_feature (698)..(698): n is a, c, g, or t
  misc_feature (702)..(702): n is a, c, g, or t
  misc_feature (708)..(709): n is a, c, g, or t
  misc_feature (711)..(711): n is a, c, g, or t
  misc_feature (719)..(719): n is a, c, g, or t
  misc_feature (731)..(731): n is a, c, g, or t
  misc_feature (733)..(733): n is a, c, g, or t
  misc_feature (750)..(750): n is a, c, g, or t
  misc_feature (765)..(765): n is a, c, g, or t
ctttaccattcttccatggaagaagacaaaattcatctgagtgtagaaactaactatgctatggctcaggcccctctgggtatttctcctcaggaactgctcacctgtggggagagtgacttgtggtctgcttacccaaaataattcaatactcaaggctgggtggactctacagggcaatggtgtgactgaccagctctttcattgaagacatagaaagtacaagcagacccttctggcaggagctctaacatcaggcttccaatctagatttcatcagtaataaacattttggtttctatctcaggactcccaaatcgttcaattggacttgaactcagaagggaaactggatgttacttattgaactccaggtacacattatgtttcattaaaaaatatctatacaattatgacatcaagtagatgtcattggctactagaattatgtgggaaaacccttgtttgagtaagaggacttactatgtaaatatttttgaaaaagtggantnctggcngggngcagnggctcnngcctntaancccagcactttgggaggccnaggnnggnngatcnngaggtcaggagttcnagaccngcctgncnaacacggtgaaacccngctctantaaaaananaaaaattngcnaggcntggtggnacangcctgtaatcccagctatttgggangctgagncagnagaatnncntgaacccnggaggtggaggntncagtgagccgagatcangccactgcactccancctggactacaagagtgaaagcccgttctcaaaaaaaaaaaaaaaaaaaaaaaagtcctttcttcagtgaactctcatagggagggccaacagataaagtcagtaagagtgacactaacctggttaaggaagtgtgtggtttctcagagcacaccctgttctcatgctcctcccactcactgcccaatctttcctctccttcacttccaggctatctttagagaacttcagaatacaataatgaaaaccatgtctttgatcattaaacaccaaaaagtaactctgctactctcctcagcttcaggcaccaccactgacctgggacagtgaatcgacaatgccgtcttctgtctcgtggggcatcctcctgctggcaggcctgtgctgcctggtccctgtctccctggctgaggatccccagggagatgctgcccagaagacagatacatcccaccatgatcaggatcacccaaccttcaacaagatcacccccaacctggctgagttcgccttcagcctataccgccagctggcacaccagtccaacagcaccaatatcttcttctccccagtgagcatcgctacagcctttgcaatgctctccctggggaccaaggctgacactcacgatgaaatcctggagggcctgaatttcaacctcacggagattccggaggctcagatccatgaaggcttccaggaactcctccgtaccctcaaccagccagacagccagctccagctgaccaccggcaatggcctgttcctcagcgagggcctgaagctagtggataagtttttggaggatgttaaaaagttgtaccactcagaagccttcactgtcaacttcggggacaccgaagaggccaagaaacagatcaacgattacgtggagaagggtactcaagggaaaattgtggatttggtcaaggagcttgacagagacacagtttttgctctggtgaattacatcttctttaaagagttcaacaaaccctttgtcttcttaatgattgaacaaaataccaagtctcccctcttcatgggaaaagtggtgaatcccacccaaaaataactgcctctcgctcctcaacccctcccctccatccctggccccctccctggatgacattaaagaagggttgagctggaaaaaaaaaaaaaaaaaaaaaaaaaaaaaaaaaaaaaaaaaaaaaaaaaaaaaaaaaaaaaaaaaaaaaaaaaaaaaaaaaaaaaaaaaaaaaaaaaaaaaaaaaaaaaaaaaaaaaaaaaaaaaaaaaaaaaacaaaaaaaaaaaaaaaataaaatataataataataattataaaataaaaaaaattaaaaaataaaccttttatatacaatatatacacctattcatttcaaacactctacctcttcttcaattaatcaaaactttctcatccttccacaaaacacccctaaaatagttacttcaaataatattacagcgctctttcttacccacttcattcaata

SEQ ID NO: 332810 - DNA, 1978 bp, Homo sapiens
  misc_feature (510)..(510): n is a, c, g, or t
  misc_feature (512)..(512): n is a, c, g, or t
  misc_feature (518)..(518): n is a, c, g, or t
  misc_feature (522)..(522): n is a, c, g, or t
  misc_feature (527)..(527): n is a, c, g, or t
  misc_feature (533)..(534): n is a, c, g, or t
  misc_feature (539)..(539): n is a, c, g, or t
  misc_feature (543)..(543): n is a, c, g, or t
  misc_feature (563)..(563): n is a, c, g, or t
  misc_feature (567)..(568): n is a, c, g, or t
  misc_feature (571)..(572): n is a, c, g, or t
  misc_feature (577)..(578): n is a, c, g, or t
  misc_feature (593)..(593): n is a, c, g, or t
  misc_feature (599)..(599): n is a, c, g, or t
  misc_feature (605)..(605): n is a, c, g, or t
  misc_feature (607)..(607): n is a, c, g, or t
  misc_feature (623)..(623): n is a, c, g, or t
  misc_feature (630)..(630): n is a, c, g, or t
  misc_feature (637)..(637): n is a, c, g, or t
  misc_feature (639)..(639): n is a, c, g, or t
  misc_feature (647)..(647): n is a, c, g, or t
  misc_feature (650)..(650): n is a, c, g, or t
  misc_feature (655)..(655): n is a, c, g, or t
  misc_feature (662)..(662): n is a, c, g, or t
  misc_feature (666)..(666): n is a, c, g, or t
  misc_feature (691)..(691): n is a, c, g, or t
  misc_feature (698)..(698): n is a, c, g, or t
  misc_feature (702)..(702): n is a, c, g, or t
  misc_feature (708)..(709): n is a, c, g, or t
  misc_feature (711)..(711): n is a, c, g, or t
  misc_feature (719)..(719): n is a, c, g, or t
  misc_feature (731)..(731): n is a, c, g, or t
  misc_feature (733)..(733): n is a, c, g, or t
  misc_feature (750)..(750): n is a, c, g, or t
  misc_feature (765)..(765): n is a, c, g, or t
ctttaccattcttccatggaagaagacaaaattcatctgagtgtagaaactaactatgctatggctcaggcccctctgggtatttctcctcaggaactgctcacctgtggggagagtgacttgtggtctgcttacccaaaataattcaatactcaaggctgggtggactctacagggcaatggtgtgactgaccagctctttcattgaagacatagaaagtacaagcagacccttctggcaggagctctaacatcaggcttccaatctagatttcatcagtaataaacattttggtttctatctcaggactcccaaatcgttcaattggacttgaactcagaagggaaactggatgttacttattgaactccaggtacacattatgtttcattaaaaaatatctatacaattatgacatcaagtagatgtcattggctactagaattatgtgggaaaacccttgtttgagtaagaggacttactatgtaaatatttttgaaaaagtggantnctggcngggngcagnggctcnngcctntaancccagcactttgggaggccnaggnnggnngatcnngaggtcaggagttcnagaccngcctgncnaacacggtgaaacccngctctantaaaaananaaaaattngcnaggcntggtggnacangcctgtaatcccagctatttgggangctgagncagnagaatnncntgaacccnggaggtggaggntncagtgagccgagatcangccactgcactccancctggactacaagagtgaaagcccgttctcaaaaaaaaaaaaaaaaaaaaaaaagtcctttcttcagtgaactctcatagggagggccaacagataaagtcagtaagagtgacactaacctggttaaggaagtgtgtggtttctcagagcacaccctgttctcatgctcctcccactcactgcccaatctttcctctccttcacttccaggctatctttagagaacttcagaatacaataatgaaaaccatgtctttgatcattaaacaccaaaaagtaactctgctactctcctcagcttcaggcaccaccactgacctgggacagtgaatcgacaatgccgtcttctgtctcgtggggcatcctcctgctggcaggcctgtgctgcctggtccctgtctccctggctgaggatccccagggagatgctgcccagaagacagatacatcccaccatgatcaggatcacccaaccttcaacaagatcacccccaacctggctgagttcgccttcagcctataccgccagctggcagccagacagccagctccagctgaccaccggcaatggcctgttcctcagcgagggcctgaagctagtggataagtttttggaggatgttaaaaagttgtaccactcagaagccttcactgtcaacttcggggacaccgaagaggccaagaaacagatcaacgattacgtggagaagggtactcaagggaaaattgtggatttggtcaaggagcttgacagagacacagtttttgctctggtgaattacatcttctttaaaggcaaatgggagagaccctttgaagtcaaggacaccgaggaagaggacttccacgtggaccaggtgaccaccgtgaaggtgcctatgatgaagcgtttaggcatgtttaacatccagcactgtaagaagctgtccagctgggtgctgctgatgaaatacctgggcaatgccaccgccatcttcttcctgcctgatgaggggaaactacagcacctggaaaatgaactcacccacgatatcatcaccaagttcctggaaaatgaagacagaaggtctgccagcttacatttacccaaactgtccattactggaacctatgatctgaagagcgacttcgacggacgcattcagacgaagaggggcgtttggtattgggttatggcagggggtttatattgatatggtggtgagaattgatg

SEQ ID NO: 332811 - DNA, 1691 bp, Homo sapiens
  misc_feature (510)..(510): n is a, c, g, or t
  misc_feature (512)..(512): n is a, c, g, or t
  misc_feature (518)..(518): n is a, c, g, or t
  misc_feature (522)..(522): n is a, c, g, or t
  misc_feature (527)..(527): n is a, c, g, or t
  misc_feature (533)..(534): n is a, c, g, or t
  misc_feature (539)..(539): n is a, c, g, or t
  misc_feature (543)..(543): n is a, c, g, or t
  misc_feature (563)..(563): n is a, c, g, or t
  misc_feature (567)..(568): n is a, c, g, or t
  misc_feature (571)..(572): n is a, c, g, or t
  misc_feature (577)..(578): n is a, c, g, or t
  misc_feature (593)..(593): n is a, c, g, or t
  misc_feature (599)..(599): n is a, c, g, or t
  misc_feature (605)..(605): n is a, c, g, or t
  misc_feature (607)..(607): n is a, c, g, or t
  misc_feature (623)..(623): n is a, c, g, or t
  misc_feature (630)..(630): n is a, c, g, or t
  misc_feature (637)..(637): n is a, c, g, or t
  misc_feature (639)..(639): n is a, c, g, or t
  misc_feature (647)..(647): n is a, c, g, or t
  misc_feature (650)..(650): n is a, c, g, or t
  misc_feature (655)..(655): n is a, c, g, or t
  misc_feature (662)..(662): n is a, c, g, or t
  misc_feature (666)..(666): n is a, c, g, or t
  misc_feature (691)..(691): n is a, c, g, or t
  misc_feature (698)..(698): n is a, c, g, or t
  misc_feature (702)..(702): n is a, c, g, or t
  misc_feature (708)..(709): n is a, c, g, or t
  misc_feature (711)..(711): n is a, c, g, or t
  misc_feature (719)..(719): n is a, c, g, or t
  misc_feature (731)..(731): n is a, c, g, or t
  misc_feature (733)..(733): n is a, c, g, or t
  misc_feature (750)..(750): n is a, c, g, or t
  misc_feature (765)..(765): n is a, c, g, or t
ctttaccattcttccatggaagaagacaaaattcatctgagtgtagaaactaactatgctatggctcaggcccctctgggtatttctcctcaggaactgctcacctgtggggagagtgacttgtggtctgcttacccaaaataattcaatactcaaggctgggtggactctacagggcaatggtgtgactgaccagctctttcattgaagacatagaaagtacaagcagacccttctggcaggagctctaacatcaggcttccaatctagatttcatcagtaataaacattttggtttctatctcaggactcccaaatcgttcaattggacttgaactcagaagggaaactggatgttacttattgaactccaggtacacattatgtttcattaaaaaatatctatacaattatgacatcaagtagatgtcattggctactagaattatgtgggaaaacccttgtttgagtaagaggacttactatgtaaatatttttgaaaaagtggantnctggcngggngcagnggctcnngcctntaancccagcactttgggaggccnaggnnggnngatcnngaggtcaggagttcnagaccngcctgncnaacacggtgaaacccngctctantaaaaananaaaaattngcnaggcntggtggnacangcctgtaatcccagctatttgggangctgagncagnagaatnncntgaacccnggaggtggaggntncagtgagccgagatcangccactgcactccancctggactacaagagtgaaagcccgttctcaaaaaaaaaaaaaaaaaaaaaaaagtcctttcttcagtgaactctcatagggagggccaacagataaagtcagtaagagtgacactaacctggttaaggaagtgtgtggtttctcagagcacaccctgttctcatgctcctcccactcactgcccaatctttcctctccttcacttccaggctatctttagagaacttcagaatacaataatgaaaaccatgtctttgatcattaaacaccaaaaagtaactctgctactctcctcagcttcaggcaccaccactgacctgggacagtgaatcgacaatgccgtcttctgtctcgtggggcatcctcctgctggcaggcctgtgctgcctggtccctgtctccctggctgaggatccccagggagatgctgcccagaagacagatacatcccaccatgatcaggatcacccaaccttcaacaagatcacccccaacctggctgagttcgccttcagcctataccgccagctggcacaccagtccaacagcaccaatatcttcttctccccagtgagcatcgctacagcctttgcaatgctctccctggggaccaaggctgacactcacgatgaaatcctggagggcctgaatttcaacctcacggagattccggaggctcagatccatgaaggcttccaggaactcctccgtaccctcaaccagccagacagccagctccagctgaccaccggcaatggcctgttcctcagcgagggcctgaagctagtggataagtttttggaggatgttaaaaagttgtaccactcagaagccttcactgtcaacttcggggacaccgaagaggccaagaaacagatgctgccatccttcctgtacagcctgcagtaccgtgagcaaaataagc

SEQ ID NO: 332812 - DNA, 1737 bp, Homo sapiens
  misc_feature (510)..(510): n is a, c, g, or t
  misc_feature (512)..(512): n is a, c, g, or t
  misc_feature (518)..(518): n is a, c, g, or t
  misc_feature (522)..(522): n is a, c, g, or t
  misc_feature (527)..(527): n is a, c, g, or t
  misc_feature (533)..(534): n is a, c, g, or t
  misc_feature (539)..(539): n is a, c, g, or t
  misc_feature (543)..(543): n is a, c, g, or t
  misc_feature (563)..(563): n is a, c, g, or t
  misc_feature (567)..(568): n is a, c, g, or t
  misc_feature (571)..(572): n is a, c, g, or t
  misc_feature (577)..(578): n is a, c, g, or t
  misc_feature (593)..(593): n is a, c, g, or t
  misc_feature (599)..(599): n is a, c, g, or t
  misc_feature (605)..(605): n is a, c, g, or t
  misc_feature (607)..(607): n is a, c, g, or t
  misc_feature (623)..(623): n is a, c, g, or t
  misc_feature (630)..(630): n is a, c, g, or t
  misc_feature (637)..(637): n is a, c, g, or t
  misc_feature (639)..(639): n is a, c, g, or t
  misc_feature (647)..(647): n is a, c, g, or t
  misc_feature (650)..(650): n is a, c, g, or t
  misc_feature (655)..(655): n is a, c, g, or t
  misc_feature (662)..(662): n is a, c, g, or t
  misc_feature (666)..(666): n is a, c, g, or t
  misc_feature (691)..(691): n is a, c, g, or t
  misc_feature (698)..(698): n is a, c, g, or t
  misc_feature (702)..(702): n is a, c, g, or t
  misc_feature (708)..(709): n is a, c, g, or t
  misc_feature (711)..(711): n is a, c, g, or t
  misc_feature (719)..(719): n is a, c, g, or t
  misc_feature (731)..(731): n is a, c, g, or t
  misc_feature (733)..(733): n is a, c, g, or t
  misc_feature (750)..(750): n is a, c, g, or t
  misc_feature (765)..(765): n is a, c, g, or t
  misc_feature (1703)..(1703): n is a, c, g, or t
  misc_feature (1715)..(1715): n is a, c, g, or t
ctttaccattcttccatggaagaagacaaaattcatctgagtgtagaaactaactatgctatggctcaggcccctctgggtatttctcctcaggaactgctcacctgtggggagagtgacttgtggtctgcttacccaaaataattcaatactcaaggctgggtggactctacagggcaatggtgtgactgaccagctctttcattgaagacatagaaagtacaagcagacccttctggcaggagctctaacatcaggcttccaatctagatttcatcagtaataaacattttggtttctatctcaggactcccaaatcgttcaattggacttgaactcagaagggaaactggatgttacttattgaactccaggtacacattatgtttcattaaaaaatatctatacaattatgacatcaagtagatgtcattggctactagaattatgtgggaaaacccttgtttgagtaagaggacttactatgtaaatatttttgaaaaagtggantnctggcngggngcagnggctcnngcctntaancccagcactttgggaggccnaggnnggnngatcnngaggtcaggagttcnagaccngcctgncnaacacggtgaaacccngctctantaaaaananaaaaattngcnaggcntggtggnacangcctgtaatcccagctatttgggangctgagncagnagaatnncntgaacccnggaggtggaggntncagtgagccgagatcangccactgcactccancctggactacaagagtgaaagcccgttctcaaaaaaaaaaaaaaaaaaaaaaaagtcctttcttcagtgaactctcatagggagggccaacagataaagtcagtaagagtgacactaacctggttaaggaagtgtgtggtttctcagagcacaccctgttctcatgctcctcccactcactgcccaatctttcctctccttcacttccaggctatctttagagaacttcagaatacaataatgaaaaccatgtctttgatcattaaacaccaaaaagtaactctgctactctcctcagcttcaggcaccaccactgacctgggacagtgaatcgacaatgccgtcttctgtctcgtggggcatcctcctgctggcaggcctgtgctgcctggtccctgtctccctggctgaggatccccagggagatgctgcccagaagacagatacatcccaccatgatcaggatcacccaaccttcaacaagatcacccccaacctggctgagttcgccttcagcctataccgccagctggcacaccagtccaacagcaccaatatcttcttctccccagtgagcatcgctacagcctttgcaatgctctccctggggaccaaggctgacactcacgatgaaatcctggagggcctgaatttcaacctcacggagattccggaggctcagatccatgaaggcttccaggaactcctccgtaccctcaaccagccagacagccagctccagctgaccaccggcaatggcctgttcctcagcgagggcctgaagctagtggataagtttttggaggatgttacagtcacgatacgtgagaaggtctcaaggaaaatgtgattgtcaggagctgcagaacacagttttgtctgtgatacatctcttaaggcaatgaggaccttgagcaggcacgagagagactcactgncagtacacgtanggcatgtgacgtagctgtacac

SEQ ID NO: 332813 - DNA, 1326 bp, Homo sapiens
  misc_feature (510)..(510): n is a, c, g, or t
  misc_feature (512)..(512): n is a, c, g, or t
  misc_feature (518)..(518): n is a, c, g, or t
  misc_feature (522)..(522): n is a, c, g, or t
  misc_feature (527)..(527): n is a, c, g, or t
  misc_feature (533)..(534): n is a, c, g, or t
  misc_feature (539)..(539): n is a, c, g, or t
  misc_feature (543)..(543): n is a, c, g, or t
  misc_feature (563)..(563): n is a, c, g, or t
  misc_feature (567)..(568): n is a, c, g, or t
  misc_feature (571)..(572): n is a, c, g, or t
  misc_feature (577)..(578): n is a, c, g, or t
  misc_feature (593)..(593): n is a, c, g, or t
  misc_feature (599)..(599): n is a, c, g, or t
  misc_feature (605)..(605): n is a, c, g, or t
  misc_feature (607)..(607): n is a, c, g, or t
  misc_feature (623)..(623): n is a, c, g, or t
  misc_feature (630)..(630): n is a, c, g, or t
  misc_feature (637)..(637): n is a, c, g, or t
  misc_feature (639)..(639): n is a, c, g, or t
  misc_feature (647)..(647): n is a, c, g, or t
  misc_feature (650)..(650): n is a, c, g, or t
  misc_feature (655)..(655): n is a, c, g, or t
  misc_feature (662)..(662): n is a, c, g, or t
  misc_feature (666)..(666): n is a, c, g, or t
  misc_feature (691)..(691): n is a, c, g, or t
  misc_feature (698)..(698): n is a, c, g, or t
  misc_feature (702)..(702): n is a, c, g, or t
  misc_feature (708)..(709): n is a, c, g, or t
  misc_feature (711)..(711): n is a, c, g, or t
  misc_feature (719)..(719): n is a, c, g, or t
  misc_feature (731)..(731): n is a, c, g, or t
  misc_feature (733)..(733): n is a, c, g, or t
  misc_feature (750)..(750): n is a, c, g, or t
  misc_feature (765)..(765): n is a, c, g, or t
ctttaccattcttccatggaagaagacaaaattcatctgagtgtagaaactaactatgctatggctcaggcccctctgggtatttctcctcaggaactgctcacctgtggggagagtgacttgtggtctgcttacccaaaataattcaatactcaaggctgggtggactctacagggcaatggtgtgactgaccagctctttcattgaagacatagaaagtacaagcagacccttctggcaggagctctaacatcaggcttccaatctagatttcatcagtaataaacattttggtttctatctcaggactcccaaatcgttcaattggacttgaactcagaagggaaactggatgttacttattgaactccaggtacacattatgtttcattaaaaaatatctatacaattatgacatcaagtagatgtcattggctactagaattatgtgggaaaacccttgtttgagtaagaggacttactatgtaaatatttttgaaaaagtggantnctggcngggngcagnggctcnngcctntaancccagcactttgggaggccnaggnnggnngatcnngaggtcaggagttcnagaccngcctgncnaacacggtgaaacccngctctantaaaaananaaaaattngcnaggcntggtggnacangcctgtaatcccagctatttgggangctgagncagnagaatnncntgaacccnggaggtggaggntncagtgagccgagatcangccactgcactccancctggactacaagagtgaaagcccgttctcaaaaaaaaaaaaaaaaaaaaaaaagtcctttcttcagtgaactctcatagggagggccaacagataaagtcagtaagagtgacactaacctggttaaggaagtgtgtggtttctcagagcacaccctgttctcatgctcctcccactcactgcccaatctttcctctccttcacttccaggctatctttagagaacttcagaatacaataatgaaaaccatgtctttgatcattaaacaccaaaaagtaactctgctactctcctcagcttcaggcaccaccactgacctgggacagtgaatcgacaatgccgtcttctgtctcgtggggcatcctcctgctggcaggcctgtgctgcctggtccctgtctccctggctgaggatccccagggagatgctgcccagaagacagatacatcccaccatgatcaggatcacccaaccttcaacaagatcacccccaacctggctgagttcgccttcagcctataccgccagctggcatctccgctttggaaaggtgccgagct

SEQ ID NO: 332814 - DNA, 418 bp, Homo sapiens
  misc_feature (7)..(7): n is a, c, g, or t
  misc_feature (9)..(9): n is a, c, g, or t
  misc_feature (22)..(22): n is a, c, g, or t
tcgtcantntcgtgcagcggancgcgacttgacctgggacagtgaatcgacaatgccgtcttctgtctcgtggggcatcctcctgctggcaggcctgtgctgcctggtccctgtctccctggctgaggatccccagggagatgctgcccagaagacagatacatcccaccatgatcaggatcacccaaccttcaacaagatcacccccaacctggctgagttcgccttcagcctataccgccagctggcaagttcaacaaaccctttgtcttcttaatgattgaacaaaataccaagtctcccctcttcatgggaaaagtggtgaatcccacccaaaaataactgcctctcgctcctcaacccctcccctccatccctggccccctccctggatgacattaaagaagggttgagctgg

SEQ ID NO: 332815 - DNA, 568 bp, Homo sapiens
gggacagggaccaccgtaaagggccatatgataaacgaggcatgtacatccaccctgttaagcttcctgcctgatgaggggaaactacagcacctggaaaatgaactcacccacgatatcatcaccaagttcctggaaaatgaagacagaaggtctgccagcttacatttacccaaactgtccattactggaacctatgatctgaagagcgtcctgggtcaactgggcatcactaaggtcttcagcaatggggctgacctctccggggtcacagaggaggcacccctgaagctctccaaggccgtgcataaggctgtgctgaccatcgacgagaaagggactgaagctgctggggccatgtttttagaggccatacccatgtctatcccccccgaggtcaagttcaacaaaccctttgtcttcttaatgattgaacaaaataccaagtctcccctcttcatgggaaaagtggtgaatcccacccaaaaataactgcctctcgctcctcaacccctcccctccatccctggccccctccctggatgacattaaagaagggttgagctgg

SEQ ID NO: 332816 - DNA, 2388 bp, Homo sapiens
  misc_feature (510)..(510): n is a, c, g, or t
  misc_feature (512)..(512): n is a, c, g, or t
  misc_feature (518)..(518): n is a, c, g, or t
  misc_feature (522)..(522): n is a, c, g, or t
  misc_feature (527)..(527): n is a, c, g, or t
  misc_feature (533)..(534): n is a, c, g, or t
  misc_feature (539)..(539): n is a, c, g, or t
  misc_feature (543)..(543): n is a, c, g, or t
  misc_feature (563)..(563): n is a, c, g, or t
  misc_feature (567)..(568): n is a, c, g, or t
  misc_feature (571)..(572): n is a, c, g, or t
  misc_feature (577)..(578): n is a, c, g, or t
  misc_feature (593)..(593): n is a, c, g, or t
  misc_feature (599)..(599): n is a, c, g, or t
  misc_feature (605)..(605): n is a, c, g, or t
  misc_feature (607)..(607): n is a, c, g, or t
  misc_feature (623)..(623): n is a, c, g, or t
  misc_feature (630)..(630): n is a, c, g, or t
  misc_feature (637)..(637): n is a, c, g, or t
  misc_feature (639)..(639): n is a, c, g, or t
  misc_feature (647)..(647): n is a, c, g, or t
  misc_feature (650)..(650): n is a, c, g, or t
  misc_feature (655)..(655): n is a, c, g, or t
  misc_feature (662)..(662): n is a, c, g, or t
  misc_feature (666)..(666): n is a, c, g, or t
  misc_feature (691)..(691): n is a, c, g, or t
  misc_feature (698)..(698): n is a, c, g, or t
  misc_feature (702)..(702): n is a, c, g, or t
  misc_feature (708)..(709): n is a, c, g, or t
  misc_feature (711)..(711): n is a, c, g, or t
  misc_feature (719)..(719): n is a, c, g, or t
  misc_feature (731)..(731): n is a, c, g, or t
  misc_feature (733)..(733): n is a, c, g, or t
  misc_feature (750)..(750): n is a, c, g, or t
  misc_feature (765)..(765): n is a, c, g, or t
ctttaccattcttccatggaagaagacaaaattcatctgagtgtagaaactaactatgctatggctcaggcccctctgggtatttctcctcaggaactgctcacctgtggggagagtgacttgtggtctgcttacccaaaataattcaatactcaaggctgggtggactctacagggcaatggtgtgactgaccagctctttcattgaagacatagaaagtacaagcagacccttctggcaggagctctaacatcaggcttccaatctagatttcatcagtaataaacattttggtttctatctcaggactcccaaatcgttcaattggacttgaactcagaagggaaactggatgttacttattgaactccaggtacacattatgtttcattaaaaaatatctatacaattatgacatcaagtagatgtcattggctactagaattatgtgggaaaacccttgtttgagtaagaggacttactatgtaaatatttttgaaaaagtggantnctggcngggngcagnggctcnngcctntaancccagcactttgggaggccnaggnnggnngatcnngaggtcaggagttcnagaccngcctgncnaacacggtgaaacccngctctantaaaaananaaaaattngcnaggcntggtggnacangcctgtaatcccagctatttgggangctgagncagnagaatnncntgaacccnggaggtggaggntncagtgagccgagatcangccactgcactccancctggactacaagagtgaaagcccgttctcaaaaaaaaaaaaaaaaaaaaaaaagtcctttcttcagtgaactctcatagggagggccaacagataaagtcagtaagagtgacactaacctggttaaggaagtgtgtggtttctcagagcacaccctgttctcatgctcctcccactcactgcccaatctttcctctccttcacttccaggctatctttagagaacttcagaatacaataatgaaaaccatgtctttgatcattaaacaccaaaaagtaactctgctactctcctcagcttcaggcaccaccactgacctgggacagtgaatcgacaatgccgtcttctgtctcgtggggcatcctcctgctggcaggcctgtgctgcctggtccctgtctccctggctgaggatccccagggagatgctgcccagaagacagatacatcccaccatgatcaggatcacccaaccttcaacaagatcacccccaacctggctgagttcgccttcagcctataccgccagctggcacaccagtccaacagcaccaatatcttcttctccccagtgagcatcgctacagcctttgcaatgctctccctggggaccaaggctgacactcacgatgaaatcctggagggcctgaatttcaacctcacggagattccggaggctcagatccatgaaggcttccaggaactcctccgtaccctcaaccagccagacagccagctccagctgaccaccggcaatggcctgttcctcagcgagggcctgaagctagtggataagtttttggaggatgttaaaaagttgtaccactcagaagccttcactgtcaacttcggggacaccgaagaggccaagaaacagatcaacgattacgtggagaagggtactcaagggaaaattgtggatttggtcaaggagcttgacagagacacagtttttgctctggtgaattacatcttctttaaaggcaaatgggagagaccctttgaagtcaaggacaccgaggaagaggacttccacgtggaccaggtgaccaccgtgaaggtgcctatgatgaagcgtttaggcatgtttaacatccagcactgtaagaagctgtccagctgggtgctgctgatgaaatacctgggcaatgccaccgccatcttcttcctgcctgatgaggggaaactacagcacctggaaaatgaagtctgccagcttacatttacccaaactgtccattactggaacctatgatctgaagagcgtcctgggtcaactgggcatcactaaggtcttcagcaatggggctgacctctccggggtcacagaggaggcacccctgaagctctccaaggccgtgcataaggctgtgctgaccatcgacgagaaagggactgaagctgctggggccatgtttttagaggccatacccatgtctatcccccccgaggtcaagttcaacaaaccctttgtcttcttaatgattgaacaaaataccaagtctcccctcttcatgggaaaagtggtgaatcccacccaaaaataactgcctctcgctcctcaacccctcccctccatccctggccccctccctggatgacattaaagaagggttgagctgg

SEQ ID NO: 332817 - DNA, 2485 bp, Homo sapiens
  misc_feature (510)..(510): n is a, c, g, or t
  misc_feature (512)..(512): n is a, c, g, or t
  misc_feature (518)..(518): n is a, c, g, or t
  misc_feature (522)..(522): n is a, c, g, or t
  misc_feature (527)..(527): n is a, c, g, or t
  misc_feature (533)..(534): n is a, c, g, or t
  misc_feature (539)..(539): n is a, c, g, or t
  misc_feature (543)..(543): n is a, c, g, or t
  misc_feature (563)..(563): n is a, c, g, or t
  misc_feature (567)..(568): n is a, c, g, or t
  misc_feature (571)..(572): n is a, c, g, or t
  misc_feature (577)..(578): n is a, c, g, or t
  misc_feature (593)..(593): n is a, c, g, or t
  misc_feature (599)..(599): n is a, c, g, or t
  misc_feature (605)..(605): n is a, c, g, or t
  misc_feature (607)..(607): n is a, c, g, or t
  misc_feature (623)..(623): n is a, c, g, or t
  misc_feature (630)..(630): n is a, c, g, or t
  misc_feature (637)..(637): n is a, c, g, or t
  misc_feature (639)..(639): n is a, c, g, or t
  misc_feature (647)..(647): n is a, c, g, or t
  misc_feature (650)..(650): n is a, c, g, or t
  misc_feature (655)..(655): n is a, c, g, or t
  misc_feature (662)..(662): n is a, c, g, or t
  misc_feature (666)..(666): n is a, c, g, or t
  misc_feature (691)..(691): n is a, c, g, or t
  misc_feature (698)..(698): n is a, c, g, or t
  misc_feature (702)..(702): n is a, c, g, or t
  misc_feature (708)..(709): n is a, c, g, or t
  misc_feature (711)..(711): n is a, c, g, or t
  misc_feature (719)..(719): n is a, c, g, or t
  misc_feature (731)..(731): n is a, c, g, or t
  misc_feature (733)..(733): n is a, c, g, or t
  misc_feature (750)..(750): n is a, c, g, or t
  misc_feature (765)..(765): n is a, c, g, or t
ctttaccattcttccatggaagaagacaaaattcatctgagtgtagaaactaactatgctatggctcaggcccctctgggtatttctcctcaggaactgctcacctgtggggagagtgacttgtggtctgcttacccaaaataattcaatactcaaggctgggtggactctacagggcaatggtgtgactgaccagctctttcattgaagacatagaaagtacaagcagacccttctggcaggagctctaacatcaggcttccaatctagatttcatcagtaataaacattttggtttctatctcaggactcccaaatcgttcaattggacttgaactcagaagggaaactggatgttacttattgaactccaggtacacattatgtttcattaaaaaatatctatacaattatgacatcaagtagatgtcattggctactagaattatgtgggaaaacccttgtttgagtaagaggacttactatgtaaatatttttgaaaaagtggantnctggcngggngcagnggctcnngcctntaancccagcactttgggaggccnaggnnggnngatcnngaggtcaggagttcnagaccngcctgncnaacacggtgaaacccngctctantaaaaananaaaaattngcnaggcntggtggnacangcctgtaatcccagctatttgggangctgagncagnagaatnncntgaacccnggaggtggaggntncagtgagccgagatcangccactgcactccancctggactacaagagtgaaagcccgttctcaaaaaaaaaaaaaaaaaaaaaaaagtcctttcttcagtgaactctcatagggagggccaacagataaagtcagtaagagtgacactaacctggttaaggaagtgtgtggtttctcagagcacaccctgttctcatgctcctcccactcactgcccaatctttcctctccttcacttccaggctatctttagagaacttcagaatacaataatgaaaaccatgtctttgatcattaaacaccaaaaagtaactctgctactctcctcagcttcaggcaccaccactgacctgggacagtgaatcgacaatgccgtcttctgtctcgtggggcatcctcctgctggcaggcctgtgctgcctggtccctgtctccctggctgaggatccccagggagatgctgcccagaagacagatacatcccaccatgatcaggatcacccaaccttcaacaagatcacccccaacctggctgagttcgccttcagcctataccgccagctggcacaccagtccaacagcaccaatatcttcttctccccagtgagcatcgctacagcctttgcaatgctctccctggggaccaaggctgacactcacgatgaaatcctggagggcctgaatttcaacctcacggagattccggaggctcagatccatgaaggcttccaggaactcctccgtaccctcaaccagccagacagccagctccagctgaccaccggcaatggcctgttcctcagcgagggcctgaagctagtggataagtttttggaggatgttaaaaagttgtaccactcagaagccttcactgtcaacttcggggacaccgaagaggccaagaaacagatcaacgattacgtggagaagggtactcaagggaaaattgcaaatgggagagaccctttgaagtcaaggacaccgaggaagaggacttccacgtggaccaggtgaccaccgtgaaggtgcctatgatgaagcgtttaggcatgtttaacatccagcactgtaagaagctgtccagctgggtgctgctgatgaaatacctgggcaatgccaccgccatcttcttcctgcctgatgaggggaaactacagcacctggaaaatgaactcacccacgatatcatcaccaagttcctggaaaatgaagacagaagcctgcccccactaaccggctttttgcccaaatgggccattatcgaagaattcacaaaaaacaatagcctcatcatccccaccatcatagccaccatcaccctccttaacctctacttctacctacgcctaatctactccacctcaatcacactactccccatatctaacaacgtaaaaataaaatgacagtttgaacattacaaaaccacccattcctccccacactcatcgcccttaccacgctactcctacctatctctccctttttaaccgataatgcaacttcgatgcgaaagaacaacagaaagccgacgaccaacccgccagccgccgacacaagcgacccacaggcgcgaagccccagacccacacaaggccccggagaccgcaacgccccaggcccgacagacgcccacacgcacgccccgcaggcagacgacagaagccacccaaacaccggggggggcggcgccaccaccacacccgcggggggcgacacacgacaccgagcaggccagacagagcccagcga

SEQ ID NO: 332818 - DNA, 2784 bp, Homo sapiens
  misc_feature (510)..(510): n is a, c, g, or t
  misc_feature (512)..(512): n is a, c, g, or t
  misc_feature (518)..(518): n is a, c, g, or t
  misc_feature (522)..(522): n is a, c, g, or t
  misc_feature (527)..(527): n is a, c, g, or t
  misc_feature (533)..(534): n is a, c, g, or t
  misc_feature (539)..(539): n is a, c, g, or t
  misc_feature (543)..(543): n is a, c, g, or t
  misc_feature (563)..(563): n is a, c, g, or t
  misc_feature (567)..(568): n is a, c, g, or t
  misc_feature (571)..(572): n is a, c, g, or t
  misc_feature (577)..(578): n is a, c, g, or t
  misc_feature (593)..(593): n is a, c, g, or t
  misc_feature (599)..(599): n is a, c, g, or t
  misc_feature (605)..(605): n is a, c, g, or t
  misc_feature (607)..(607): n is a, c, g, or t
  misc_feature (623)..(623): n is a, c, g, or t
  misc_feature (630)..(630): n is a, c, g, or t
  misc_feature (637)..(637): n is a, c, g, or t
  misc_feature (639)..(639): n is a, c, g, or t
  misc_feature (647)..(647): n is a, c, g, or t
  misc_feature (650)..(650): n is a, c, g, or t
  misc_feature (655)..(655): n is a, c, g, or t
  misc_feature (662)..(662): n is a, c, g, or t
  misc_feature (666)..(666): n is a, c, g, or t
  misc_feature (691)..(691): n is a, c, g, or t
  misc_feature (698)..(698): n is a, c, g, or t
  misc_feature (702)..(702): n is a, c, g, or t
  misc_feature (708)..(709): n is a, c, g, or t
  misc_feature (711)..(711): n is a, c, g, or t
  misc_feature (719)..(719): n is a, c, g, or t
  misc_feature (731)..(731): n is a, c, g, or t
  misc_feature (733)..(733): n is a, c, g, or t
  misc_feature (750)..(750): n is a, c, g, or t
  misc_feature (765)..(765): n is a, c, g, or t
ctttaccattcttccatggaagaagacaaaattcatctgagtgtagaaactaactatgctatggctcaggcccctctgggtatttctcctcaggaactgctcacctgtggggagagtgacttgtggtctgcttacccaaaataattcaatactcaaggctgggtggactctacagggcaatggtgtgactgaccagctctttcattgaagacatagaaagtacaagcagacccttctggcaggagctctaacatcaggcttccaatctagatttcatcagtaataaacattttggtttctatctcaggactcccaaatcgttcaattggacttgaactcagaagggaaactggatgttacttattgaactccaggtacacattatgtttcattaaaaaatatctatacaattatgacatcaagtagatgtcattggctactagaattatgtgggaaaacccttgtttgagtaagaggacttactatgtaaatatttttgaaaaagtggantnctggcngggngcagnggctcnngcctntaancccagcactttgggaggccnaggnnggnngatcnngaggtcaggagttcnagaccngcctgncnaacacggtgaaacccngctctantaaaaananaaaaattngcnaggcntggtggnacangcctgtaatcccagctatttgggangctgagncagnagaatnncntgaacccnggaggtggaggntncagtgagccgagatcangccactgcactccancctggactacaagagtgaaagcccgttctcaaaaaaaaaaaaaaaaaaaaaaaagtcctttcttcagtgaactctcatagggagggccaacagataaagtcagtaagagtgacactaacctggttaaggaagtgtgtggtttctcagagcacaccctgttctcatgctcctcccactcactgcccaatctttcctctccttcacttccaggctatctttagagaacttcagaatacaataatgaaaaccatgtctttgatcattaaacaccaaaaagtaactctgctactctcctcagcttcaggcaccaccactgacctgggacagtgaatcgacaatgccgtcttctgtctcgtggggcatcctcctgctggcaggcctgtgctgcctggtccctgtctccctggctgaggatccccagggagatgctgcccagaagacagatacatcccaccatgatcaggatcacccaaccttcaacaagatcacccccaacctggctgagttcgccttcagcctataccgccagctggcacaccagtccaacagcaccaatatcttcttctccccagtgagcatcgctacagcctttgcaatgctctccctggggaccaaggctgacactcacgatgaaatcctggagggcctgaatttcaacctcacggagattccggaggctcagatccatgaaggcttccaggaactcctccgtaccctcaaccagccagacagccagctccagctgaccaccggcaatggcctgttcctcagcgagggcctgaagctagtggataagtttttggaggatgttaaaaagttgtaccactcagaagccttcactgtcaacttcggggacaccgaagaggccaagaaacagatcaacgattacgtggagaagggtactcaagggaaaattgtggatttggtcaaggagcttgacagagacacagtttttgctctggtgaattacatcttctttaaaggcaaatgggagagaccctttgaagtcaaggacaccgaggaagaggacttccacgtggaccaggtgaccaccgtgaaggtgcctatgatgaagcgtttaggcatgtttaacatccagcactgtaagaagctgtccagctgggtgctgctgatgaaatacctgggcaatgccaccgccatcttcttcctgcctgatgaggggaaactacagcacctggaaaatgaactcacccacgatatcatcaccaagttcctggaaaatgaagacagaaggtctgccagcttacatttacccaaactgtccattactggaacctatgatctgaagagcgtcctgggtcaactgggcatcactaaggtcttcagcaatggggctgacctctccggggtcacagaggaggcacccctgaagctctccaaggccgtgcataaggctgtgctgaccatcgacgagaaagggactgaagctgctggggccatgtttttagaggccatacccatgtctatcccccccgaggtcaagttcaacaaaccctttgtcttcttaatgattgaacaaaataccaagtctcccctcttcatgggaaaagtggtgaatcccacccaaaaataactgcctctcgctcctcaacccctcccctccatccctggccccctccctggatgacattaaagaagggttgagctggaaaaaaaaaaaaaaaaaaaaaaaaaaaaaaaaaaaaaaaaaaaaaaaaaaaaaaaaaaaaaaaaaaaaaaaaaaaaaaaaaaaaaaaaaaaaaaaaaaaaaaaaaaaaaaaaaaaaaaaaaaaaaaaaaaaaaacaaaaaaaaaaaaaaaataaaatataataataataattataaaataaaaaaaattaaaaaataaaccttttatatacaatatatacacctattcatttcaaacactctacctcttcttcaattaatcaaaactttctcatccttccacaaaacacccctaaaatagttacttcaaataatattacagcgctctttcttacccacttcattcaata

SEQ ID NO: 332819 - DNA, 2736 bp, Homo sapiens
  misc_feature (510)..(510): n is a, c, g, or t
  misc_feature (512)..(512): n is a, c, g, or t
  misc_feature (518)..(518): n is a, c, g, or t
  misc_feature (522)..(522): n is a, c, g, or t
  misc_feature (527)..(527): n is a, c, g, or t
  misc_feature (533)..(534): n is a, c, g, or t
  misc_feature (539)..(539): n is a, c, g, or t
  misc_feature (543)..(543): n is a, c, g, or t
  misc_feature (563)..(563): n is a, c, g, or t
  misc_feature (567)..(568): n is a, c, g, or t
  misc_feature (571)..(572): n is a, c, g, or t
  misc_feature (577)..(578): n is a, c, g, or t
  misc_feature (593)..(593): n is a, c, g, or t
  misc_feature (599)..(599): n is a, c, g, or t
  misc_feature (605)..(605): n is a, c, g, or t
  misc_feature (607)..(607): n is a, c, g, or t
  misc_feature (623)..(623): n is a, c, g, or t
  misc_feature (630)..(630): n is a, c, g, or t
  misc_feature (637)..(637): n is a, c, g, or t
  misc_feature (639)..(639): n is a, c, g, or t
  misc_feature (647)..(647): n is a, c, g, or t
  misc_feature (650)..(650): n is a, c, g, or t
  misc_feature (655)..(655): n is a, c, g, or t
  misc_feature (662)..(662): n is a, c, g, or t
  misc_feature (666)..(666): n is a, c, g, or t
  misc_feature (691)..(691): n is a, c, g, or t
  misc_feature (698)..(698): n is a, c, g, or t
  misc_feature (702)..(702): n is a, c, g, or t
  misc_feature (708)..(709): n is a, c, g, or t
  misc_feature (711)..(711): n is a, c, g, or t
  misc_feature (719)..(719): n is a, c, g, or t
  misc_feature (731)..(731): n is a, c, g, or t
  misc_feature (733)..(733): n is a, c, g, or t
  misc_feature (750)..(750): n is a, c, g, or t
  misc_feature (765)..(765): n is a, c, g, or t
ctttaccattcttccatggaagaagacaaaattcatctgagtgtagaaactaactatgctatggctcaggcccctctgggtatttctcctcaggaactgctcacctgtggggagagtgacttgtggtctgcttacccaaaataattcaatactcaaggctgggtggactctacagggcaatggtgtgactgaccagctctttcattgaagacatagaaagtacaagcagacccttctggcaggagctctaacatcaggcttccaatctagatttcatcagtaataaacattttggtttctatctcaggactcccaaatcgttcaattggacttgaactcagaagggaaactggatgttacttattgaactccaggtacacattatgtttcattaaaaaatatctatacaattatgacatcaagtagatgtcattggctactagaattatgtgggaaaacccttgtttgagtaagaggacttactatgtaaatatttttgaaaaagtggantnctggcngggngcagnggctcnngcctntaancccagcactttgggaggccnaggnnggnngatcnngaggtcaggagttcnagaccngcctgncnaacacggtgaaacccngctctantaaaaananaaaaattngcnaggcntggtggnacangcctgtaatcccagctatttgggangctgagncagnagaatnncntgaacccnggaggtggaggntncagtgagccgagatcangccactgcactccancctggactacaagagtgaaagcccgttctcaaaaaaaaaaaaaaaaaaaaaaaagtcctttcttcagtgaactctcatagggagggccaacagataaagtcagtaagagtgacactaacctggttaaggaagtgtgtggtttctcagagcacaccctgttctcatgctcctcccactcactgcccaatctttcctctccttcacttccaggctatctttagagaacttcagaatacaataatgaaaaccatgtctttgatcattaaacaccaaaaagtaactctgctactctcctcagcttcaggcaccaccactgacctgggacagtgaatcgacaatgccgtcttctgtctcgtggggcatcctcctgctggcaggcctgtgctgcctggtccctgtctccctggctgaggatccccagggagatgctgcccagaagacagatacatcccaccatgatcaggatcacccaaccttcaacaagatcacccccaacctggctgagttcgccttcagcctataccgccagctggcacaccagtccaacagcaccaatatcttcttctccccagtgagcatcgctacagcctttgcaatgctctccctggggaccaaggctgacactcacgatgaaatcctggagggcctgaatttcaacctcacggagattccggaggctcagatccatgaaggcttccaggaactcctccgtaccctcaaccagccagacagccagctccagctgaccaccggcaatggcctgttcctcagcgagggcctgaagctagtggataagtttttggaggatgttaaaaagttgtaccactcagaagccttcactgtcaacttcggggacaccgaagaggccaagaaacagatcaacgattacgtggagaagggtactcaagggaaaattgtggatttggtcaaggagcttgacagagacacagtttttgctctggtgaattacatcttctttaaaggcaaatgggagagaccctttgaagtcaaggacaccgaggaagaggacttccacgtggaccaggtgaccaccgtgaaggtgcctatgatgaagcgtttaggcatgtttaacatccagcactgtaagaagctgtccagctgggtgctgctgatgaaatacctgggcaatgccaccgccatcttcttcctgcctgatgaggggaaactacagcacctggaaaatgaactcacccacgatatcatcaccaagttcctggaaaatgaagacagaaggtctgccagcttacatttacccaaactgtccattactggaacctatgatctgaagagcgtcctgggtcaactgggcatcactaaggtcttcagcaatggggctgacctctccggggtcacagaggaggcacccctgaagctctccaaggccgtgcataaggctgtgctgaccatcgacgagaaagggactgaagctgctggggccatgtttttagaggccatacccatgtctatcccccccgaggtcaagttcaacaaaccctttgtcttcttaatgattgaacaaaataccaagtctcccctcttcatgggaaaagtggtgaatcccacccaaaaataactgcctctcgctcctcaacccctcccctccatccctggccccctccctggatgacattaaagaagggttgagctggaaaacaacccacccacaacgccacaacaaaaaccccgtgcgcgcagcgcacgcgagcaccccgacaaacccctacaaaaacccccggccaaaggcagcccgcgccccaaacgccacctcacaccaccgcccaccgcgcccccgcaaaaaccagaggaacaacaaaccacagggtgggaacccccaccatgtaaaacgcgcgaggacacccagcgcgtccacacaccccggagcagctcgagggcaaaccgcgacaacccaccagcggaaccacgaacgacccatacacccacccccccctg

SEQ ID NO: 332820 - DNA, 2702 bp, Homo sapiens
  misc_feature (510)..(510): n is a, c, g, or t
  misc_feature (512)..(512): n is a, c, g, or t
  misc_feature (518)..(518): n is a, c, g, or t
  misc_feature (522)..(522): n is a, c, g, or t
  misc_feature (527)..(527): n is a, c, g, or t
  misc_feature (533)..(534): n is a, c, g, or t
  misc_feature (539)..(539): n is a, c, g, or t
  misc_feature (543)..(543): n is a, c, g, or t
  misc_feature (563)..(563): n is a, c, g, or t
  misc_feature (567)..(568): n is a, c, g, or t
  misc_feature (571)..(572): n is a, c, g, or t
  misc_feature (577)..(578): n is a, c, g, or t
  misc_feature (593)..(593): n is a, c, g, or t
  misc_feature (599)..(599): n is a, c, g, or t
  misc_feature (605)..(605): n is a, c, g, or t
  misc_feature (607)..(607): n is a, c, g, or t
  misc_feature (623)..(623): n is a, c, g, or t
  misc_feature (630)..(630): n is a, c, g, or t
  misc_feature (637)..(637): n is a, c, g, or t
  misc_feature (639)..(639): n is a, c, g, or t
  misc_feature (647)..(647): n is a, c, g, or t
  misc_feature (650)..(650): n is a, c, g, or t
  misc_feature (655)..(655): n is a, c, g, or t
  misc_feature (662)..(662): n is a, c, g, or t
  misc_feature (666)..(666): n is a, c, g, or t
  misc_feature (691)..(691): n is a, c, g, or t
  misc_feature (698)..(698): n is a, c, g, or t
  misc_feature (702)..(702): n is a, c, g, or t
  misc_feature (708)..(709): n is a, c, g, or t
  misc_feature (711)..(711): n is a, c, g, or t
  misc_feature (719)..(719): n is a, c, g, or t
  misc_feature (731)..(731): n is a, c, g, or t
  misc_feature (733)..(733): n is a, c, g, or t
  misc_feature (750)..(750): n is a, c, g, or t
  misc_feature (765)..(765): n is a, c, g, or t
ctttaccattcttccatggaagaagacaaaattcatctgagtgtagaaactaactatgctatggctcaggcccctctgggtatttctcctcaggaactgctcacctgtggggagagtgacttgtggtctgcttacccaaaataattcaatactcaaggctgggtggactctacagggcaatggtgtgactgaccagctctttcattgaagacatagaaagtacaagcagacccttctggcaggagctctaacatcaggcttccaatctagatttcatcagtaataaacattttggtttctatctcaggactcccaaatcgttcaattggacttgaactcagaagggaaactggatgttacttattgaactccaggtacacattatgtttcattaaaaaatatctatacaattatgacatcaagtagatgtcattggctactagaattatgtgggaaaacccttgtttgagtaagaggacttactatgtaaatatttttgaaaaagtggantnctggcngggngcagnggctcnngcctntaancccagcactttgggaggccnaggnnggnngatcnngaggtcaggagttcnagaccngcctgncnaacacggtgaaacccngctctantaaaaananaaaaattngcnaggcntggtggnacangcctgtaatcccagctatttgggangctgagncagnagaatnncntgaacccnggaggtggaggntncagtgagccgagatcangccactgcactccancctggactacaagagtgaaagcccgttctcaaaaaaaaaaaaaaaaaaaaaaaagtcctttcttcagtgaactctcatagggagggccaacagataaagtcagtaagagtgacactaacctggttaaggaagtgtgtggtttctcagagcacaccctgttctcatgctcctcccactcactgcccaatctttcctctccttcacttccaggctatctttagagaacttcagaatacaataatgaaaaccatgtctttgatcattaaacaccaaaaagtaactctgctactctcctcagcttcaggcaccaccactgacctgggacagtgaatcgacaatgccgtcttctgtctcgtggggcatcctcctgctggcaggcctgtgctgcctggtccctgtctccctggctgaggatccccagggagatgctgcccagaagacagatacatcccaccatgatcaggatcacccaaccttcaacaagatcacccccaacctggctgagttcgccttcagcctataccgccagctggcacaccagtccaacagcaccaatatcttcttctccccagtgagcatcgctacagcctttgcaatgctctccctggggaccaaggctgacactcacgatgaaatcctggagggcctgaatttcaacctcacggagattccggaggctcagatccatgaaggcttccaggaactcctccgtaccctcaaccagccagacagccagctccagctgaccaccggcaatggcctgttcctcagcgagggcctgaagctagtggataagtttttggaggatgttaaaaagttgtaccactcagaagccttcactgtcaacttcggggacaccgaagaggccaagaaacagatcaacgattacgtggagaagggtactcaagggaaaattgtggatttggtcaaggagcttgacagagacacagtttttgctctggtgaattacatcttctttaaaggcaaatgggagagaccctttgaagtcaaggacaccgaggaagaggacttccacgtggaccaggtgaccaccgtgaaggtgcctatgatgaagcgtttaggcatgtttaacatccagcactgtaagaagctgtccagctgggtgctgctgatgaaatacctgggcaatgccaccgccatcttcttcctgcctgatgaggggaaactacagcacctggaaaatgaactcacccacgatatcatcaccaagttcctggaaaatgaagacagaaggtctgccagcttacatttacccaaactgtccattactggaacctatgatctgaagagcgtcctgggtcaactgggcatcactaaggtcttcagcaatggggctgacctctccggggtcacagaggaggcacccctgaagctctccaaggccgtgcataaggctgtgctgaccatcgacgagaaagggactgaagctgctggggccatgtttttagaggccatacccatgtctatcccccccgaggtcaagttcaacaaaccctttgtcttcttaatgattgaacaaaataccaagtctcccctcttcatgggaaaagtggtgaatcccacccaaaaataactgcctctcgctcctcaacccctcccctccatccctggccccctccctggatgacattaaagaagggttgagctggaaaaaaaaacaacaacaacacacaacacaacactgttcggccgaacgcgaccccgaaaaagctgctagaaacaatcgtgtgcaccacggcccaaaagggacgtgaaacggggcacagcggagtccacagagaaacccgggggcaaggaaacgggcggagatacacacccgaaaagaacccccgggagaaacaaggaggttagaaaaaagtccaagggggtccagagcgcacagggagcatcacaaggggccaaggaaccagacaaac

SEQ ID NO: 332821 - DNA, 2514 bp, Homo sapiens
  misc_feature (510)..(510): n is a, c, g, or t
  misc_feature (512)..(512): n is a, c, g, or t
  misc_feature (518)..(518): n is a, c, g, or t
  misc_feature (522)..(522): n is a, c, g, or t
  misc_feature (527)..(527): n is a, c, g, or t
  misc_feature (533)..(534): n is a, c, g, or t
  misc_feature (539)..(539): n is a, c, g, or t
  misc_feature (543)..(543): n is a, c, g, or t
  misc_feature (563)..(563): n is a, c, g, or t
  misc_feature (567)..(568): n is a, c, g, or t
  misc_feature (571)..(572): n is a, c, g, or t
  misc_feature (577)..(578): n is a, c, g, or t
  misc_feature (593)..(593): n is a, c, g, or t
  misc_feature (599)..(599): n is a, c, g, or t
  misc_feature (605)..(605): n is a, c, g, or t
  misc_feature (607)..(607): n is a, c, g, or t
  misc_feature (623)..(623): n is a, c, g, or t
  misc_feature (630)..(630): n is a, c, g, or t
  misc_feature (637)..(637): n is a, c, g, or t
  misc_feature (639)..(639): n is a, c, g, or t
  misc_feature (647)..(647): n is a, c, g, or t
  misc_feature (650)..(650): n is a, c, g, or t
  misc_feature (655)..(655): n is a, c, g, or t
  misc_feature (662)..(662): n is a, c, g, or t
  misc_feature (666)..(666): n is a, c, g, or t
  misc_feature (691)..(691): n is a, c, g, or t
  misc_feature (698)..(698): n is a, c, g, or t
  misc_feature (702)..(702): n is a, c, g, or t
  misc_feature (708)..(709): n is a, c, g, or t
  misc_feature (711)..(711): n is a, c, g, or t
  misc_feature (719)..(719): n is a, c, g, or t
  misc_feature (731)..(731): n is a, c, g, or t
  misc_feature (733)..(733): n is a, c, g, or t
  misc_feature (750)..(750): n is a, c, g, or t
  misc_feature (765)..(765): n is a, c, g, or t
ctttaccattcttccatggaagaagacaaaattcatctgagtgtagaaactaactatgctatggctcaggcccctctgggtatttctcctcaggaactgctcacctgtggggagagtgacttgtggtctgcttacccaaaataattcaatactcaaggctgggtggactctacagggcaatggtgtgactgaccagctctttcattgaagacatagaaagtacaagcagacccttctggcaggagctctaacatcaggcttccaatctagatttcatcagtaataaacattttggtttctatctcaggactcccaaatcgttcaattggacttgaactcagaagggaaactggatgttacttattgaactccaggtacacattatgtttcattaaaaaatatctatacaattatgacatcaagtagatgtcattggctactagaattatgtgggaaaacccttgtttgagtaagaggacttactatgtaaatatttttgaaaaagtggantnctggcngggngcagnggctcnngcctntaancccagcactttgggaggccnaggnnggnngatcnngaggtcaggagttcnagaccngcctgncnaacacggtgaaacccngctctantaaaaananaaaaattngcnaggcntggtggnacangcctgtaatcccagctatttgggangctgagncagnagaatnncntgaacccnggaggtggaggntncagtgagccgagatcangccactgcactccancctggactacaagagtgaaagcccgttctcaaaaaaaaaaaaaaaaaaaaaaaagtcctttcttcagtgaactctcatagggagggccaacagataaagtcagtaagagtgacactaacctggttaaggaagtgtgtggtttctcagagcacaccctgttctcatgctcctcccactcactgcccaatctttcctctccttcacttccaggctatctttagagaacttcagaatacaataatgaaaaccatgtctttgatcattaaacaccaaaaagtaactctgctactctcctcagcttcaggcaccaccactgacctgggacagtgaatcgacaatgccgtcttctgtctcgtggggcatcctcctgctggcaggcctgtgctgcctggtccctgtctccctggctgaggatccccagggagatgctgcccagaagacagatacatcccaccatgatcaggatcacccaaccttcaacaagatcacccccaacctggctgagttcgccttcagcctataccgccagctggcacaccagtccaacagcaccaatatcttcttctccccagtgagcatcgctacagcctttgcaatgctctccctggggaccaaggctgacactcacgatgaaatcctggagggcctgaatttcaacctcacggagattccggaggctcagatccatgaaggcttccaggaactcctccgtaccctcaaccagccagacagccagctccagctgaccaccggcaatggcctgttcctcagcgagggcctgaagctagtggataagtttttggaggatgttaaaaagttgtaccactcagaagccttcactgtcaacttcggggacaccgaagaggccaagaaacagatcaacgattacgtggagaagggtactcaagggaaaattgtggatttggtcaaggagcttgacagagacacagtttttgctctggtgaattacatcttctttaaaggcaaatgggagagaccctttgaagtcaaggacaccgaggaagaggacttccacgtggaccaggtgaccaccgtgaaggtgcctatgatgaagcgtttaggcatgtttaacatccagcactgtaagaagctgtccagctgggtgctgctgatgaaatacctgggcaatgccaccgccatcttcttcctgcctgatgaggggaaactacagcacctggaaaatgaactcacccacgatatcatcaccaagttcctggaaaatgaagacagaaggtctgccagcttacatttacccaaactgtccattactggaacctatgatctgaagagcgtcctgggtcaactgggcatcactaaggtcttcagcaatggggctgacctctccggggtcacagaggaggcacccctgaagctctccaaggccgtgcataaggctgtgctgaccatcgacgagaaagggactgaagctgctggggccatgtttttagaggccatacccatgtctatcccccccgaggtcaagttcaacaaaccctttgtcttcttaatgattgaacaaaataccaagtctcccctcttcatgggaaaagtggtgaatcccacccaaaaataactgcctctcgctcctcaacccctcccctccatccctggccccctccctggatgacattaaagaagggttgagctggaaacaatcagattacaaaagaaaaaaaagagcaaaacaacgtatggtggtcgctcgagctgggaaaagttataacccgg

SEQ ID NO: 332822 - DNA, 172 bp, Homo sapiens
caaaagcattatgctgaatgaaaaatagcctatctcaaaagtttacatactgtatagtttcacttatgtaaaattattaaaatgacaactttattgaagtataatttatataccacaaaattcacctgcataagtatataattcaatgccttttaatgaatttactaagttg

SEQ ID NO: 332823 - DNA, 634 bp, Homo sapiens
caattatatccagatcctcttgaacccacctgtctttttcaccttctttcatgtggcctctgccgttgaagtataaacaggtccagatgggaattttgtggatctgtagacagctttgcctaacctagagtgggtaagacagtcttggaaataaacactgacctatcattccgatgaaacagtcagtgggcctaaaaagaactattcctgggcacatatttattgggaacaaagtgctgggaatcatcaaaatgaatgagacttagccactaccttaagttgattgcaatctaacaagagagagacaggtacccaaatagcctaataacatcagattgaattctatacatgctcttttatcctgttcttctttaagggaaaacattatttgtttaataaaaattgtggacgcttgttatacaaattcaagcaatgcatacagaaaagaaaacagcagaaggtcaccaaatctcactacccaaaatataacaccatgttaacatttgatgagcaccattccaggcacttatgcagatatagatacagaaaaaaggacaggtagatagatgacaacctatattggtggataaaacgatgagcagaggttaaatagactcacattttatgcaatgtt

SEQ ID NO: 332824 - DNA, 296 bp, Homo sapiens
ctgcgtaattattctgcgtgctgcttgggagccagagggatagcccactgctgctcctaccatcaccaaaacacattgcccaggagcccaaggacccatacgctcacccagcacactgctgccactgctgacacccaagtaaaatgcctggaggcctaaggatcagcctgtccagactcactacctttggtgcacagaacgctgcctgaagccctaaggatcagcacactcagcctgctgttgtccaaggactggcctctacctggtgtcctcatccccagcaaagttctactaca

SEQ ID NO: 332825 - DNA, 284 bp, Homo sapiens
atcctaggatattctgcaactgtagatgcaactgctatgtctcagtttctacccaccactaaacagtgtaaaatgactgacctctccgtatggaaaactggaaacctaatatactactaagcatttttgaaagtattaaaaaagcaaccatgaccgggggcacactggctcactctcgtaatcccagcactttgggagatcaaggcaggagggtcacttgaggtcagcagttcaagaccagccaacatggtgaaaccctgtctctacaaaaaatacaaaaatta

SEQ ID NO: 332826 - DNA, 5702 bp, Homo sapiens
  misc_feature (6)..(6): n is a, c, g, or t
ggcggnggcgctcagcgcaggcaggtccccctgctgccgggtcccatttgttgccggctctgactcggggcggccgcggcgcgcggagctccggggagtcaggcggagcagccgcgcagccacgacggagcagcagcgggactggccgccccgcgcccccttcgccgccgtgcccttccccggcgcgctcaccccgttctcgggatgggattgtagcggcggcgcggactcggcggggatcgcggcggaggcggcggcgtcggcggcggcgtcggcggccgagcggggctccatgttttcccctggccaggaggaacactgcgcccccaataaggagccagtgaaatacggggagctggtggtgctcgggtacaatggtgctttacccaatggagatagaggacggaggaaaagtagatttgccctctacaagcggcccaaggcaaatggtgtcaaacccagcaccgtccatgtgatatccacgccccaggcatccaaggctatcagctgcaaaggtcaacacagtatatcctacactttgtcaaggaatcagactgtggtggtggagtacacacatgataaggatacggatatgtttcaggtgggcagatcaacagaaagccctatcgacttcgttgtcacagacacgatttctggcagccagaacacggacgaagcccagatcacacagagcaccatatccaggttcgcctgcaggatcgtgtgcgacaggaatgaaccttacacagcacggatattcgccgccggatttgactcttccaaaaacatatttcttggagaaaaggcagcaaagtggaaaaaccccgacggccacatggatgggctcactactaatggcgtcctggtgatgcatccacgagggggcttcaccgaggagtcccagcccggggtctggcgcgagatctctgtctgtggagatgtgtacaccttgcgagaaaccaggtcggcccagcaacgaggaaagctggtggaaagtgagaccaacgtcctgcaggacggctccctcattgacctgtgtggggccactctcctctggagaacagcagatgggctttttcatactccaactcagaagcacatagaagccctccggcaggagattaacgccgcccggcctcagtgtcctgtggggctcaacaccctggccttccccagcatcaacaggaaagaggtggtggaggagaagcagccctgggcatatctcagttgtggccacgtgcacgggtaccacaactggggccatcggagtgacacggaggccaacgagagggagtgtcccatgtgcaggactgtgggcccctatgtgcctctctggcttggctgtgaggcaggattttatgtagacgcaggaccgccaactcatgctttcactccctgtggacacgtgtgctcggagaagtctgcaaaatactggtctcagatcccgttgcctcatggaactcatgcatttcacgctgcttgccctttctgtgctacacagctggttggggagcaaaactgcatcaaattaattttccaaggtccaattgactgacgcccttgacagccatctacgactttattaacaggttactgtgaagattttgccactaactctagattttacctttttgtaatgctgtttatcagaggagggtgacaggggctggaaataaagagaggggacatggtgatgaaacatggcaggagtgtaacagataccagtggtgtgttgcatgctcaaaacagcagcgtcgtcattgaagtctgcttgattaaaccataatatctttgtaataattggatttaaaatgctatgcttctatttttaaccttgggtttttaaccaagtttttttttttttttgtaatcttggacaagactttaaatcatattttacagatgtagaagaaatttattcaaaagtgtgggctcatgaagttcacttcagtgcagtgtggtgtaggtgttacgcgaagggcgcacagtgtctagaaatacttgatcgtggctcaaacctgaccagacagcagaggggcggctctgtacagtgtgactggtggacagatggccttaggcacaggtggttttgaaatctggggctttttctgatttatttttctgacttgttgggggagagaatattcataacttgtgggctttttttttttttaacttcagtggaatttactttagatattcattcatcaaatacatgggacttcacaaacaattttccataactttttagcctgtcttttgttatttctgcctaatatgatttgccccgatactcatcttgcacggccagaactgtttggttgattaaaatacatcagctcttaaaaactcattaactgagggtaattacagtagtagacatggtctgggtactatactaccatgtttatttgctgactgaattaagatttaagaatgattaaaaataagcttttactttttaaaaccacttgaggtttcataaagcttggggtttttttttttcctttgttaagaaagccaaccaatcacaatgatatagtcattgttgtgcactcccttttcaccatctgtcaccttcccttgcagcttaaggagcccagtaagttttgaaaatgtttgcgaatcaaactaaatttaagtgggatgattagatatacacaacaccaagtggtacatctgcagagataattcaaaattcctgcttttgagagagcaaatgagtgtttgctgaggaataattaaatgagaatttcataggagctccaccattcctgttactttcatttcattttgattaataattcttggatgcttggcatcgatcgtatcactgctcctagaaggtaaagatcctttaggacatgagactggtagaagctggctgagataaaataagtatttatttaaactaatgttctcttaatttgaccattgcagatttgggtgacttttttttaacctttgtacatatacgtaatttatatgattctaatgtactatatccatacttgaattggttttttcgtattttgcctactggcaaatattttgcctattttcagtcgttctaacctatttgaatacgcttttccttaaagtgatacgataatattactcttgattgctgctgcttaatttgatgtaatatgtttaaagttcagcctctcagttttaatatagctttatttttcagtggagatcattgtttaggatgagacatttttggttttggttttgtttgggtaaattttaaatggtgtgaaaatcgatgacaacagtcctcttacagatagcttgctgtattctgtatagcttactctacctgcagacagaaaatgaaagaaaaaaatggacttgcctagaataatatattgaatgccttttgatttagccagagtctctgatgattagctttcgctgatagagtatgtcttttcagcctgtaattctttgggccccaaagaatgacaaaggaggcactcgttctcttttcttgctgtatgcctagaaagtggttgaaggattcttgatgccctaaaaccatcttgtaagctaaatggtcttgcatccagaaaggccagattttacctaccaagaaaaaaagatatttttccagagagttaggtatatcataattttccatttcaagtcctgtttataagtctagtcattctgcaacgtgacatatcccccaaaatgaagttaccttccaagttggacacgtcccgtagttgggcatatgtctaactaaaagtttctgacttttagtaaattcagcttaaatataagttgaaatttgggaaataatttccaagctcttggaaggggtaacagtgaaccgccctccatgggctccacatcttttcctttggcttccaaagtcaggtcccgcccaccctgcctaaggaactgcagagaggtggcaaatcagcaaaaaggacaccaggctcttcttggccacttgtaggaagatccctttacaattttgactaaggagattttttttttcacagttgagttagtttgtgaaaataaagaactctgtagctcaccaaggtggagaaacgcaattcagaaaagtaatttctccaaggtcacttctttttttatgtcttgccatcactttaaaggactagccccactcccccatgtgtatacacaaggaaattgcagaccaattagttgtcttggcctgactctaatgccttttgcaagtagctttccagaagtaaaagtcccagtgatgtattcccatagaaatatttttcagttgtttatgtcgtttactacaaaaaaaaagattcagagtggatggagtacaactctgagtatttttctagtccggaattttttattaataatcggtgctgccgggtcatgcatgctgcaactctcaacatttcccttatttggttcagcttttagcaaaaagggctacagttcaccctgcagagtattaaggtttctggatttttttctcccaactgtggcccaaaagaattaaaatctgttaatataaatagagaacatatttatcattcctcgatagttaattatagactttggtacctttgtgcctcagggaagccacgtgatataactggttatagaatttcagggttagggtttaaagaaaggagaaagccattggaaaaatgatgggctccattaaggagactaatgaatctggatgcagaaatatgtcagaaactggcataaacatgattgtagtagaatttattttccagtaccaatagggaaattattttaagttattacatttactgtattgggaaacttgaggagaactctttagttcataaagcttcaatgtctttttttttttttttcatggaaaaactcaaacctctgttatttgggagctcagtattgtgtggacacttacgagagttttctgcttaattgaagtgtaatataggttgtagaattgttacctgcagttctatggttttgtttcacttcttttcttttttaaagccattctgttctttggatgtgcttgaaagggtgtgtgattacaccattgttaatgctgggtaaaaactatcttcttgcagccttgcctcataacagtggaatttctgatagacaaaccacaggactttgattttaagccaaatccatctccatccctttactgtcaatcttctgtcccagtagtttagcctttgtggcttaggttatgatgcgcctccttctgtgcgaccaatgagacgacttcagcatctttttaaaataatctaagcatcattgaagcagtaacacaaaaaaaaggttcagtattttctttttagtataacttacatcctttcaaataagtctttgccctcatgaagaatccctagaggaagataaggaaaataagtattttccagttttgcttgacagtttctaaacaaacaaaaataaactcaatgaaaggaaagatgtttctttttagctgagatgacagattgcttctctgtattaaatagtctagaagttaaggggatggtcacatttaccatgtattgtgttattagcagttaaattttatgaatatgtttgtaaaattgttgttttatatttcatgtcaaattgaaaagtttatttcttcactattgtacctgtggaaatacaagccattttacaggaaaaaatcttcaaaaactattaaatggatatcagcctgtttgtga

SEQ ID NO: 332827 - DNA, 5917 bp, Homo sapiens
  misc_feature (6)..(6): n is a, c, g, or t
ggcggnggcgctcagcgcaggcaggtccccctgctgccgggtcccatttgttgccggctctgactcggggcggccgcggcgcgcggagctccggggagtcaggcggagcagccgcgcagccacgacggagcagcagcgggactggccgccccgcgcccccttcgccgccgtgcccttccccggcgcgctcaccccgttctcgggatgggattgtagcggcggcgcggactcggcggggatcgcggcggaggcggcggcgtcggcggcggcgtcggcggccgagcggggctccatgttttcccctggccaggaggaacactgcgcccccaataaggagccagtgaaatacggggagctggtggtgctcgggtacaatggtgctttacccaatggagatagaggacggaggaaaagtagatttgccctctacaagcggcccaaggcaaatggtgtcaaacccagcaccgtccatgtgatatccacgccccaggcatccaaggctatcagctgcaaaggtcaacacagtatatcctacactttgtcaaggaatcagactgtggtggtggagtacacacatgataaggatacggatatgtttcaggtgggcagatcaacagaaagccctatcgacttcgttgtcacagacacgatttctggcagccagaacacggacgaagcccagatcacacagagcaccatatccaggttcgcctgcaggatcgtgtgcgacaggaatgaaccttacacagcacggatattcgccgccggatttgactcttccaaaaacatatttcttggagaaaaggcagcaaagtggaaaaaccccgacggccacatggatgggctcactactaatggcgtcctggtgatgcatccacgagggggcttcaccgaggagtcccagcccggggtctggcgcgagatctctgtctgtggagatgtgtacaccttgcgagaaaccaggtcggcccagcaacgaggaaagctggtggaaagtgagaccaacgtcctgcaggacggctccctcattgacctgtgtggggccactctcctctggagaacagcagatgggctttttcatactccaactcagaagcacatagaagccctccggcaggagattaacgccgcccggcctcagtgtcctgtggggctcaacaccctggccttccccagcatcaacaggaaagaggtggtggaggagaagcagccctgggcatatctcagttgtggccacgtgcacgggtaccacaactggggccatcggagtgacacggaggccaacgagagggagtgtcccatgtgcaggactgtgggcccctatgtgcctctctggcttggctgtgaggcaggattttatgtagacgcaggaccgccaactcatgctttcactccctgtggacacgtgtgctcggagaagtctgcaaaatactggtctcagatcccgttgcctcatggaactcatgcatttcacgctgcttgccctttctgtgctacacagctggttggggagcaaaactgcatcaaattaattttccaaggtccaattgactgacgcccttgacagccatctacgactttattaacaggttactgtgaagattttgccactaactctagattttacctttttgtaatgctgtttatcagaggagggtgacaggggctggaaataaagagaggggacatggtgatgaaacatggcaggagtgtaacagataccagtggtgtgttgcatgctcaaaacagcagcgtcgtcattgaagtctgcttgattaaaccataatatctttgtaataattggatttaaaatgctatgcttctatttttaaccttgggtttttaaccaagtttttttttttttttgtaatcttggacaagactttaaatcatattttacagatgtagaagaaatttattcaaaagtgtgggctcatgaagttcacttcagtgcagtgtggtgtaggtgttacgcgaagggcgcacagtgtctagaaatacttgatcgtggctcaaacctgaccagacagcagaggggcggctctgtacagtgtgactggtggacagatggccttaggcacaggtggttttgaaatctggggctttttctgatttatttttctgacttgttgggggagagaatattcataacttgtgggctttttttttttttaacttcagtggaatttactttagatattcattcatcaaatacatgggacttcacaaacaattttccataactttttagcctgtcttttgttatttctgcctaatatgatttgccccgatactcatcttgcacggccagaactgtttggttgattaaaatacatcagctcttaaaaactcattaactgagggtaattacagtagtagacatggtctgggtactatactaccatgtttatttgctgactgaattaagatttaagaatgattaaaaataagcttttactttttaaaaccacttgaggtttcataaagcttggggtttttttttttcctttgttaagaaagccaaccaatcacaatgatatagtcattgttgtgcactcccttttcaccatctgtcaccttcccttgcagcttaaggagcccagtaagttttgaaaatgtttgcgaatcaaactaaatttaagtgggatgattagatatacacaacaccaagtggtacatctgcagagataattcaaaattcctgcttttgagagagcaaatgagtgtttgctgaggaataattaaatgagaatttcataggagctccaccattcctgttactttcatttcattttgattaataattcttggatgcttggcatcgatcgtatcactgctcctagaaggtaaagatcctttaggacatgagactggtagaagctggctgagataaaataagtatttatttaaactaatgttctcttaatttgaccattgcagatttgggtgacttttttttaacctttgtacatatacgtaatttatatgattctaatgtactatatccatacttgaattggttttttcgtattttgcctactggcaaatattttgcctattttcagtcgttctaacctatttgaatacgcttttccttaaagtgatacgataatattactcttgattgctgctgcttaatttgatgtaatatgtttaaagttcagcctctcagttttaatatagctttatttttcagtggagatcattgtttaggatgagacatttttggttttggttttgtttgggtaaattttaaatggtgtgaaaatcgatgacaacagtcctcttacagatagcttgctgtattctgtatagcttactctacctgcagacagaaaatgaaagaaaaaaatggacttgcctagaataatatattgaatgccttttgatttagccagagtctctgatgattagctttcgctgatagagtatgtcttttcagcctgtaattctttgggccccaaagaatgacaaaggaggcactcgttctcttttcttgctgtatgcctagaaagtggttgaaggattcttgatgccctaaaaccatcttgtaagctaaatggtcttgcatccagaaaggccagattttacctaccaagaaaaaaagatatttttccagagagttaggtatatcataattttccatttcaagtcctgtttataagtctagtcattctgcaacgtgacatatcccccaaaatgaagttaccttccaagttggacacgtcccgtagttgggcatatgtctaactaaaagtttctgacttttagtaaattcagcttaaatataagttgaaatttgggaaataatttccaagctcttggaaggggtaacagtgaaccgccctccatgggctccacatcttttcctttggcttccaaagtcaggtcccgcccaccctgcctaaggaactgcagagaggtggcaaatcagcaaaaaggacaccaggctcttcttggccacttgtaggaagatccctttacaattttgactaaggagattttttttttcacagttgagttagtttgtgaaaataaagaactctgtagctcaccaaggtggagaaacgcaattcagaaaagtaatttctccaaggtcacttctttttttatgtcttgccatcactttaaaggactagccccactcccccatgtgtatacacaaggaaattgcagaccaattagttgtcttggcctgactctaatgccttttgcaagtagctttccagaagtaaaagtcccagtgatgtattcccatagaaatatttttcagttgtttatgtcgtttactacaaaaaaaaagattcagagtggatggagtacaactctgagtatttttctagtccggaattttttattaataatcggtgctgccgggtcatgcatgctgcaactctcaacatttcccttatttggttcagcttttagcaaaaagggctacagttcaccctgcagagtattaaggtttctggatttttttctcccaactgtggcccaaaagaattaaaatctgttaatataaatagagaacatatttatcattcctcgatagttaattatagactttggtacctttgtgcctcagggaagccacgtgatataactggttatagaatttcagggttagggtttaaagaaaggagaaagccattggaaaaatgatgggctccattaaggagactaatgaatctggatgcagaaatatgtcagaaactggcataaacatgattgtagtagaatttattttccagtaccaatagggaaattattttaagttattacatttactgtattgggaaacttgaggagaactctttagttcataaagcttcaatgtctttttttttttttttcatggaaaaactcaaacctctgttatttgggagctcagtattgtgtggacacttacgagagttttctgcttaattgaagtgtaatataggttgtagaattgttacctgcagttctatggttttgtttcacttcttttcttttttaaagccattctgttctttggatgtgcttgaaagggtgtgtgattacaccattgttaatgctgggtaaaaactatcttcttgcagccttgcctcataacagtggaatttctgatagacaaaccacaggactttgattttaagccaaatccatctccatccctttactgtcaatcttctgtcccagtagtttagcctttgtggcttaggttatgatgcgcctccttctgtgcgaccaatgagacgacttcagcatctttttaaaataatctaagcatcattgaagcagtaacacaaaaaaaaggttcagtattttctttttagtataacttacatcctttcaaataagtctttgccctcatgaagaatccctagaggaagataaggaaaataagtattttccagttttgcttgacagtttctaaacaaacaaaaataaactcaatgaaaggaaagatgtttctttttagctgagatgacagattgcttctctgtattaaatagtctagaagttaaggggatggtcacatttaccatgtattgtgttattagcagttaaattttatgaatatgtttgtaaaattgttgttttatatttcatgtcaaattgaaaagtttatttcttcactattgtacctgtggaaatacaagccattttacaggaaaaaatcttcaaaaactattaaatggatatcagcctgtttgtgagccattgtcttcagattctgtggttgtcactgagttcattaggacatttagtaggttgatacgagtagaactgatttttttcacttctctaacttccaagttaatctccagctgttgagtttattaattgttttatattctgcacaatacatatttaaaccttgattctgaaaatcccctacattttttaattaaagaaatttccttggtgccta

SEQ ID NO: 332828 - DNA, 1798 bp, Homo sapiens
  misc_feature (6)..(6): n is a, c, g, or t
ggcggnggcgctcagcgcaggcaggtccccctgctgccgggtcccatttgttgccggctctgactcggggcggccgcggcgcgcggagctccggggagtcaggcggagcagccgcgcagccacgacggagcagcagcgggactggccgccccgcgcccccttcgccgccgtgcccttccccggcgcgctcaccccgttctcgggatgggattgtagcggcggcgcggactcggcggggatcgcggcggaggcggcggcgtcggcggcggcgtcggcggccgagcggggctccatgttttcccctggccaggaggaacactgcgcccccaataaggagccagtgaaatacggggagctggtggtgctcgggtacaatggtgctttacccaatggagatagaggacggaggaaaagtagatttgccctctacaagcggcccaaggcaaatggtgtcaaacccagcaccgtccatgtgatatccacgccccaggcatccaaggctatcagctgcaaaggtcaacacagtatatcctacactttgtcaaggaatcagactgtggtggtggagtacacacatgataaggatacggatatgtttcaggtgggcagatcaacagaaagccctatcgacttcgttgtcacagacacgatttctggcagccagaacacggacgaagcccagatcacacagagcaccatatccaggttcgcctgcaggatcgtgtgcgacaggaatgaaccttacacagcacggatattcgccgccggatttgactcttccaaaaacatatttcttggagaaaaggcagcaaagtggaaaaaccccgacggccacatggatgggctcactactaatggcgtcctggtgatgcatccacgagggggcttcaccgaggagtcccagcccggggtctggcgcgagatctctgtctgtggagatgtgtacaccttgcgagaaaccaggtcggcccagcaacgaggaaagctggtggaaagtgagaccaacgtcctgcaggacggctccctcattgacctgtgtggggccactctcctctggagaacagcagatgggctttttcatactccaactcagaagcacatagaagccctccggcaggagattaacgccgcccggcctcagtgtcctgtggggctcaacaccctggccttccccagcatcaacaggaaagaggtggtggaggagaagcagccctgggcatatctcagttgtggccacgtgcacgggtaccacaactggggccatcggagtgacacggaggccaacgagagggagtgtcccatgtgcaggactgtgggcccctatgtgcctctctggcttggctgtgaggcaggattttatgtagacgcaggaccgccaactcatgctttcactccctgtggacacgtgtgctcggagaagtctgcaaaatactggtctcagatcccgttgcctcatggaactcatgcatttcacgctgcttgccctttctgtgctacacagctggttggggagcaaaactgcatcaaattaattttccaaggtccaattgactgacgcccttgacagccatctacgactttattaacaggttactgtgaagattttgccactaactctagattttacctttttgtaatgctgtttatcagaggagggtgacaggggctggaaataaagagaggggacatggtgatgaaacatggcaggagtgtaacagataccagtggtgtgttgcatgctcaaaacagcagcgtcgtcattgaagtctgcttgattaaaccataatatctttgtaat

SEQ ID NO: 332829 - DNA, 370 bp, Homo sapiens
tgagatggaatccgtgatttacttgtggggccacgtgggaaggagccagaatggaggcccagggctgggaggtgtccgtgctggagccagttttgagccaagcctcaggaagctggctgccttctgcagagctgctgggtgggagagccgtggagctggcagccgagggttgtcacatctgagcctgaagactactatagctgaagcatcattcactggacgtgacttctctcaaatagtgatccccttaaatgctttggtcttatctgtcgtgtagaatctgttctatctggttttgtgtttgtgttcaccaccacttggaagaactaactgagacttctgaagaatagacggtcacatggcctgggtt

SEQ ID NO: 332830 - DNA, 484 bp, Homo sapiens
cctggggagcttggcttagggaagttgtgggcctaccagggccgctgggagctgggcaggagctgagtccaaagacgttgttgggacctggagtcgggccagagtccggcctggagatgcagccgggaggaagagccgggcccggagggggcgccgggaggctgcaagtgggtctgagaggccaacttgaggaggcctggcctctgcctcccgcattgcccagctgttcctcctggctgcatctcccacctcccagcaaacaagctcttattggctcagctcccgcctgcgtttgtagaccccgaagtttctgcaaccaagctcttcagacccacatcccttctcccagtgactgaacagtcccagctccggctggagaagggcgtctgcagaccccgctgttgcctcccaggggagtctccaggcccagctctcgccccaccgcgacctcccaggcccaagtccctgccaagccccagctgcg

SEQ ID NO: 332831 - DNA, 2477 bp, Homo sapiens
cacctttccgcgggccgcggggatggcggcgcagggcgtagggcctgggccggggtcggcggcgcccccggggctggaggcggcccggcagaagctggcgctgcggcggaagaaggtgctgagcaccgaaggagatggagctgtacgagctggcgcaggcggcgggcggcgctatcgaccccgacgtgttcaagatcctggtggacctgctgaagctgaacgtggcccccctcgccgtcttccagatgctcaagtccatgtgtgccgggcagaggctagcgagcgagccccaggaccctgcggccgtgtctctgcccacgtcgagcgtgcccgagacccgagggagaaacaaaggcagcgctgccctcgggggagcattggccctggcggaacgcagcagccgcgaaggatccagccagaggatgccacgccagcccagcgctaccaggctgcccaaggggggcgggcctgggaagagccctacacggggcagcacctaggatggggcagagacttgttgcatctttgtccccagcaaaggctacatgttacctccttcaattgataataaacctttctgagatgcaaagggagctcgagaatactgcccagttactctagcgcgccaggccgaaccgcagcttcttggcttaggtacttctactcacagcggccgattccgaggccaactccagcaatggcttttgcaaatctgcggaaagtgctcatcagtgacagcctggacccttgctgccggaagatcttgcaagatggagggctgcaggtggtggaaaagcagaaccttagcaaagaggagctgatagcggagctgcaggactgtgaaggccttattgttcgctctgccaccaaggtgaccgctgatgtcatcaacgcagctgagaaactccaggtggtgggcagggctggcacaggtgtggacaatgtggatctggaggccgcaacaaggaagggcatcttggttatgaacacccccaatgggaacagcctcagtgccgcagaactcacttgtggaatgatcatgtgcctggccaggcagattccccaggcgacggcttcgatgaaggacggcaaatgggagcggaagaagttcatgggaacagagctgaatggaaagaccctgggaattcttggcctgggcaggattgggagagaggtagctacccggatgcagtcctttgggatgaagactatagggtatgaccccatcatttccccagaggtctcggcctcctttggtgttcagcagctgcccctggaggagatctggcctctctgtgatttcatcactgtgcacactcctctcctgccctccacgacaggcttgctgaatgacaacacctttgcccagtgcaagaagggggtgcgtgtggtgaactgtgcccgtggagggatcgtggacgaaggcgccctgctccgggccctgcagtctggccagtgtgccggggctgcactggacgtgtttacggaagagccgccacgggaccgggccttggtggaccatgagaatgtcatcagctgtccccacctgggtgccagcaccaaggaggctcagagccgctgtggggaggaaattgctgttcagttcgtggacatggtgaaggggaaatctctcacgggggttgtgaatgcccaggcccttaccagtgccttctctccacacaccaagccttggattggtctggcagaagctctggggacactgatgcgagcctgggctgggtcccccaaagggaccatccaggtgataacacagggaacatccctgaagaatgctgggaactgcctaagccccgcagtcattgtcggcctcctgaaagaggcttccaagcaggcggatgtgaacttggtgaacgctaagctgctggtgaaagaggctggcctcaatgtcaccacctcccacagccctgctgcaccaggggagcaaggcttcggggaatgcctcctggccgtggccctggcaggcgccccttaccaggctgtgggcttggtccaaggcactacacctgtactgcaggggctcaatggagctgtcttcaggccagaagtgcctctccgcagggacctgcccctgctcctattccggactcagacctctgaccctgcaatgctgcctaccatgattggcctcctggcagaggcaggcgtgcggctgctgtcctaccagacttcactggtgtcagatggggagacctggcacgtcatgggcatctcctccttgctgcccagcctggaagcgtggaagcagcatgtgactgaagccttccagttccacttctaaccttggagctcactggtccctgcctctggggcttttctgaagaaacccacccactgtgatcaatagggagagaaaatccacattcttgggctgaacgcgggcctctgacactgcttacactgcactctgaccctgtagtacagcaataaccgtctaataaagagcctacccccaacaa

SEQ ID NO: 332832 - DNA, 535 bp, Homo sapiens
agctcggccccttatttttttctctctttaacattcctgataagacagtacaatttactggtccaccattatccgtaacacttaaatcgacagagaacatcactctgcgtcgcagaagtgtcgtctgcacagacatttaactgaccctgaccattctggcgctctcagaacactccgccgggaatcctctatagcatacttggactcctgcaagctgggggcgtgcggttgttgtccaacgtcattcctgggatatcccatggggagacctggcacgtcatgggcatctcctccttgctgcccagcctggaagcgtggaagcagcatgtgactgaagccttccagttccacttctaaccttggagctcactggtccctgcctctggggcttttctgaagaaacccacccactgtgatcaatagggagagaaaatccacattcttgggctgaacgcgggcctctgacactgcttacactgcactctgaccctgtagtacagcaataaccgtctaataaagagcctacccccaacaa

SEQ ID NO: 332833 - DNA, 2269 bp, Homo sapiens
tgatagtcgaattccttcaacgtctagcacagtgccttcaaatttacccactcaaaaaaaaatttcgtaaggaattaataaatgaatccttaggaggaaaagtgaaaatgaagtttttctctcaggatgaggtgtatttctccgttcatttcagatatgcatcagctagtcagcgtaaattgtgctttttatatgctcaccaggtgtaggtaagagctttggctgagatggagaaattcatcgcgggaggataataaagcgggcagggatttggcaacctcagagccgcgaggaggaggcggagtcgcggagagtttgagtatttccgtccaatcaaaaggagactgtaggaggaggaggaggaggagatgactggggagcgggagctcgagaatactgcccagttactctagcgcgccaggccgaaccgcagcttcttggcttaggtacttctactcacagcggccgattccgaggccaactccagcaatggcttttgcaaatctgcggaaagtgctcatcagtgacagcctggacccttgctgccggaagatcttgcaagatggagggctgcaggtggtggaaaagcagaaccttagcaaagaggagctgatagcggagctgcaggactgtgaaggccttattgttcgctctgccaccaaggtgaccgctgatgtcatcaacgcagctgagaaactccaggtggtgggcagggctggcacaggtgtggacaatgtggatctggaggccgcaacaaggaagggcatcttggttatgaacacccccaatgggaacagcctcagtgccgcagaactcacttgtggaatgatcatgtgcctggccaggcagattccccaggcgacggcttcgatgaaggacggcaaatgggagcggaagaagttcatgggaacagagctgaatggaaagaccctgggaattcttggcctgggcaggattgggagagaggtagctacccggatgcagtcctttgggatgaagactatagggtatgaccccatcatttccccagaggtctcggcctcctttggtgttcagcagctgcccctggaggagatctggcctctctgtgatttcatcactgtgcacactcctctcctgccctccacgacaggcttgctgaatgacaacacctttgcccagtgcaagaagggggtgcgtgtggtgaactgtgcccgtggagggatcgtggacgaaggcgccctgctccgggccctgcagtctggccagtgtgccggggctgcactggacgtgtttacggaagagccgccacgggaccgggccttggtggaccatgagaatgtcatcagctgtccccacctgggtgccagcaccaaggaggctcagagccgctgtggggaggaaattgctgttcagttcgtggacatggtgaaggggaaatctctcacgggggttgtgaatgcccaggcccttaccagtgccttctctccacacaccaagccttggattggtctggcagaagctctggggacactgatgcgagcctgggctgggtcccccaaagggaccatccaggtgataacacagggaacatccctgaagaatgctgggaactgcctaagccccgcagtcattgtcggcctcctgaaagaggcttccaagcaggcggatgtgaacttggtgaacgctaagctgctggtgaaagaggctggcctcaatgtcaccacctcccacagccctgctgcaccaggggagcaaggcttcggggaatgcctcctggccgtggccctggcaggcgccccttaccaggctgtgggcttggtccaaggcactacacctgtactgcaggggctcaatggagctgtcttcaggccagaagtgcctctccgcagggacctgcccctgctcctattccggactcagacctctgaccctgcaatgctgcctaccatgattggcctcctggcagaggcaggcgtgcggctgctgtcctaccagacttcactggtgtcagatggggagacctggcacgtcatgggcatctcctccttgctgcccagcctggaagcgtggaagcagcatgtgactgaagccttccagttccacttctaaccttggagctcactggtccctgcctctggggcttttctgaagaaacccacccactgtgatcaatagggagagaaaatccacattcttgggctgaacgcgggcctctgacactgcttacactgcactctgaccctgtagtacagcaataaccgtctaataaagagcctacccccaacaa

SEQ ID NO: 332834 - DNA, 1913 bp, Homo sapiens
ggacgcgtgggtcgaccacgcgtcggggagctcgagaatactgcccagttactctagcgcgccaggccgaaccgcagcttcttggcttaggtacttctactcacagcggccgattccgaggccaactccagcaatggcttttgcaaatctgcggaaagtgctcatcagtgacagcctggacccttgctgccggaagatcttgcaagatggagggctgcaggtggtggaaaagcagaaccttagcaaagaggagctgatagcggagctgcaggactgtgaaggccttattgttcgctctgccaccaaggtgaccgctgatgtcatcaacgcagctgagaaactccaggtggtgggcagggctggcacaggtgtggacaatgtggatctggaggccgcaacaaggaagggcatcttggttatgaacacccccaatgggaacagcctcagtgccgcagaactcacttgtggaatgatcatgtgcctggccaggcagattccccaggcgacggcttcgatgaaggacggcaaatgggagcggaagaagttcatgggaacagagctgaatggaaagaccctgggaattcttggcctgggcaggattgggagagaggtagctacccggatgcagtcctttgggatgaagactatagggtatgaccccatcatttccccagaggtctcggcctcctttggtgttcagcagctgcccctggaggagatctggcctctctgtgatttcatcactgtgcacactcctctcctgccctccacgacaggcttgctgaatgacaacacctttgcccagtgcaagaagggggtgcgtgtggtgaactgtgcccgtggagggatcgtggacgaaggcgccctgctccgggccctgcagtctggccagtgtgccggggctgcactggacgtgtttacggaagagccgccacgggaccgggccttggtggaccatgagaatgtcatcagctgtccccacctgggtgccagcaccaaggaggctcagagccgctgtggggaggaaattgctgttcagttcgtggacatggtgaaggggaaatctctcacgggggttgtgaatgcccaggcccttaccagtgccttctctccacacaccaagccttggattggtctggcagaagctctggggacactgatgcgagcctgggctgggtcccccaaagggaccatccaggtgataacacagggaacatccctgaagaatgctgggaactgcctaagccccgcagtcattgtcggcctcctgaaagaggcttccaagcaggcggatgtgaacttggtgaacgctaagctgctggtgaaagaggctggcctcaatgtcaccacctcccacagccctgctgcaccaggggagcaaggcttcggggaatgcctcctggccgtggccctggcaggcgccccttaccaggctgtgggcttggtccaaggcactacacctgtactgcaggggctcaatggagctgtcttcaggccagaagtgcctctccgcagggacctgcccctgctcctattccggactcagacctctgaccctgcaatgctgcctaccatgattggcctcctggcagaggcaggcgtgcggctgctgtcctaccagacttcactggtgtcagatggggagacctggcacgtcatgggcatctcctccttgctgcccagcctggaagcgtggaagcagcatgtgactgaagccttccagttccacttctaaccttggagctcactggtccctgcctctggggcttttctgaagaaacccacccactgtgatcaatagggagagaaaatccacattcttgggctgaacgcgggcctctgacactgcttacactgcactctgaccctgtagtacagcaataaccgtctaataaagagcctacccccaacaa

SEQ ID NO: 332835 - DNA, 2539 bp, Homo sapiens
tgatagtcgaattccttcaacgtctagcacagtgccttcaaatttacccactcaaaaaaaaatttcgtaaggaattaataaatgaatccttaggaggaaaagtgaaaatgaagtttttctctcaggatgaggtgtatttctccgttcatttcagatatgcatcagctagtcagcgtaaattgtgctttttatatgctcaccaggtgtaggtaagagctttggctgagatggagaaattcatcgcgggaggataataaagcgggcagggatttggcaacctcagagccgcgaggaggaggcggagtcgcggagagtttgagtatttccgtccaatcaaaaggagactgtaggaggaggaggaggaggagatgactggggagcgggagctcgagaatactgcccagttactctagcgcgccaggccgaaccgcagcttcttggcttaggtacttctactcacagcggccgattccgaggccaactccagcaatggcttttgcaaatctgcggaaagtgctcatcagtgacagcctggacccttgctgccggaagatcttgcaagatggagggctgcaggtggtggaaaagcagaaccttagcaaagaggagctgatagcggagctgcaggactgtgaaggccttattgttcgctctgccaccaaggtgaccgctgatgtcatcaacgcagctgagaaactccaggtggtgggcagggctggcacaggtgtggacaatgtggatctggaggccgcaacaaggaagggcatcttggttatgaacacccccaatgggaacagcctcagtgccgcagaactcacttgtggaatgatcatgtgcctggccaggcagattccccaggcgacggcttcgatgaaggacggcaaatgggagcggaagaagttcatgggaacagagctgaatggaaagaccctgggaattcttggcctgggcaggattgggagagaggtagctacccggatgcagtcctttgggatgaagactatagggtatgaccccatcatttccccagaggtctcggcctcctttggtgttcagcagctgcccctggaggagatctggcctctctgtgatttcatcactgtgcacactcctctcctgccctccacgacaggcttgctgaatgacaacacctttgcccagtgcaagaagggggtgcgtgtggtgaactgtgcccgtggagggatcgtggacgaaggcgccctgctccgggccctgcagtctggccagtgtgccggggctgcactggacgtgtttacggaagagccgccacgggaccgggccttggtggaccatgagaatgtcatcagctgtccccacctgggtgccagcaccaaggaggctcagagccgctgtggggaggaaattgctgttcagttcgtggacatggtgaaggggaaatctctcacgggggttgtgaatgcccaggcccttaccagtgccttctctccacacaccaagccttggattggtctggcagaagctctggggacactgatgcgagcctgggctgggtcccccaaagggaccatccaggtgataacacagggaacatccctgaagaatgctgggaactgcctaagccccgcagtcattgtcggcctcctgaaagaggcttccaagcaggcggatgtgaacttggtgaacgctaagctgctggtgaaagaggctggcctcaatgtcaccacctcccacagccctgctgcaccaggggagcaaggcttcggggaatgcctcctggccgtggccctggcaggcgccccttaccaggctgtgggcttggtccaaggcactacacctgtactgcaggggctcaatggagctgtcttcaggccagaagtgcctctccgcagggacctgcccctgctcctattccggactcagacctctgaccctgcaatgctgcctaccatgattggcctcctggcagaggcaggcgtgcggctgctgtcctaccagacttcactggtgtcagatggggagacctggcacgtcatgggcatctcctccttgctgcccagcctggaagcgtggaagcagcatgtgactgaagccttccagttccacttctaaccttggagctcactggtccctgcctctggggcttttctgaagaaacccacccactgtgatcaatagggagagaaaatccacattcttgggctgaacgcgggcctctgacactgcttacactgcactctgaccctgtagtacagcaataaccgtctaataaagagcctacccccaacaaaaaaaaaaaaaaaaaaaaaaaaaaaaaaaaaagggggcgcgcgcgcgcctctctataagatttctctccctctgggggggcgcgcccacgcttctctgcgcgctctctccccccagccttttttctgtgtgtccaaaggggtggcgctcctctatattgtggggagcgtctcctctttattatctccgcgcgataggcgcctcggcgcccccgtctctttttccaacaccgtctgccgtagcgtgtgggaacacacccgtgtgctccccg

SEQ ID NO: 332836 - DNA, 2262 bp, Homo sapiens
tgatagtcgaattccttcaacgtctagcacagtgccttcaaatttacccactcaaaaaaaaatttcgtaaggaattaataaatgaatccttaggaggaaaagtgaaaatgaagtttttctctcaggatgaggtgtatttctccgttcatttcagatatgcatcagctagtcagcgtaaattgtgctttttatatgctcaccaggtgtaggtaagagctttggctgagatggagaaattcatcgcgggaggataataaagcgggcagggatttggcaacctcagagccgcgaggaggaggcggagtcgcggagagtttgagtatttccgtccaatcaaaaggagactgtaggaggaggaggaggaggagatgactggggagcgggagctcgagaatactgcccagttactctagcgcgccaggccgaaccgcagcttcttggcttaggtacttctactcacagcggccgattccgaggccaactccagcaatggcttttgcaaatctgcggaaagtgctcatcagtgacagcctggacccttgctgccggaagatcttgcaagatggagggctgcaggtggtggaaaagcagaaccttagcaaagaggagctgatagcggagctgcaggactgtgaaggccttattgttcgctctgccaccaaggtgaccgctgatgtcatcaacgcagctgagaaactccaggtggtgggcagggctggcacaggtgtggacaatgtggatctggaggccgcaacaaggaagggcatcttggttatgaacacccccaatgggaacagcctcagtgccgcagaactcacttgtggaatgatcatgtgcctggccaggcagattccccaggcgacggcttcgatgaaggacggcaaatgggagcggaagaagttcatgggaacagagctgaatggaaagaccctgggaattcttggcctgggcaggattgggagagaggtagctacccggatgcagtcctttgggatgaagactatagggtatgaccccatcatttccccagaggtctcggcctcctttggtgttcagcagctgcccctggaggagatctggcctctctgtgatttcatcactgtgcacactcctctcctgccctccacgacaggcttgctgaatgacaacacctttgcccagtgcaagaagggggtgcgtgtggtgaactgtgcccgtggagggatcgtggacgaaggcgccctgctccgggccctgcagtctggccagtgtgccggggctgcactggacgtgtttacggaagagccgccacgggaccgggccttggtggaccatgagaatgtcatcagctgtccccacctgggtgccagcaccaaggaggctcagagccgctgtggggaggaaattgctgttcagttcgtggacatggtgaaggggaaatctctcacgggggttgtgaatgcccaggcccttaccagtgccttctctccacacaccaagccttggattggtctggcagaagctctggggacactgatgcgagcctgggctgggtcccccaaagggaccatccaggtgataacacagggaacatccctgaagaatgctgggaactgcctaagccccgcagtcattgtcggcctcctgaaagaggcttccaagcaggcggatgtgaacttggtgaacgctaagctgctggtgaaagaggctggcctcaatgtcaccacctcccacagccctgctgcaccaggggagcaaggcttcggggaatgcctcctggccgtggccctggcaggcgccccttaccaggctgtgggcttggtccaaggcactacacctgtactgcaggggctcaatggagctgtcttcaggccagaagtgcctctccgcagggacctgcccctgctcctattccggactcagacctctgaccctgcaatgctgcctaccatgattggcctcctggcagaggcaggcgtgcggctgctgtcctaccagacttcactggtgtcagatggggagacctggcacgtcatgggcatctcctccttgctgcccagcctggaagcgtggaagcagcatgtgactgaagccttccagttccacttctaaccttggagctcactggtccctgcctctggggcttttctgaagaaacccacccactgtgatcaatagggagagaaaatccacattcttggaaaaaaggggccttgtacttttcttaaaaaagcatttggcccttttggtcaaccaataccgttttattaagagccttccccc

SEQ ID NO: 332837 - DNA, 2240 bp, Homo sapiens
tgatagtcgaattccttcaacgtctagcacagtgccttcaaatttacccactcaaaaaaaaatttcgtaaggaattaataaatgaatccttaggaggaaaagtgaaaatgaagtttttctctcaggatgaggtgtatttctccgttcatttcagatatgcatcagctagtcagcgtaaattgtgctttttatatgctcaccaggtgtaggtaagagctttggctgagatggagaaattcatcgcgggaggataataaagcgggcagggatttggcaacctcagagccgcgaggaggaggcggagtcgcggagagtttgagtatttccgtccaatcaaaaggagactgtaggaggaggaggaggaggagatgactggggagcgggagctcgagaatactgcccagttactctagcgcgccaggccgaaccgcagcttcttggcttaggtacttctactcacagcggccgattccgaggccaactccagcaatggcttttgcaaatctgcggaaagtgctcatcagtgacagcctggacccttgctgccggaagatcttgcaagatggagggctgcaggtggtggaaaagcagaaccttagcaaagaggagctgatagcggagctgcaggactgtgaaggccttattgttcgctctgccaccaaggtgaccgctgatgtcatcaacgcagctgagaaactccaggtggtgggcagggctggcacaggtgtggacaatgtggatctggaggccgcaacaaggaagggcatcttggttatgaacacccccaatgggaacagcctcagtgccgcagaactcacttgtggaatgatcatgtgcctggccaggcagattccccaggcgacggcttcgatgaaggacggcaaatgggagcggaagaagttcatgggaacagagctgaatggaaagaccctgggaattcttggcctgggcaggattgggagagaggtagctacccggatgcagtcctttgggatgaagactatagggtatgaccccatcatttccccagaggtctcggcctcctttggtgttcagcagctgcccctggaggagatctggcctctctgtgatttcatcactgtgcacactcctctcctgccctccacgacaggcttgctgaatgacaacacctttgcccagtgcaagaagggggtgcgtgtggtgaactgtgcccgtggagggatcgtggacgaaggcgccctgctccgggccctgcagtctggccagtgtgccggggctgcactggacgtgtttacggaagagccgccacgggaccgggccttggtggaccatgagaatgtcatcagctgtccccacctgggtgccagcaccaaggaggctcagagccgctgtggggaggaaattgctgttcagttcgtggacatggtgaaggggaaatctctcacgggggttctctccacacaccaagccttggattggtctggcagaagctctggggacactgatgcgagcctgggctgggtcccccaaagggaccatccaggtgataacacagggaacatccctgaagaatgctgggaactgcctaagccccgcagtcattgtcggcctcctgaaagaggcttccaagcaggcggatgtgaacttggtgaacgctaagctgctggtgaaagaggctggcctcaatgtcaccacctcccacagccctgctgcaccaggggagcaaggcttcggggaatgcctcctggccgtggccctggcaggcgccccttaccaggctgtgggcttggtccaaggcactacacctgtactgcaggggctcaatggagctgtcttcaggccagaagtgcctctccgcagggacctgcccctgctcctattccggactcagacctctgaccctgcaatgctgcctaccatgattggcctcctggcagaggcaggcgtgcggctgctgtcctaccagacttcactggtgtcagatggggagacctggcacgtcatgggcatctcctccttgctgcccagcctggaagcgtggaagcagcatgtgactgaagccttccagttccacttctaaccttggagctcactggtccctgcctctggggcttttctgaagaaacccacccactgtgatcaatagggagagaaaatccacattcttgggctgaacgcgggcctctgacactgcttacactgcactctgaccctgtagtacagcaataaccgtctaataaagagcctacccccaacaa

SEQ ID NO: 332838 - DNA, 2248 bp, Homo sapiens
tgatagtcgaattccttcaacgtctagcacagtgccttcaaatttacccactcaaaaaaaaatttcgtaaggaattaataaatgaatccttaggaggaaaagtgaaaatgaagtttttctctcaggatgaggtgtatttctccgttcatttcagatatgcatcagctagtcagcgtaaattgtgctttttatatgctcaccaggtgtaggtaagagctttggctgagatggagaaattcatcgcgggaggataataaagcgggcagggatttggcaacctcagagccgcgaggaggaggcggagtcgcggagagtttgagtatttccgtccaatcaaaaggagactgtaggaggaggaggaggaggagatgactggggagcgggagctcgagaatactgcccagttactctagcgcgccaggccgaaccgcagcttcttggcttaggtacttctactcacagcggccgattccgaggccaactccagcaatggcttttgcaaatctgcggaaagtgctcatcagtgacagcctggacccttgctgccggaagatcttgcaagatggagggctgcaggtggtggaaaagcagaaccttagcaaagaggagctgatagcggagctgcaggactgtgaaggccttattgttcgctctgccaccaaggtgaccgctgatgtcatcaacgcagctgagaaactccaggtggtgggcagggctggcacaggtgtggacaatgtggatctggaggccgcaacaaggaagggcatcttggttatgaacacccccaatgggaacagcctcagtgccgcagaactcacttgtggaatgatcatgtgcctggccaggcagattccccaggcgacggcttcgatgaaggacggcaaatgggagcggaagaagttcatgggaacagagctgaatggaaagaccctgggaattcttggcctgggcaggattgggagagaggtagctacccggatgcagtcctttgggatgaagactatagggtatgaccccatcatttccccagaggtctcggcctcctttggtgttcagcagctgcccctggaggagatctggcctctctgtgatttcatcactgtgcacactcctctcctgccctccacgacaggcttgctgaatgacaacacctttgcccagtgcaagaagggggtgcgtgtggtgaactgtgcccgtggagggatcgtggacgaaggcgccctgctccgggccctgcagtctggccagtgtgccggggctgcactggacgtgtttacggaagagccgccacgggaccgggccttggtggaccatgagaatgtcatcagctgtccccacctgggtgccagcaccaaggaggctcagagccgctgtggggaggaaattgctgttcagttcgtggacatggtgaaggggaaatctctcacgggggttgtgaatgcccaggcccttaccagtgccttctctccacacaccaagccttggattggtctggcagaagctctggggacactgatgcgagcctgggctgggtcccccaaagggaccatccaggtgataacacagggaacatccctgaagaatgctgggaactgcctaagccccgcagtcattgtcggcctcctgaaagaggcttccaagcaggcggatgtgaacttggtgaacgctaagctgctggtcaccacctcccacagccctgctgcaccaggggagcaaggcttcggggaatgcctcctggccgtggccctggcaggcgccccttaccaggctgtgggcttggtccaaggcactacacctgtactgcaggggctcaatggagctgtcttcaggccagaagtgcctctccgcagggacctgcccctgctcctattccggactcagacctctgaccctgcaatgctgcctaccatgattggcctcctggcagaggcaggcgtgcggctgctgtcctaccagacttcactggtgtcagatggggagacctggcacgtcatgggcatctcctccttgctgcccagcctggaagcgtggaagcagcatgtgactgaagccttccagttccacttctaaccttggagctcactggtccctgcctctggggcttttctgaagaaacccacccactgtgatcaatagggagagaaaatccacattcttgggctgaacgcgggcctctgacactgcttacactgcactctgaccctgtagtacagcaataaccgtctaataaagagcctacccccaacaa

SEQ ID NO: 332839 - DNA, 1898 bp, Homo sapiens
cgccccggaaatacgaacaaaactaacggctaggtacgaggctgggtggttgcgaaccgcagcttcttggcttaggtacttctactcacagcggccgattccgaggccaactccagcaatggcttttgcaaatctgcggaaagtgctcatcagtgacagcctggacccttgctgccggaagatcttgcaagatggagggctgcaggtggtggaaaagcagaaccttagcaaagaggagctgatagcggagctgcaggactgtgaaggccttattgttcgctctgccaccaaggtgaccgctgatgtcatcaacgcagctgagaaactccaggtggtgggcagggctggcacaggtgtggacaatgtggatctggaggccgcaacaaggaagggcatcttggttatgaacacccccaatgggaacagcctcagtgccgcagaactcacttgtggaatgatcatgtgcctggccaggcagattccccaggcgacggcttcgatgaaggacggcaaatgggagcggaagaagttcatgggaacagagctgaatggaaagaccctgggaattcttggcctgggcaggattgggagagaggtagctacccggatgcagtcctttgggatgaagactatagggtatgaccccatcatttccccagaggtctcggcctcctttggtgttcagcagctgcccctggaggagatctggcctctctgtgatttcatcactgtgcacactcctctcctgccctccacgacaggcttgctgaatgacaacacctttgcccagtgcaagaagggggtgcgtgtggtgaactgtgcccgtggagggatcgtggacgaaggcgccctgctccgggccctgcagtctggccagtgtgccggggctgcactggacgtgtttacggaagagccgccacgggaccgggccttggtggaccatgagaatgtcatcagctgtccccacctgggtgccagcaccaaggaggctcagagccgctgtggggaggaaattgctgttcagttcgtggacatggtgaaggggaaatctctcacgggggttgtgaatgcccaggcccttaccagtgccttctctccacacaccaagccttggattggtctggcagaagctctggggacactgatgcgagcctgggctgggtcccccaaagggaccatccaggtgataacacagggaacatccctgaagaatgctgggaactgcctaagccccgcagtcattgtcggcctcctgaaagaggcttccaagcaggcggatgtgaacttggtgaacgctaagctgctggtgaaagaggctggcctcaatgtcaccacctcccacagccctgctgcaccaggggagcaaggcttcggggaatgcctcctggccgtggccctggcaggcgccccttaccaggctgtgggcttggtccaaggcactacacctgtactgcaggggctcaatggagctgtcttcaggccagaagtgcctctccgcagggacctgcccctgctcctattccggactcagacctctgaccctgcaatgctgcctaccatgattggcctcctggcagaggcaggcgtgcggctgctgtcctaccagacttcactggtgtcagatggggagacctggcacgtcatgggcatctcctccttgctgcccagcctggaagcgtggaagcagcatgtgactgaagccttccagttccacttctaaccttggagctcactggtccctgcctctggggcttttctgaagaaacccacccactgtgatcaatagggagagaaaatccacattcttgggctgaacgcgggcctctgacactgcttacactgcactctgaccctgtagtacagcaataaccgtctaataaagagcctacccccaacaa

SEQ ID NO: 332840 - DNA, 2239 bp, Homo sapiens
tgatagtcgaattccttcaacgtctagcacagtgccttcaaatttacccactcaaaaaaaaatttcgtaaggaattaataaatgaatccttaggaggaaaagtgaaaatgaagtttttctctcaggatgaggtgtatttctccgttcatttcagatatgcatcagctagtcagcgtaaattgtgctttttatatgctcaccaggtgtaggtaagagctttggctgagatggagaaattcatcgcgggaggataataaagcgggcagggatttggcaacctcagagccgcgaggaggaggcggagtcgcggagagtttgagtatttccgtccaatcaaaaggagactgtaggaggaggaggaggaggagatgactggggagcgggagctcgagaatactgcccagttactctagcgcgccaggccgaaccgcagcttcttggcttaggtacttctactcacagcggccgattccgaggccaactccagcaatggcttttgcaaatctgcggaaagtgctcatcagtgacagcctggacccttgctgccggaagatcttgcaagatggagggctgcaggtggtggaaaagcagaaccttagcaaagaggagctgatagcggagctgcaggactgtgaaggccttattgttcgctctgccaccaaggtgaccgctgatgtcatcaacgcagctgagaaactccaggtggtgggcagggctggcacaggtgtggacaatgtggatctggaggccgcaacaaggaagggcatcttggttatgaacacccccaatgggaacagcctcagtgccgcagaactcacttgtggaatgatcatgtgcctggccaggcagattccccaggcgacggcttcgatgaaggacggcaaatgggagcggaagaagttcatgggaacagagctgaatggaaagaccctgggaattcttggcctgggcaggattgggagagaggtagctacccggatgcagtcctttgggatgaagactatagggtatgaccccatcatttccccagaggtctcggcctcctttggtgttcagcagctgcccctggaggagatctggcctctctgtgatttcatcactgtgcacactcctctcctgccctccacgacaggcttgctgaatgacaacacctttgcccagtgcaagaagggggtgcgtgtggtgaactgtgcccgtggagggatcgtggacgaaggcgccctgctccgggccctgcagtctggccagtgtgccggggctgcactggacgtgtttacggaagagccgccacgggaccgggccttggtggaccatgagaatgtcatcagctgtccccacctgggtgccagcaccaaggaggctcagagccgctgtggggaggaaattgctgttcagttcgtggacatggtgaaggggaaatctctcacgggggttgtgaatgcccaggcccttaccagtgccttctctccacacaccaagccttggattggtctggcagaagctctggggacactgatgcgagcctgggctgggtcccccaaagggaccatccaggtgataacacagggaacatccctgaagaatgctgggaactgcctaagccccgcagtcattgtcggcctcctgaaagaggcttccaagcaggcggatgtgaacttggtgaacgctaagctgctggtgaaagaggctggcctcaatgtcaccacctcccacagccctgctgcaccaggggagcaaggcttcggggaatgcctcctggccgtggccctggcaggcgccccttaccaggctgtgggcttggtccaaggcactacacctgtactgcaggggctcaatggagctgtcttcaggccagagccgctgtggggaggaaattgctgttcagttcgtggacatggtgaaggggaaatctctcacgggggttgtgaatgcccaggcccttaccagtgccttctctccacacaccaagccttggattggtctggcagaagctctggggacactgatgcgagcctgggctggtcccccaaaggaccatccaggtgataacacagggaacatccctgaagaatgctggtccctgcctctggggcttttctgaagaaacccacccactgtgatcaatagggagagaaaatccacattcttgggctgaacgcgggcctctgacactgcttacactgcactctgaccctgtagtacagcaataaccgtctaataaagagcctacccccaacaa

SEQ ID NO: 332841 - DNA, 1329 bp, Homo sapiens
  misc_feature (1285)..(1285): n is a, c, g, or t
tgatagtcgaattccttcaacgtctagcacagtgccttcaaatttacccactcaaaaaaaaatttcgtaaggaattaataaatgaatccttaggaggaaaagtgaaaatgaagtttttctctcaggatgaggtgtatttctccgttcatttcagatatgcatcagctagtcagcgtaaattgtgctttttatatgctcaccaggtgtaggtaagagctttggctgagatggagaaattcatcgcgggaggataataaagcgggcagggatttggcaacctcagagccgcgaggaggaggcggagtcgcggagagtttgagtatttccgtccaatcaaaaggagactgtaggaggaggaggaggaggagatgactggggagcgggagctcgagaatactgcccagttactctagcgcgccaggccgaaccgcagcttcttggcttaggtacttctactcacagcggccgattccgaggccaactccagcaatggcttttgcaaatctgcggaaagtgctcatcagtgacagcctggacccttgctgccggaagatcttgcaagatggagggctgcaggtggtggaaaagcagaaccttagcaaagaggagctgatagcggagctgcaggactgtgaaggccttattgttcgctctgccaccaaggtgaccgctgatgtcatcaacgcagctgagaaactccaggtggtgggcagggctggcacaggtgtggacaatgtggatctggaggccgcaacaaggaagggcatcttggttatgaacacccccaatgggaacagcctcagtgccgcagaactcacttgtggaatgatcatgtgcctggccaggcagattccccaggcgacggcttcgatgaaggacggcaaatgggagcggaagaagttcatgggaacagagctgaatggaaagaccctgggaattcttggcctgggcaggattgggagagaggtagctacccggatgcagtcctttgggatgaagactatagggtatgaccccatcatttccccagaggtctcggcctcctttggtgttcagcagctgcccctggaggagatctggcctctctgtgatttcatcactgtgcacactcctctcctgccctccacgacaggcttgctgaatgacaacacctttgcccagtgcaagaagggggtgcgtgtggtgaactgtgcccgtggagggatcgtggacgaaggcgccctgctccgggccctgcagtctggccagtgtgccggggctgcactggacgtgtttacggaaagcngcagggacgggcctggtggcccggattggttgttgccctggtga

SEQ ID NO: 332842 - DNA, 1807 bp, Homo sapiens
cgccccggaaatacgaacaaaactaacggctaggtacgaggctgggtggttgtgctcatcagtgacagcctggacccttgctgccggaagatcttgcaagatggagggctgcaggtggtggaaaagcagaaccttagcaaagaggagctgatagcggagctgcaggactgtgaaggccttattgttcgctctgccaccaaggtgaccgctgatgtcatcaacgcagctgagaaactccaggtggtgggcagggctggcacaggtgtggacaatgtggatctggaggccgcaacaaggaagggcatcttggttatgaacacccccaatgggaacagcctcagtgccgcagaactcacttgtggaatgatcatgtgcctggccaggcagattccccaggcgacggcttcgatgaaggacggcaaatgggagcggaagaagttcatgggaacagagctgaatggaaagaccctgggaattcttggcctgggcaggattgggagagaggtagctacccggatgcagtcctttgggatgaagactatagggtatgaccccatcatttccccagaggtctcggcctcctttggtgttcagcagctgcccctggaggagatctggcctctctgtgatttcatcactgtgcacactcctctcctgccctccacgacaggcttgctgaatgacaacacctttgcccagtgcaagaagggggtgcgtgtggtgaactgtgcccgtggagggatcgtggacgaaggcgccctgctccgggccctgcagtctggccagtgtgccggggctgcactggacgtgtttacggaagagccgccacgggaccgggccttggtggaccatgagaatgtcatcagctgtccccacctgggtgccagcaccaaggaggctcagagccgctgtggggaggaaattgctgttcagttcgtggacatggtgaaggggaaatctctcacgggggttgtgaatgcccaggcccttaccagtgccttctctccacacaccaagccttggattggtctggcagaagctctggggacactgatgcgagcctgggctgggtcccccaaagggaccatccaggtgataacacagggaacatccctgaagaatgctgggaactgcctaagccccgcagtcattgtcggcctcctgaaagaggcttccaagcaggcggatgtgaacttggtgaacgctaagctgctggtgaaagaggctggcctcaatgtcaccacctcccacagccctgctgcaccaggggagcaaggcttcggggaatgcctcctggccgtggccctggcaggcgccccttaccaggctgtgggcttggtccaaggcactacacctgtactgcaggggctcaatggagctgtcttcaggccagaagtgcctctccgcagggacctgcccctgctcctattccggactcagacctctgaccctgcaatgctgcctaccatgattggcctcctggcagaggcaggcgtgcggctgctgtcctaccagacttcactggtgtcagatggggagacctggcacgtcatgggcatctcctccttgctgcccagcctggaagcgtggaagcagcatgtgactgaagccttccagttccacttctaaccttggagctcactggtccctgcctctggggcttttctgaagaaacccacccactgtgatcaatagggagagaaaatccacattcttgggctgaacgcgggcctctgacactgcttacactgcactctgaccctgtagtacagcaataaccgtctaataaagagcctacccccaacaa

SEQ ID NO: 332843 - DNA, 1969 bp, Homo sapiens
cttctacaaaactcagagggactcttcaggagccacatgctctcatcaagcagaaactttttaagaggtagacaacaacccagagtggacacagagctggtgctcttccagtagagtagagacggggtttcaccatgttggccaagctgatctcgaactcctgacctcaagtgatccaccctcctcggcctcccaaagtgctggaatcacaggcgtgagccaccgtgcccaaccagtgaggccacgtttcgaaaagaagaaagaaacgacaaactaaaatacatgactgtgtagatgaggaaggacatgaaatgaaacaggaaaaaggactgtgaaggccttattgttcgctctgccaccaaggtgaccgctgatgtcatcaacgcagctgagaaactccaggtggtgggcagggctggcacaggtgtggacaatgtggatctggaggccgcaacaaggaagggcatcttggttatgaacacccccaatgggaacagcctcagtgccgcagaactcacttgtggaatgatcatgtgcctggccaggcagattccccaggcgacggcttcgatgaaggacggcaaatgggagcggaagaagttcatgggaacagagctgaatggaaagaccctgggaattcttggcctgggcaggattgggagagaggtagctacccggatgcagtcctttgggatgaagactatagggtatgaccccatcatttccccagaggtctcggcctcctttggtgttcagcagctgcccctggaggagatctggcctctctgtgatttcatcactgtgcacactcctctcctgccctccacgacaggcttgctgaatgacaacacctttgcccagtgcaagaagggggtgcgtgtggtgaactgtgcccgtggagggatcgtggacgaaggcgccctgctccgggccctgcagtctggccagtgtgccggggctgcactggacgtgtttacggaagagccgccacgggaccgggccttggtggaccatgagaatgtcatcagctgtccccacctgggtgccagcaccaaggaggctcagagccgctgtggggaggaaattgctgttcagttcgtggacatggtgaaggggaaatctctcacgggggttgtgaatgcccaggcccttaccagtgccttctctccacacaccaagccttggattggtctggcagaagctctggggacactgatgcgagcctgggctgggtcccccaaagggaccatccaggtgataacacagggaacatccctgaagaatgctgggaactgcctaagccccgcagtcattgtcggcctcctgaaagaggcttccaagcaggcggatgtgaacttggtgaacgctaagctgctggtgaaagaggctggcctcaatgtcaccacctcccacagccctgctgcaccaggggagcaaggcttcggggaatgcctcctggccgtggccctggcaggcgccccttaccaggctgtgggcttggtccaaggcactacacctgtactgcaggggctcaatggagctgtcttcaggccagaagtgcctctccgcagggacctgcccctgctcctattccggactcagacctctgaccctgcaatgctgcctaccatgattggcctcctggcagaggcaggcgtgcggctgctgtcctaccagacttcactggtgtcagatggggagacctggcacgtcatgggcatctcctccttgctgcccagcctggaagcgtggaagcagcatgtgactgaagccttccagttccacttctaaccttggagctcactggtccctgcctctggggcttttctgaagaaacccacccactgtgatcaatagggagagaaaatccacattcttgggctgaacgcgggcctctgacactgcttacactgcactctgaccctgtagtacagcaataaccgtctaataaagagcctacccccaacaa

SEQ ID NO: 332844 - DNA, 1574 bp, Homo sapiens
ctgactgactctgttgtcaaaagcgcgttttatcgacgtgagcaacgatgacggtcgaaacagtagcgaggcttgagatgtggaatatctggcggatgtgccgataatgagatcatctgccgtttcgactaaaccagtgtgtcgcttgtcattaatgattcggcaggttaacctgcattaatgactcggcatggcacggaagaagttcatgggaacagagctgaatggaaagaccctgggaattcttggcctgggcaggattgggagagaggtagctacccggatgcagtcctttgggatgaagactatagggtatgaccccatcatttccccagaggtctcggcctcctttggtgttcagcagctgcccctggaggagatctggcctctctgtgatttcatcactgtgcacactcctctcctgccctccacgacaggcttgctgaatgacaacacctttgcccagtgcaagaagggggtgcgtgtggtgaactgtgcccgtggagggatcgtggacgaaggcgccctgctccgggccctgcagtctggccagtgtgccggggctgcactggacgtgtttacggaagagccgccacgggaccgggccttggtggaccatgagaatgtcatcagctgtccccacctgggtgccagcaccaaggaggctcagagccgctgtggggaggaaattgctgttcagttcgtggacatggtgaaggggaaatctctcacgggggttgtgaatgcccaggcccttaccagtgccttctctccacacaccaagccttggattggtctggcagaagctctggggacactgatgcgagcctgggctgggtcccccaaagggaccatccaggtgataacacagggaacatccctgaagaatgctgggaactgcctaagccccgcagtcattgtcggcctcctgaaagaggcttccaagcaggcggatgtgaacttggtgaacgctaagctgctggtgaaagaggctggcctcaatgtcaccacctcccacagccctgctgcaccaggggagcaaggcttcggggaatgcctcctggccgtggccctggcaggcgccccttaccaggctgtgggcttggtccaaggcactacacctgtactgcaggggctcaatggagctgtcttcaggccagaagtgcctctccgcagggacctgcccctgctcctattccggactcagacctctgaccctgcaatgctgcctaccatgattggcctcctggcagaggcaggcgtgcggctgctgtcctaccagacttcactggtgtcagatggggagacctggcacgtcatgggcatctcctccttgctgcccagcctggaagcgtggaagcagcatgtgactgaagccttccagttccacttctaaccttggagctcactggtccctgcctctggggcttttctgaagaaacccacccactgtgatcaatagggagagaaaatccacattcttgggctgaacgcgggcctctgacactgcttacactgcactctgaccctgtagtacagcaataaccgtctaataaagagcctacccccaacaa

SEQ ID NO: 332845 - DNA, 1720 bp, Homo sapiens
tgatagtcgaattccttcaacgtctagcacagtgccttcaaatttacccactcaaaaaaaaatttcgtaaggaattaataaatgaatccttaggaggaaaagtgaaaatgaagtttttctctcaggatgaggtgtatttctccgttcatttcagatatgcatcagctagtcagcgtaaattgtgctttttatatgctcaccaggtgtaggtaagagctttggctgagatggagaaattcatcgcgggaggataataaagcgggcagggatttggcaacctcagagccgcgaggaggaggcggagtcgcggagagtttgagtatttccgtccaatcaaaaggagactgtaggaggaggaggaggaggagatgactggggagcgggagctcgagaatactgcccagttactctagcgcgccaggccgaaccgcagcttcttggcttaggtacttctactcacagcggccgattccgaggccaactccagcaatggcttttgcaaatctgcggaaagtgctcatcagtgacagcctggacccttgctgccggaagatcttgcaagatggagggctgcaggtggtggaaaagcagaaccttagcaaagaggagctgatagcggagctgcaggactgtgaaggccttattgttcgctctgccaccaaggtgaccgctgatgtcatcaacgcagctgagaaactccaggtggtgggcagggctggcacaggtgtggacaatgtggatctggaggccgcaacaaggaagggcatcttggttatgaacacccccaatgggaacagcctcagtgccgcagaactcacttgtggaatgatcatgtgcctggccaggcagattccccaggcgacggcttcgatgaaggacggcaaatgggagcggaagaagttcatgggaacagagctgaatggaaagaccctgggaattcttggcctgggcaggattgggagagaggtagctacccggatgcagtcctttgggatgaagactatagggtatgaccccatcatttccccagaggtctcggcctcctttggtgttcagcagctgcccctggaggagatctggcctctctgtgatttcatcactgtgaacttggtgaacgctaagctgctggtgaaagaggctggcctcaatgtcaccacctcccacagccctgctgcaccaggggagcaaggcttcggggaatgcctcctggccgtggccctggcaggcgccccttaccaggctgtgggcttggtccaaggcactacacctgtactgcaggggctcaatggagctgtcttcaggccagaagtgcctctccgcagggacctgcccctgctcctattccggactcagacctctgaccctgcaatgctgcctaccatgattggcctcctggcagaggcaggcgtgcggctgctgtcctaccagacttcactggtgtcagatggggagacctggcacgtcatgggcatctcctccttgctgcccagcctggaagcgtggaagcagcatgtgactgaagccttccagttccacttctaaccttggagctcactggtccctgcctctggggcttttctgaagaaacccacccactgtgatcaatagggagagaaaatccacattcttgggctgaacgcgggcctctgacactgcttacactgcactctgaccctgtagtacagcaataaccgtctaataaagagcctacccccaacaa

SEQ ID NO: 332846 - DNA, 2350 bp, Homo sapiens
tttcttcgacgtattgcccgctacataggcgaccatggtgggacccacatgtggtggtgttctcaatgggcttatgtcaatgtcgtcgtcttgtgggtaatgtgccattctcatatttgaacctagtgctcatgcggttagccaatcgtgttgtctcactgggccctggtgctcttaccactatggtgaacggatcacagaatgtctcgccatactgatccccgtttcgtcccaatggggctcgtttgctctcccaattcgtagtggaccaccgccaaggtggataaggttctgtgcgtataaggacccaagcgaacctctagtcaaacctccggatgtgctattctcttccaaacaatggtacggactcctactttctactcgggtttatggtcaacactatcgtcctccaagggattccaggtatgcgcttcactcggagtgtcgcccgggaatactaactggcaaatgacacactcggtgtgctcaacgggcttcccctgtgacccgggacggatgggtgcaatcagcttttcgtctgggtgcgccgcctgggaaaatgactcaaggctcttcccactttggatcgctccccctatgccaggtgaccatggcgtttgtacgtgcgtctctcttttgggtccccttatttctctcctacctaatctctctctcggcgttttaccgggtggccttcctcatgacctcatgtgggccccatcctggacgccatccggaattgtgcttacttttgcgcccggtatacgcccttgtgcgctattcgcccccactgacttctgctccacattgtgtgaccttggttgcgtgacgttcgtggcgctgaccagttcgagggcacaaggcacgtcttctttgcatcccaagtcatgtcattctaagcggtgtccaatctcaaaaaggttccactaagtcccgccgatggtcctttcggacagctcgtcctatttcagcgaagtggctccgaccatagctgaaccggtcgtggcgcttctatgggacaggcttccctccagccacgtttcatgtccaggcgaatttggttcttcccagtgtctattgcacctctaggattgagtccccgtctttgtgggtgacactcaagctccacggactctgccatcatgtggtcctctcacgacgtcattgtgctccacgactccactcacaagggccattggtgctgtggacgatggcaacggtcacttgctaatgccacccatgggcaagttctctaacccccagtgagagatttcgaccttcaccatgtccacgaactgaacagcaatttcctccctgcagtctggccagtgtgccggggctgcactggacgtgtttacggaagagccgccacgggaccgggccttggtggaccatgagaatgtcatcagctgtccccacctgggtgccagcaccaaggaggctcagagccgctgtggggaggaaattgctgttcagttcgtggacatggtgaaggggaaatctctcacgggggttgtgaatgcccaggcccttaccagtgccttctctccacacaccaagccttggattggtctggcagaagctctggggacactgatgcgagcctgggctgggtcccccaaagggaccatccaggtgataacacagggaacatccctgaagaatgctgggaactgcctaagccccgcagtcattgtcggcctcctgaaagaggcttccaagcaggcggatgtgaacttggtgaacgctaagctgctggtgaaagaggctggcctcaatgtcaccacctcccacagccctgctgcaccaggggagcaaggcttcggggaatgcctcctggccgtggccctggcaggcgccccttaccaggctgtgggcttggtccaaggcactacacctgtactgcaggggctcaatggagctgtcttcaggccagaagtgcctctccgcagggacctgcccctgctcctattccggactcagacctctgaccctgcaatgctgcctaccatgattggcctcctggcagaggcaggcgtgcggctgctgtcctaccagacttcactggtgtcagatggggagacctggcacgtcatgggcatctcctccttgctgcccagcctggaagcgtggaagcagcatgtgactgaagccttccagttccacttctaaccttggagctcactggtccctgcctctggggcttttctgaagaaacccacccactgtgatcaatagggagagaaaatccacattcttgggctgaacgcgggcctctgacactgcttacactgcactctgaccctgtagtacagcaataaccgtctaataaagagcctacccccaacaa

SEQ ID NO: 332847 - DNA, 1509 bp, Homo sapiens
tgatagtcgaattccttcaacgtctagcacagtgccttcaaatttacccactcaaaaaaaaatttcgtaaggaattaataaatgaatccttaggaggaaaagtgaaaatgaagtttttctctcaggatgaggtgtatttctccgttcatttcagatatgcatcagctagtcagcgtaaattgtgctttttatatgctcaccaggtgtaggtaagagctttggctgagatggagaaattcatcgcgggaggataataaagcgggcagggatttggcaacctcagagccgcgaggaggaggcggagtcgcggagagtttgagtatttccgtccaatcaaaaggagactgtaggaggaggaggaggaggagatgactggggagcgggagctcgagaatactgcccagttactctagcgcgccaggccgaaccgcagcttcttggcttaggtacttctactcacagcggccgattccgaggccaactccagcaatggcttttgcaaatctgcggaaagtgctcatcagtgacagcctggacccttgctgccggaagatcttgcaagatggagggctgcaggtggtggaaaagcagaaccttagcaaagaggagctgatagcggagctgcaggactgtgaaggccttattgttcgctctgccaccaaggtgaccgctgatgtcatcaacgcagctgagaaactccaggtggtgggcagggctggcacaggtgtggacaatgtggatctggaggccgcaacaaggaagggcatcttggttatgaacacccccaatgggaacagcctcagtgccgcagaactcacttgtggaatgatcatgtgcctggccaggcagattccccaggcgacggcttcgatgaaggacggcaaatgggagcggaagaagttcatgggaacagagctgaatggaaagaccctgggaattcttggcctgggcaggattgggagagaggtagctacccggatgcagtcctttgggatgaagactatagggtatgaccccatcatttccccagaggtctcggcctcctttggtgttcagcagctgcccctggaggagatctggcctctctgtgatttcatcactgtgcacactcctctcctgccctccacgacaggcttgctgatggcaaaaacctttggcccaggggcagaacgggaacgcgcgtatgtgacaccgtgcccgaggagggacaatgggagaaaggcagccggtcccggggccggtagacggcacaagtagcacgagagctcaacggcaacaggttttcgagcaaaaccccagacgaccaggtgccgtgtggtgaccaccgaatggagtcacgcgtccacaccctggcggtgctgccaacacgggagctaaacgacggctaggcgaagagacgacaatcgacagcgagagtagacgaccagacagcaggacaacacaagaagagaaaaaacaaaacaatcagtgtactagagtaagttagaccagtcagaagagacacgacaa

SEQ ID NO: 332848 - DNA, 850 bp, Homo sapiens
cctccctgcttttctttcctccctgttttcctccaagccttcgcctgtgcctggcagatctctttgccctccctttaaggagatcattggctgttccaggaagctgatgccgaagggcacacagcttggcccatttgccctctcccttctggtcctgaattactgagcacattatccaggctggagccctacatcctaccaatgggtgatttggccaagagaggagggtggacgtggtgcagccaggaggtgtaacagtcaccttgccttctccacacagtcaccacctcccacagccctgctgcaccaggggagcaaggcttcggggaatgcctcctggccgtggccctggcaggcgccccttaccaggctgtgggcttggtccaaggcactacacctgtactgcaggggctcaatggagctgtcttcaggccagaagtgcctctccgcagggacctgcccctgctcctattccggactcagacctctgaccctgcaatgctgcctaccatgattggcctcctggcagaggcaggcgtgcggctgctgtcctaccagacttcactggtgtcagatggggagacctggcacgtcatgggcatctcctccttgctgcccagcctggaagcgtggaagcagcatgtgactgaagccttccagttccacttctaaccttggagctcactggtccctgcctctggggcttttctgaagaaacccacccactgtgatcaatagggagagaaaatccacattcttgggctgaacgcgggcctctgacactgcttacactgcactctgaccctgtagtacagcaataaccgtctaataaagagcctacccccaacaa

SEQ ID NO: 332849 - DNA, 406 bp, Homo sapiens
  misc_feature (40)..(40): n is a, c, g, or t
  misc_feature (69)..(69): n is a, c, g, or t
  misc_feature (73)..(73): n is a, c, g, or t
cgcgcgctgctgcgctattgcgcgtagctcagacgctctnagcgcgctgcaatgctggcgctacgcatnattngcctcctggcagaggcaggcgtgcggctgctgtcctaccagacttcactggtgtcagatggggagacctggcacgtcatgggcatctcctccttgctgcccagcctggaagcgtggaagcagcatgtgactgaagccttccagttccacttctaaccttggagctcactggtccctgcctctggggcttttctgaagaaacccacccactgtgatcaatagggagagaaaatccacattcttgggctgaacgcgggcctctgacactgcttacactgcactctgaccctgtagtacagcaataaccgtctaataaagagcctacccccaacaa

SEQ ID NO: 332850 - DNA, 512 bp, Homo sapiens
gaatatccatggaagctgagcagatgccctgttgctctcccatctcagctctttgattctgagaccatcatccgctcattgcacctttgatcacaaaagctttgaacttctgattctgctcccaatccctcgctcctttttcccctatcccctgtgccaaccaggagtttcttctatttccaggcctcctggcagaggcaggcgtgcggctgctgtcctaccagacttcactggtgtcagatggggagacctggcacgtcatgggcatctcctccttgctgcccagcctggaagcgtggaagcagcatgtgactgaagccttccagttccacttctaaccttggagctcactggtccctgcctctggggcttttctgaagaaacccacccactgtgatcaatagggagagaaaatccacattcttgggctgaacgcgggcctctgacactgcttacactgcactctgaccctgtagtacagcaataaccgtctaataaagagcctaccccca

SEQ ID NO: 332851 - DNA, 779 bp, Homo sapiens
  misc_feature (779)..(779): n is a, c, g, or t
tgatagtcgaattccttcaacgtctagcacagtgccttcaaatttacccactcaaaaaaaaatttcgtaaggaattaataaatgaatccttaggaggaaaagtgaaaatgaagtttttctctcaggatgaggtgtatttctccgttcatttcagatatgcatcagctagtcagcgtaaattgtgctttttatatgctcaccaggtgtaggtaagagctttggctgagatggagaaattcatcgcgggaggataataaagcgggcagggatttggcaacctcagagccgcgaggaggaggcggagtcgcggagagtttgagtatttccgtccaatcaaaaggagactgtaggaggaggaggaggaggagatgactggggagcgggagctcgagaatactgcccagttactctagcgcgccaggccgaaccgcagcttcttggcttaggtacttctactcacagcggccgattccgaggccaactccagcaatggcttttgcaaatctgcggaaagtgctcatcagtgacagcctggacccttgctgccggaagatcttgcaagatggagggctgcaggtggtggaaaagcagaaccttagcaaagaggagctgatagcggagctgcagggtaaggcgagagagagaaaattgaggtctctagggcaacctccatggaaaaaaggctgtcgcccaggccagcgcgcccccctcgcatgcaccccgtatcaattagttccggggcctcctaattggtctttctgcttcccctgtgccgaaan

SEQ ID NO: 332852 - DNA, 736 bp, Homo sapiens
cagtgacctcatggtagcttctctctgtccccaggaacatccctgaagaatgctgggaactgcctaagccccgcagtcattgtcggcctcctgaaagaggcttccaagcaggcggatgtgaacttggtgaacgctaagctgctggtgaaagaggctggcctcaatgtcaccacctcccacagccctgctgcaccaggggagcaaggcttcggggaatgcctcctggccgtggccctggcaggcgccccttaccaggctgtgggcttggtccaaggcactacacctgtactgcaggggctcaatggagctgtcttcaggccagaagtgcctctccgcagggacctgcccctgctcctattccggactcagacctctgaccctgcaatgctgcctaccatgattggcctcctggcagaggcaggcgtgcggctgctgtcctaccagacttcactggtgtcagatggggagacctggcacgtcatgggcatctcctccttgctgcccagcctggaagcgtggaagcagcatgtgactgaagccttccagttccacttctaaccttggagctcactggtccctgcctctggggcttttctgaagaaacccacccactgtgatcaatagggagagaaaatccacattcttgggctgaacgcgggcctctgacactgcttacactgcactctgaccctgtagtacagcaataaccgtctaataaagagcctacccccaacaa

SEQ ID NO: 332853 - DNA, 1949 bp, Homo sapiens
ggacgcgtgggtcgaccacgcgtcgtgtaggaggaggaggaggaggagatgactggggagcgggagctcgagaatactgcccagttactctagcgcgccaggccgaaccgcagcttcttggcttaggtacttctactcacagcggccgattccgaggccaactccagcaatggcttttgcaaatctgcggaaagtgctcatcagtgacagcctggacccttgctgccggaagatcttgcaagatggagggctgcaggtggtggaaaagcagaaccttagcaaagaggagctgatagcggagctgcaggactgtgaaggccttattgttcgctctgccaccaaggtgaccgctgatgtcatcaacgcagctgagaaactccaggtggtgggcagggctggcacaggtgtggacaatgtggatctggaggccgcaacaaggaagggcatcttggttatgaacacccccaatgggaacagcctcagtgccgcagaactcacttgtggaatgatcatgtgcctggccaggcagattccccaggcgacggcttcgatgaaggacggcaaatgggagcggaagaagttcatgggaacagagctgaatggaaagaccctgggaattcttggcctgggcaggattgggagagaggtagctacccggatgcagtcctttgggatgaagactatagggtatgaccccatcatttccccagaggtctcggcctcctttggtgttcagcagctgcccctggaggagatctggcctctctgtgatttcatcactgtgcacactcctctcctgccctccacgacaggcttgctgaatgacaacacctttgcccagtgcaagaagggggtgcgtgtggtgaactgtgcccgtggagggatcgtggacgaaggcgccctgctccgggccctgcagtctggccagtgtgccggggctgcactggacgtgtttacggaagagccgccacgggaccgggccttggtggaccatgagaatgtcatcagctgtccccacctgggtgccagcaccaaggaggctcagagccgctgtggggaggaaattgctgttcagttcgtggacatggtgaaggggaaatctctcacgggggttgtgaatgcccaggcccttaccagtgccttctctccacacaccaagccttggattggtctggcagaagctctggggacactgatgcgagcctgggctgggtcccccaaagggaccatccaggtgataacacagggaacatccctgaagaatgctgggaactgcctaagccccgcagtcattgtcggcctcctgaaagaggcttccaagcaggcggatgtgaacttggtgaacgctaagctgctggtgaaagaggctggcctcaatgtcaccacctcccacagccctgctgcaccaggggagcaaggcttcggggaatgcctcctggccgtggccctggcaggcgccccttaccaggctgtgggcttggtccaaggcactacacctgtactgcaggggctcaatggagctgtcttcaggccagaagtgcctctccgcagggacctgcccctgctcctattccggactcagacctctgaccctgcaatgctgcctaccatgattggcctcctggcagaggcaggcgtgcggctgctgtcctaccagacttcactggtgtcagatggggagacctggcacgtcatgggcatctcctccttgctgcccagcctggaagcgtggaagcagcatgtgactgaagccttccagttccacttctaaccttggagctcactggtccctgcctctggggcttttctgaagaaacccacccactgtgatcaatagggagagaaaatccacattcttgggctgaacgcgggcctctgacactgcttacactgcactctgaccctgtagtacagcaataaccgtctaataaagagcctacccccaacaa

SEQ ID NO: 332854 - DNA, 2694 bp, Homo sapiens
tgatagtcgaattccttcaacgtctagcacagtgccttcaaatttacccactcaaaaaaaaatttcgtaaggaattaataaatgaatccttaggaggaaaagtgaaaatgaagtttttctctcaggatgaggtgtatttctccgttcatttcagatatgcatcagctagtcagcgtaaattgtgctttttatatgctcaccaggtgtaggtaagagctttggctgagatggagaaattcatcgcgggaggataataaagcgggcagggatttggcaacctcagagccgcgaggaggaggcggagtcgcggagagtttgagtatttccgtccaatcaaaaggagactgtaggaggaggaggaggaggagatgactggggagcgggagctcgagaatactgcccagttactctagcgcgccaggccgaaccgcagcttcttggcttaggtacttctactcacagcggccgattccgaggccaactccagcaatggcttttgcaaatctgcggaaagtgctcatcagtgacagcctggacccttgctgccggaagatcttgcaagatggagggctgcaggtggtggaaaagcagaaccttagcaaagaggagctgatagcggagctgcaggactgtgaaggccttattgttcgctctgccaccaaggtgaccgctgatgtcatcaacgcagctgagaaactccaggtggtgggcagggctggcacaggtgtggacaatgtggatctggaggccgcaacaaggaagggcatcttggttatgaacacccccaatgggaacagcctcagtgccgcagaactcacttgtggaatgatcatgtgcctggccaggcagattccccaggcgacggcttcgatgaaggacggcaaatgggagcggaagaagttcatgggaacagagctgaatggaaagaccctgggaattcttggcctgggcaggattgggagagaggtagctacccggatgcagtcctttgggatgaagactatagggtatgaccccatcatttccccagaggtctcggcctcctttggtgttcagcagctgcccctggaggagatctggcctctctgtgatttcatcactgtgcacactcctctcctgccctccacgacaggcttgctgaatgacaacacctttgcccagtgcaagaagggggtgcgtgtggtgaactgtgcccgtggagggatcgtggacgaaggcgccctgctccgggccctgcagtctggccagtgtgccggggctgcactggacgtgtttacggaagagccgccacgggaccgggccttggtggaccatgagaatgtcatcagctgtccccacctgggtgccagcaccaaggaggctcagagccgctgtggggaggaaattgctgttcagttcgtggacatggtgaaggggaaatctctcacgggggttgtgaatgcccaggcccttaccagtgccttctctccacacaccaagccttggattggtctggcagaagctctggggacactgatgcgagcctgggctgggtcccccaaagggaccatccaggtgataacacagggaacatccctgaagaatgctgggaactgcctaagccccgcagtcattgtcggcctcctgaaagaggcttccaagcaggcggatgtgaacttggtgaacgctaagctgctggtgaaagaggctggcctcaatgtcaccacctcccacagccctgctgcaccaggggagcaaggcttcggggaatgcctcctggccgtggccctggcaggcgccccttaccaggctgtgggcttggtccaaggcactacacctgtactgcaggggctcaatggagctgtcttcaggccagaagtgcctctccgcagggacctgcccctgctcctattccggactcagacctctgaccctgcaatgctgcctaccatgattggcctcctggcagaggcaggcgtgcggctgctgtcctaccagacttcactggtgtcagatggggagacctggcacgtcatgggcatctcctccttgctgcccagcctggaagcgtggaagcagcatgtgactgaagccttccagttccacttctaaccttggagctcactggtccctgcctctggggcttttctgaagaaacccacccactgtgatcaatagggagagaaaatccacattcttgggctgaacgcgggcctctgacactgcttacactgcactctgaccctgtagtacagcaataaccgtctaataaagagcctacccccaacaaaaaaaaaaaaaaaaaaaaaaaaaaaaaaaaaagggggggggggcttaagatttcccccgggggggcccagttttgggttccccgggttttttgttgtccagaggggggcccccctaagaggcggccctcctcattttatcacgccagcggagcacctggcgcccggttgttttcaacgaggctgtcgcgccacctgggggcaaaacaatcggtctgtcaccgtgggcgactccttgtggtagcggagcgacacccccctcaccttccctgggggggggccgcgccccaatagtggggcgccccaactgcctccccctcgccgcggattctttccagggccctcctagtggctaacctccttccgactctcccaagggctgctactcagcggggcgtgttacaaccaccgccgccattataccccg

SEQ ID NO: 332855 - DNA, 2277 bp, Homo sapiens
tgatagtcgaattccttcaacgtctagcacagtgccttcaaatttacccactcaaaaaaaaatttcgtaaggaattaataaatgaatccttaggaggaaaagtgaaaatgaagtttttctctcaggatgaggtgtatttctccgttcatttcagatatgcatcagctagtcagcgtaaattgtgctttttatatgctcaccaggtgtaggtaagagctttggctgagatggagaaattcatcgcgggaggataataaagcgggcagggatttggcaacctcagagccgcgaggaggaggcggagtcgcggagagtttgagtatttccgtccaatcaaaaggagactgtaggaggaggaggaggaggagatgactggggagcgggagctcgagaatactgcccagttactctagcgcgccaggccgaaccgcagcttcttggcttaggtacttctactcacagcggccgattccgaggccaactccagcaatggcttttgcaaatctgcggaaagtgctcatcagtgacagcctggacccttgctgccggaagatcttgcaagatggagggctgcaggtggtggaaaagcagaaccttagcaaagaggagctgatagcggagctgcaggactgtgaaggccttattgttcgctctgccaccaaggtgaccgctgatgtcatcaacgcagctgagaaactccaggtggtgggcagggctggcacaggtgtggacaatgtggatctggaggccgcaacaaggaagggcatcttggttatgaacacccccaatgggaacagcctcagtgccgcagaactcacttgtggaatgatcatgtgcctggccaggcagattccccaggcgacggcttcgatgaaggacggcaaatgggagcggaagaagttcatgggaacagagctgaatggaaagaccctgggaattcttggcctgggcaggattgggagagaggtagctacccggatgcagtcctttgggatgaagactatagggtatgaccccatcatttccccagaggtctcggcctcctttggtgttcagcagctgcccctggaggagatctggcctctctgtgatttcatcactgtgcacactcctctcctgccctccacgacaggcttgctgaatgacaacacctttgcccagtgcaagaagggggtgcgtgtggtgaactgtgcccgtggagggatcgtggacgaaggcgccctgctccgggccctgcagtctggccagtgtgccggggctgcactggacgtgtttacggaagagccgccacgggaccgggccttggtggaccatgagaatgtcatcagctgtccccacctgggtgccagcaccaaggaggctcagagccgctgtggggaggaaattgctgttcagttcgtggacatggtgaaggggaaatctctcacgggggttgtgaatgcccaggcccttaccagtgccttctctccacacaccaagccttggattggtctggcagaagctctggggacactgatgcgagcctgggctgggtcccccaaagggaccatccaggtgataacacagggaacatccctgaagaatgctgggaactgcctaagccccgcagtcattgtcggcctcctgaaagaggcttccaagcaggcggatgtgaacttggtgaacgctaagctgctggtgaaagaggctggcctcaatgtcaccacctcccacagccctgctgcaccaggggagcaaggcttcggggaatgcctcctggccgtggccctggcaggcgccccttaccaggctgtgggcttggtccaaggcactacacctgtactgcaggggctcaatggagctgtcttcaggccagaagtgcctctccgcagggacctgcccctgctcctattccggactcagacctctgaccctgcaatgctgcctaccatgattggcctcctggcagaggcaggcgtgcggctgctgtcctaccagacttcactggtgtcagatggggagacctggcacgtcatgggcatctcctccttgctgcccagcctggaagcgtggaagcagcatgtgactgaagccttccagttccacttctaaccttggagctcactggtccctgcctctggggcttttctgaagaaacccacccactgtgatcaatagggagagaaaatccacattcttggtcacatctgggtgaagcggctttgacattgttaactggatttgactgtgtaaggaatacgctaataaagctacccaaaaaaaaaaacacccaacaca

SEQ ID NO: 332856 - DNA, 2290 bp, Homo sapiens
tgatagtcgaattccttcaacgtctagcacagtgccttcaaatttacccactcaaaaaaaaatttcgtaaggaattaataaatgaatccttaggaggaaaagtgaaaatgaagtttttctctcaggatgaggtgtatttctccgttcatttcagatatgcatcagctagtcagcgtaaattgtgctttttatatgctcaccaggtgtaggtaagagctttggctgagatggagaaattcatcgcgggaggataataaagcgggcagggatttggcaacctcagagccgcgaggaggaggcggagtcgcggagagtttgagtatttccgtccaatcaaaaggagactgtaggaggaggaggaggaggagatgactggggagcgggagctcgagaatactgcccagttactctagcgcgccaggccgaaccgcagcttcttggcttaggtacttctactcacagcggccgattccgaggccaactccagcaatggcttttgcaaatctgcggaaagtgctcatcagtgacagcctggacccttgctgccggaagatcttgcaagatggagggctgcaggtggtggaaaagcagaaccttagcaaagaggagctgatagcggagctgcaggactgtgaaggccttattgttcgctctgccaccaaggtgaccgctgatgtcatcaacgcagctgagaaactccaggtggtgggcagggctggcacaggtgtggacaatgtggatctggaggccgcaacaaggaagggcatcttggttatgaacacccccaatgggaacagcctcagtgccgcagaactcacttgtggaatgatcatgtgcctggccaggcagattccccaggcgacggcttcgatgaaggacggcaaatgggagcggaagaagttcatgggaacagagctgaatggaaagaccctgggaattcttggcctgggcaggattgggagagaggtagctacccggatgcagtcctttgggatgaagactatagggtatgaccccatcatttccccagaggtctcggcctcctttggtgttcagcagctgcccctggaggagatctggcctctctgtgatttcatcactgtgcacactcctctcctgccctccacgacaggcttgctgaatgacaacacctttgcccagtgcaagaagggggtgcgtgtggtgaactgtgcccgtggagggatcgtggacgaaggcgccctgctccgggccctgcagtctggccagtgtgccggggctgcactggacgtgtttacggaagagccgccacgggaccgggccttggtggaccatgagaatgtcatcagctgtccccacctgggtgccagcaccaaggaggctcagagccgctgtggggaggaaattgctgttcagttcgtggacatggtgaaggggaaatctctcacgggggttgtgaatgcccaggcccttaccagtgccttctctccacacaccaagccttggattggtctggcagaagctctggggacactgatgcgagcctgggctgggtcccccaaagggaccatccaggtgataacacagggaacatccctgaagaatgctgggaactgcctaagccccgcagtcattgtcggcctcctgaaagaggcttccaagcaggcggatgtgaacttggtgaacgctaagctgctggtgaaagaggctggcctcaattcaccttgccttctccacacagtcaccacctcccacagccctgctgcaccaggggagcaaggcttcggggaatgcctcctggccgtggccctggcaggcgccccttaccaggctgtgggcttggtccaaggcactacacctgtactgcaggggctcaatggagctgtcttcaggccagaagtgcctctccgcagggacctgcccctgctcctattccggactcagacctctgaccctgcaatgctgcctaccatgattggcctcctggcagaggcaggcgtgcggctgctgtcctaccagacttcactggtgtcagatggggagacctggcacgtcatgggcatctcctccttgctgcccagcctggaagcgtggaagcagcatgtgactgaagccttccagttccacttctaaccttggagctcactggtccctgcctctggggcttttctgaagaaacccacccactgtgatcaatagggagagaaaatccacattcttgggctgaacgcgggcctctgacactgcttacactgcactctgaccctgtagtacagcaataaccgtctaataaagagcctacccccaacaa

SEQ ID NO: 332857 - DNA, 3692 bp, Homo sapiens
aaaacacattaaaaactttattgtaagtatcaacatctaaatttgcatcaatttgatacatcgttgctcattttgcagaacataacagttgcacattgcaagagtcaacttgcttcgggtcttttcatgctcatggcggtccacccctgccttccctctccctgacctgcatcctgtcctccacagtctgccctgcctcctgtcgccacaggttgaagacccaagccctgaggagaacctgctgccagggggctggctggctgcgagccaggagggccaggcagttagccctgccacagggaggggcaggcaagggatcgtttctcctcttcctgggctgagcccgtgccaggccagccacagagtgccctagtcagcccatgtggctccaggaagcctgctgttgttctactccatcccatttcacccgcagcctagtggctaactccggatactctgagcaaaattaacccaagtttcatggagaactccagaaccttgaaccagtgcatggttatcaccattctttgttactagatgtaggagaaggtactgcagagtcctctggcctggaacagcttgggggaggattcagctccctgtttctccctcactcccaggagattcgaaaacaagtttgagagaaaaaacagtaactaaaaaagtccatgaagaaggatctgacatgtcctttgtgaagtaacattaccctctccccatcacgacgcaggagatgacatgttacagtaagagggttacagcaattccccatctggagtgccattcaactgcctgcagaaatcttccattttaatgcattttaaacacattcaaaacgagtgctgactctccaacctagggaaaatgcccaataaaaaatatagatagaaaatacatgctaatgtaatggcaaacttatctccacactaaaacggcaacagtcttgcggttgagggcaggggtgcggtggaacctccctcttcccacaagaacatcagcaccagagatgctcggtccccgggctgatctgatggtggggaccacgcactgtcactcggctgccggtccggtcccagtgttggcctgggactatcagtgctgcagcaggaagttggtggcgacattgaggtcattgtttgaagctctcagggcttccaaagcatcacctctggaaaatcccatctccatgagccgggcgacctgttcctcagaaacttctagagggggcgctgctggctcagactgccgaccgccctgatagtttacgttttgtcgctgacgtaaaggaggaaaaagacgattccaattgatcattcctccctgctgctgtctctgtcgcctcccttgtgcaaactgagagaacatcagctgccggtccagcagctccattctctgctgtctctggatgtccagcgtggctcccatcccaattctggcttcgctggtgggttctgaagaagagaagatgggttcaagtgtccaagaaaagaattttgccatccagctggggatgcagagcacctgatgcacctggaacattttgctgtcgtagcacagaccggacataagtccacttatggctacaatccagatgtaggaaccagaggtgaaaagctgcagtcccaatatataaatcaatgtcttgtttgtgatggacaacggacccagaatttgtgccacttggactcttggtatggagcagtaaaatggtacaaacagagcaaacacaggtgccaggaatccagaaggcaaattactagctgcagtgatgccaaagaaatactgcatagcttcaatgaggagaaagtcaaataaggctgacaaaacccaggaacccagcaaaaagcgaaccgcagcttcttggcttaggtacttctactcacagcggccgattccgaggccaactccagcaatggcttttgcaaatctgcggaaagtgctcatcagtgacagcctggacccttgctgccggaagatcttgcaagatggagggctgcaggtggtggaaaagcagaaccttagcaaagaggagctgatagcggagctgcaggactgtgaaggccttattgttcgctctgccaccaaggtgaccgctgatgtcatcaacgcagctgagaaactccaggtggtgggcagggctggcacaggtgtggacaatgtggatctggaggccgcaacaaggaagggcatcttggttatgaacacccccaatgggaacagcctcagtgccgcagaactcacttgtggaatgatcatgtgcctggccaggcagattccccaggcgacggcttcgatgaaggacggcaaatgggagcggaagaagttcatgggaacagagctgaatggaaagaccctgggaattcttggcctgggcaggattgggagagaggtagctacccggatgcagtcctttgggatgaagactatagggtatgaccccatcatttccccagaggtctcggcctcctttggtgttcagcagctgcccctggaggagatctggcctctctgtgatttcatcactgtgcacactcctctcctgccctccacgacaggcttgctgaatgacaacacctttgcccagtgcaagaagggggtgcgtgtggtgaactgtgcccgtggagggatcgtggacgaaggcgccctgctccgggccctgcagtctggccagtgtgccggggctgcactggacgtgtttacggaagagccgccacgggaccgggccttggtggaccatgagaatgtcatcagctgtccccacctgggtgccagcaccaaggaggctcagagccgctgtggggaggaaattgctgttcagttcgtggacatggtgaaggggaaatctctcacgggggttgtgaatgcccaggcccttaccagtgccttctctccacacaccaagccttggattggtctggcagaagctctggggacactgatgcgagcctgggctgggtcccccaaagggaccatccaggtgataacacagggaacatccctgaagaatgctgggaactgcctaagccccgcagtcattgtcggcctcctgaaagaggcttccaagcaggcggatgtgaacttggtgaacgctaagctgctggtgaaagaggctggcctcaatgtcaccacctcccacagccctgctgcaccaggggagcaaggcttcggggaatgcctcctggccgtggccctggcaggcgccccttaccaggctgtgggcttggtccaaggcactacacctgtactgcaggggctcaatggagctgtcttcaggccagaagtgcctctccgcagggacctgcccctgctcctattccggactcagacctctgaccctgcaatgctgcctaccatgattggcctcctggcagaggcaggcgtgcggctgctgtcctaccagacttcactggtgtcagatggggagacctggcacgtcatgggcatctcctccttgctgcccagcctggaagcgtggaagcagcatgtgactgaagccttccagttccacttctaaccttggagctcactggtccctgcctctggggcttttctgaagaaacccacccactgtgatcaatagggagagaaaatccacattcttgggctgaacgcgggcctctgacactgcttacactgcactctgaccctgtagtacagcaataaccgtctaataaagagcctacccccaacaa

SEQ ID NO: 332858 - DNA, 1890 bp, Homo sapiens
caacctagtatacacgctagtagccgcggttaatcggacgaggccgaaccgcagcttcttggcttaggtacttctactcacagcggccgattccgaggccaactccagcaatggcttttgcaaatctgcggaaagtgctcatcagtgacagcctggacccttgctgccggaagatcttgcaagatggagggctgcaggtggtggaaaagcagaaccttagcaaagaggagctgatagcggagctgcaggactgtgaaggccttattgttcgctctgccaccaaggtgaccgctgatgtcatcaacgcagctgagaaactccaggtggtgggcagggctggcacaggtgtggacaatgtggatctggaggccgcaacaaggaagggcatcttggttatgaacacccccaatgggaacagcctcagtgccgcagaactcacttgtggaatgatcatgtgcctggccaggcagattccccaggcgacggcttcgatgaaggacggcaaatgggagcggaagaagttcatgggaacagagctgaatggaaagaccctgggaattcttggcctgggcaggattgggagagaggtagctacccggatgcagtcctttgggatgaagactatagggtatgaccccatcatttccccagaggtctcggcctcctttggtgttcagcagctgcccctggaggagatctggcctctctgtgatttcatcactgtgcacactcctctcctgccctccacgacaggcttgctgaatgacaacacctttgcccagtgcaagaagggggtgcgtgtggtgaactgtgcccgtggagggatcgtggacgaaggcgccctgctccgggccctgcagtctggccagtgtgccggggctgcactggacgtgtttacggaagagccgccacgggaccgggccttggtggaccatgagaatgtcatcagctgtccccacctgggtgccagcaccaaggaggctcagagccgctgtggggaggaaattgctgttcagttcgtggacatggtgaaggggaaatctctcacgggggttgtgaatgcccaggcccttaccagtgccttctctccacacaccaagccttggattggtctggcagaagctctggggacactgatgcgagcctgggctgggtcccccaaagggaccatccaggtgataacacagggaacatccctgaagaatgctgggaactgcctaagccccgcagtcattgtcggcctcctgaaagaggcttccaagcaggcggatgtgaacttggtgaacgctaagctgctggtgaaagaggctggcctcaatgtcaccacctcccacagccctgctgcaccaggggagcaaggcttcggggaatgcctcctggccgtggccctggcaggcgccccttaccaggctgtgggcttggtccaaggcactacacctgtactgcaggggctcaatggagctgtcttcaggccagaagtgcctctccgcagggacctgcccctgctcctattccggactcagacctctgaccctgcaatgctgcctaccatgattggcctcctggcagaggcaggcgtgcggctgctgtcctaccagacttcactggtgtcagatggggagacctggcacgtcatgggcatctcctccttgctgcccagcctggaagcgtggaagcagcatgtgactgaagccttccagttccacttctaaccttggagctcactggtccctgcctctggggcttttctgaagaaacccacccactgtgatcaatagggagagaaaatccacattcttgggctgaacgcgggcctctgacactgcttacactgcactctgaccctgtagtacagcaataaccgtctaataaagagcctacccccaacaa

SEQ ID NO: 332859 - DNA, 1987 bp, Homo sapiens
tgatagtcgaattccttcaacgtctagcacagtgccttcaaatttacccactcaaaaaaaaatttcgtaaggaattaataaatgaatccttaggaggaaaagtgaaaatgaagtttttctctcaggatgaggtgtatttctccgttcatttcagatatgcatcagctagtcagcgtaaattgtgctttttatatgctcaccaggtgtaggtaagagctttggctgagatggagaaattcatcgcgggaggataataaagcgggcagggatttggcaacctcagagccgcgaggaggaggcggagtcgcggagagtttgagtatttccgtccaatcaaaaggagactgtaggaggaggaggaggaggagatgactggggagcgggagctcgagaatactgcccagttactctagcgcgccaggccgaaccgcagcttcttggcttaggtacttctactcacagcggccgattccgaggccaactccagcaatggcttttgcaaatctgcggaaagtgctcatcagtgacagcctggacccttgctgccggaagatcttgcaagatggagggctgcaggtggtggaaaagcagaaccttagcaaagaggagctgatagcggagctgcaggactgtgaaggccttattgttcgctctgccaccaaggtgaccgctgatgtcatcaacgcagctgagaaactccaggtggtgggcagggctggcacaggtgtggacaatgtggatctggaggccgcaacaaggaagggcatcttggttatgaacacccccaatgggaacagcctcagtgccgcagaactcacttgtggaatgatcatgtgcctggccaggcagattccccaggcgacggcttcgatgaaggacggcaaatgggagcggaagaagttcatgggaacagagctgaatggaaagaccctgggaattcttggcctgggcaggattgggagagaggtagctacccggatgcagtcctttgggatgaagactatagggtatgaccccatcatttccccagaggtctcggcctcctttggtgttcagcagctgcccctggaggagatctggcctctctgtgatttcatcactgtgcacactcctctcctgccctccacgacaggcttgctgaatgacaacacctttgcccagtgcaagaagggggtgcgtgtggtgaactgtgcccgtggagggatcgtggacgaaggcgccctgctccgggccctgcagtctggccagtgtgccggggctgcactggacgtgtttacggaagagccgccacgggaccgggccttggtggaccatgagaatgtcatcagctgtccccacctgggtgccagcaccaaggaggctcagagccgctgtggggaggaaattgctgttcagttcgtggacatggtgaaggggaaatctctcacgggggttgtgaatgcccaggcccttaccagtgccttctctccacacaccaagccttggattggtctggcagaagctctggggacactgatgcgagcctgggctgggtcccccaaagggaccatccaggtgataacacagggaacatccctgaagaatgctgggaactgcctaagccccgcagtcattgtcggcctcctgaaagaggcttccaagcaggcggatgtgaacttggtgaacgctaagctgctggtgaaagaggctggcctcaatgtcaccacctcccacagccctgctgcaccaggggagcaaggcttcggggaatgcctcctggccgtggccctggcaggcgccccttaccaggctgtgggcttggtccaaggcactacacctgtactgcaggggctcaatggagctgtcttcaggccagaagtgcctctccgcagggacctgcccctgctcctattccggacgctgaacgcgggcctctgacactgcttacactgcactctgaccctgtagtacagcaataaccgtctaataaagagcctacccccaacaa

SEQ ID NO: 332860 - DNA, 2302 bp, Homo sapiens
  misc_feature (1623)..(1623): n is a, c, g, or t
  misc_feature (1628)..(1629): n is a, c, g, or t
  misc_feature (1642)..(1643): n is a, c, g, or t
  misc_feature (1647)..(1647): n is a, c, g, or t
  misc_feature (1658)..(1659): n is a, c, g, or t
  misc_feature (1661)..(1661): n is a, c, g, or t
  misc_feature (1665)..(1665): n is a, c, g, or t
  misc_feature (1668)..(1668): n is a, c, g, or t
  misc_feature (1677)..(1677): n is a, c, g, or t
  misc_feature (1680)..(1680): n is a, c, g, or t
  misc_feature (1695)..(1696): n is a, c, g, or t
  misc_feature (1703)..(1703): n is a, c, g, or t
  misc_feature (1736)..(1739): n is a, c, g, or t
  misc_feature (1744)..(1745): n is a, c, g, or t
  misc_feature (1752)..(1752): n is a, c, g, or t
  misc_feature (1756)..(1756): n is a, c, g, or t
  misc_feature (1766)..(1766): n is a, c, g, or t
  misc_feature (1776)..(1777): n is a, c, g, or t
  misc_feature (1779)..(1779): n is a, c, g, or t
  misc_feature (1789)..(1789): n is a, c, g, or t
  misc_feature (1794)..(1794): n is a, c, g, or t
  misc_feature (1801)..(1801): n is a, c, g, or t
  misc_feature (1812)..(1813): n is a, c, g, or t
  misc_feature (1828)..(1828): n is a, c, g, or t
  misc_feature (1830)..(1830): n is a, c, g, or t
  misc_feature (1835)..(1835): n is a, c, g, or t
  misc_feature (1841)..(1842): n is a, c, g, or t
  misc_feature (1845)..(1845): n is a, c, g, or t
  misc_feature (1852)..(1852): n is a, c, g, or t
  misc_feature (1860)..(1860): n is a, c, g, or t
  misc_feature (1864)..(1864): n is a, c, g, or t
  misc_feature (1868)..(1868): n is a, c, g, or t
  misc_feature (1906)..(1906): n is a, c, g, or t
  misc_feature (1954)..(1955): n is a, c, g, or t
  misc_feature (1957)..(1957): n is a, c, g, or t
tgatagtcgaattccttcaacgtctagcacagtgccttcaaatttacccactcaaaaaaaaatttcgtaaggaattaataaatgaatccttaggaggaaaagtgaaaatgaagtttttctctcaggatgaggtgtatttctccgttcatttcagatatgcatcagctagtcagcgtaaattgtgctttttatatgctcaccaggtgtaggtaagagctttggctgagatggagaaattcatcgcgggaggataataaagcgggcagggatttggcaacctcagagccgcgaggaggaggcggagtcgcggagagtttgagtatttccgtccaatcaaaaggagactgtaggaggaggaggaggaggagatgactggggagcgggagctcgagaatactgcccagttactctagcgcgccaggccgaaccgcagcttcttggcttaggtacttctactcacagcggccgattccgaggccaactccagcaatggcttttgcaaatctgcggaaagtgctcatcagtgacagcctggacccttgctgccggaagatcttgcaagatggagggctgcaggtggtggaaaagcagaaccttagcaaagaggagctgatagcggagctgcaggactgtgaaggccttattgttcgctctgccaccaaggtgaccgctgatgtcatcaacgcagctgagaaactccaggtggtgggcagggctggcacaggtgtggacaatgtggatctggaggccgcaacaaggaagggcatcttggttatgaacacccccaatgggaacagcctcagtgccgcagaactcacttgtggaatgatcatgtgcctggccaggcagattccccaggcgacggcttcgatgaaggacggcaaatgggagcggaagaagttcatgggaacagagctgaatggaaagaccctgggaattcttggcctgggcaggattgggagagaggtagctacccggatgcagtcctttgggatgaagactatagggtatgaccccatcatttccccagaggtctcggcctcctttggtgttcagcagctgcccctggaggagatctggcctctctgtgatttcatcactgtgcacactcctctcctgccctccacgacaggcttgctgaatgacaacacctttgcccagtgcaagaagggggtgcgtgtggtgaactgtgcccgtggagggatcgtggacgaaggcgccctgctccgggccctgcagtctggccagtgtgccggggctgcactggacgtgtttacggaagagccgccacgggaccgggccttggtggaccatgagaatgtcatcagctgtccccacctgggtgccagcaccaaggaggctcagagccgctgtggggaggaaattgctgttcagttcgtggacatggtgaaggggaaatctctcacgggggttgtgaatgcccaggcccttaccagtgccttctctccacacaccaagccttggattggtctggcagaagctctggggacactgatgcgagcctgggctgggtcccccaaagggaccatccaggtgataacacaggacatcctgaagaatgttgggaactgcctaagcctctgttatttatttttgtccttnttatnnatgtttccatttnngtgnttttgtatttnntntacnttnttttgtttnttntagatgttgtctttnntgttacntcttccttatagctttttttcattaggggtttnnnnttttnngtatatncttnttttctgttngcttttgganntnttctcttttntctangttttgntcttttttttnngtattacttttgtantntaggngttttnnttnttttgtntttaggtnctanttantgtcctttctgtttgggatctttgtctcctttgtcttntttatttccgttattttagtatctttttgttctctttgttatattttnntntttccattattggcctcctggcagaggcaggcgtgcggctgctgtcctaccagacttcactggtgtcagatggggagacctggcacgtcatgggcatctcctccttgctgcccagcctggaagcgtggaagcagcatgtgactgaagccttccagttccacttctaaccttggagctcactggtccctgcctctggggcttttctgaagaaacccacccactgtgatcaatagggagagaaaatccacattcttgggctgaacgcgggcctctgacactgcttacactgcactctgaccctgtagtacagcaataaccgtctaataaagagcctacccccaacaa

SEQ ID NO: 332861 - DNA, 1767 bp, Homo sapiens
tgatagtcgaattccttcaacgtctagcacagtgccttcaaatttacccactcaaaaaaaaatttcgtaaggaattaataaatgaatccttaggaggaaaagtgaaaatgaagtttttctctcaggatgaggtgtatttctccgttcatttcagatatgcatcagctagtcagcgtaaattgtgctttttatatgctcaccaggtgtaggtaagagctttggctgagatggagaaattcatcgcgggaggataataaagcgggcagggatttggcaacctcagagccgcgaggaggaggcggagtcgcggagagtttgagtatttccgtccaatcaaaaggagactgtaggaggaggaggaggaggagatgactggggagcgggagctcgagaatactgcccagttactctagcgcgccaggccgaaccgcagcttcttggcttaggtacttctactcacagcggccgattccgaggccaactccagcaatggcttttgcaaatctgcggaaagtgctcatcagtgacagcctggacccttgctgccggaagatcttgcaagatggagggctgcaggtggtggaaaagcagaaccttagcaaagaggagctgatagcggagctgcaggactgtgaaggccttattgttcgctctgccaccaaggtgaccgctgatgtcatcaacgcagctgagaaactccaggtggtgggcagggctggcacaggtgtggacaatgtggatctggaggccgcaacaaggaagggcatcttggttatgaacacccccaatgggaacagcctcagtgccgcagaactcacttgtggaatgatcatgtgcctggccaggcagattccccaggcgacggcttcgatgaaggacggcaaatgggagcggaagaagttcatgggaacagagctgaatggaaagaccctgggaattcttggcctgggcaggattgggagagaggtagctacccggatgcagtcctttgggatgaagactatagggtatgaccccatcatttccccagaggtctcggcctcctttggtgttcagcagctgcccctggaggagatctggcctctctgtgatttcatcactgtgcacactcctctcctgccctccacgacaggcttgctgaatgacaacacctttgcccagtgcaagaagggggtgcgtgtggtgaactgtgcccgtggagggatcgtggacgaaggcgccctgctccgggccctgcagtctggccagtgtgccggggctgcactggacgtgtttacggaagagccgccacgggaccgggccttggtggaccatgagaatgtcatcagctgtccccacctgggtgccagcaccaaggaggctcagagccgctgtggggaggaaattgctgttcagttcgtggacatggtgaaggggaaatctctcacgggggttgcctcctggcagaggcaggcgtgcggctgctgtcctaccagacttcactggtgtcagatggggagacctggcacgtcatgggcatctcctccttgctgcccagcctggaagcgtggaagcagcatgtgactgaagccttccagttccacttctaaccttggagctcactggtccctgcctctggggcttttctgaagaaacccacccactgtgatcaatagggagagaaaatccacattcttgggctgaacgcgggcctctgacactgcttacactgcactctgaccctgtagtacagcaataaccgtctaataaagagcctacccccaacaa

SEQ ID NO: 332862 - DNA, 1899 bp, Homo sapiens
ttctgggctgcggagcatctgagcgtcgtcgagtcggcacctggtcttctcgtgtttcctgacccctccttccttgtgcacggtggtggatctgccggctctccctgtcttgagctcgttcttgcgtttcgatgctccctacggttgaacctgcctagttacactcgtatgtctggcggaagatcttgcaagatggagggctgcaggtggtggaaaagcagaaccttagcaaagaggagctgatagcggagctgcaggactgtgaaggccttattgttcgctctgccaccaaggtgaccgctgatgtcatcaacgcagctgagaaactccaggtggtgggcagggctggcacaggtgtggacaatgtggatctggaggccgcaacaaggaagggcatcttggttatgaacacccccaatgggaacagcctcagtgccgcagaactcacttgtggaatgatcatgtgcctggccaggcagattccccaggcgacggcttcgatgaaggacggcaaatgggagcggaagaagttcatgggaacagagctgaatggaaagaccctgggaattcttggcctgggcaggattgggagagaggtagctacccggatgcagtcctttgggatgaagactatagggtatgaccccatcatttccccagaggtctcggcctcctttggtgttcagcagctgcccctggaggagatctggcctctctgtgatttcatcactgtgcacactcctctcctgccctccacgacaggcttgctgaatgacaacacctttgcccagtgcaagaagggggtgcgtgtggtgaactgtgcccgtggagggatcgtggacgaaggcgccctgctccgggccctgcagtctggccagtgtgccggggctgcactggacgtgtttacggaagagccgccacgggaccgggccttggtggaccatgagaatgtcatcagctgtccccacctgggtgccagcaccaaggaggctcagagccgctgtggggaggaaattgctgttcagttcgtggacatggtgaaggggaaatctctcacgggggttgtgaatgcccaggcccttaccagtgccttctctccacacaccaagccttggattggtctggcagaagctctggggacactgatgcgagcctgggctgggtcccccaaagggaccatccaggtgataacacagggaacatccctgaagaatgctgggaactgcctaagccccgcagtcattgtcggcctcctgaaagaggcttccaagcaggcggatgtgaacttggtgaacgctaagctgctggtgaaagaggctggcctcaatgtcaccacctcccacagccctgctgcaccaggggagcaaggcttcggggaatgcctcctggccgtggccctggcaggcgccccttaccaggctgtgggcttggtccaaggcactacacctgtactgcaggggctcaatggagctgtcttcaggccagaagtgcctctccgcagggacctgcccctgctcctattccggactcagacctctgaccctgcaatgctgcctaccatgattggcctcctggcagaggcaggcgtgcggctgctgtcctaccagacttcactggtgtcagatggggagacctggcacgtcatgggcatctcctccttgctgcccagcctggaagcgtggaagcagcatgtgactgaagccttccagttccacttctaaccttggagctcactggtccctgcctctggggcttttctgaagaaacccacccactgtgatcaatagggagagaaaatccacattcttgggctgaacgcgggcctctgacactgcttacactgcactctgaccctgtagtacagcaataaccgtctaataaagagcctacccccaacaa

SEQ ID NO: 332863 - DNA, 2183 bp, Homo sapiens
tgatagtcgaattccttcaacgtctagcacagtgccttcaaatttacccactcaaaaaaaaatttcgtaaggaattaataaatgaatccttaggaggaaaagtgaaaatgaagtttttctctcaggatgaggtgtatttctccgttcatttcagatatgcatcagctagtcagcgtaaattgtgctttttatatgctcaccaggtgtaggtaagagctttggctgagatggagaaattcatcgcgggaggataataaagcgggcagggatttggcaacctcagagccgcgaggaggaggcggagtcgcggagagtttgagtatttccgtccaatcaaaaggagactgtaggaggaggaggaggaggagatgactggggagcgggagctcgagaatactgcccagttactctagcgcgccaggccgaaccgcagcttcttggcttaggtacttctactcacagcggccgattccgaggccaactccagcaatggcttttgcaaatctgcggaaagtgctcatcagtgacagcctggacccttgctgccggaagatcttgcaagatggagggctgcaggtggtggaaaagcagaaccttagcaaagaggagctgatagcggagctgcagggctggcacaggtgtggacaatgtggatctggaggccgcaacaaggaagggcatcttggttatgaacacccccaatgggaacagcctcagtgccgcagaactcacttgtggaatgatcatgtgcctggccaggcagattccccaggcgacggcttcgatgaaggacggcaaatgggagcggaagaagttcatgggaacagagctgaatggaaagaccctgggaattcttggcctgggcaggattgggagagaggtagctacccggatgcagtcctttgggatgaagactatagggtatgaccccatcatttccccagaggtctcggcctcctttggtgttcagcagctgcccctggaggagatctggcctctctgtgatttcatcactgtgcacactcctctcctgccctccacgacaggcttgctgaatgacaacacctttgcccagtgcaagaagggggtgcgtgtggtgaactgtgcccgtggagggatcgtggacgaaggcgccctgctccgggccctgcagtctggccagtgtgccggggctgcactggacgtgtttacggaagagccgccacgggaccgggccttggtggaccatgagaatgtcatcagctgtccccacctgggtgccagcaccaaggaggctcagagccgctgtggggaggaaattgctgttcagttcgtggacatggtgaaggggaaatctctcacgggggttgtgaatgcccaggcccttaccagtgccttctctccacacaccaagccttggattggtctggcagaagctctggggacactgatgcgagcctgggctgggtcccccaaagggaccatccaggtgataacacagggaacatccctgaagaatgctgggaactgcctaagccccgcagtcattgtcggcctcctgaaagaggcttccaagcaggcggatgtgaacttggtgaacgctaagctgctggtgaaagaggctggcctcaatgtcaccacctcccacagccctgctgcaccaggggagcaaggcttcggggaatgcctcctggccgtggccctggcaggcgccccttaccaggctgtgggcttggtccaaggcactacacctgtactgcaggggctcaatggagctgtcttcaggccagaagtgcctctccgcagggacctgcccctgctcctattccggactcagacctctgaccctgcaatgctgcctaccatgattggcctcctggcagaggcaggcgtgcggctgctgtcctaccagacttcactggtgtcagatggggagacctggcacgtcatgggcatctcctccttgctgcccagcctggaagcgtggaagcagcatgtgactgaagccttccagttccacttctaaccttggagctcactggtccctgcctctggggcttttctgaagaaacccacccactgtgatcaatagggagagaaaatccacattcttgggctgaacgcgggcctctgacactgcttacactgcactctgaccctgtagtacagcaataaccgtctaataaagagcctacccccaacaa

SEQ ID NO: 332864 - DNA, 1926 bp, Homo sapiens
tgatagtcgaattccttcaacgtctagcacagtgccttcaaatttacccactcaaaaaaaaatttcgtaaggaattaataaatgaatccttaggaggaaaagtgaaaatgaagtttttctctcaggatgaggtgtatttctccgttcatttcagatatgcatcagctagtcagcgtaaattgtgctttttatatgctcaccaggtgtaggtaagagctttggctgagatggagaaattcatcgcgggaggataataaagcgggcagggatttggcaacctcagagccgcgaggaggaggcggagtcgcggagagtttgagtatttccgtccaatcaaaaggagactgtaggaggaggaggaggaggagatgactggggagcgggagctcgagaatactgcccagttactctagcgcgccaggccgaaccgcagcttcttggcttaggtacttctactcacagcggccgattccgaggccaactccagcaatggcttttgcaaatctgcggaaagtgctcatcagtgacagcctggacccttgctgccggaagatcttgcaagatggagggctgcaggtggtggaaaagcagaaccttagcaaagaggagctgatagcggagctgcagctacccggatgcagtcctttgggatgaagactatagggtatgaccccatcatttccccagaggtctcggcctcctttggtgttcagcagctgcccctggaggagatctggcctctctgtgatttcatcactgtgcacactcctctcctgccctccacgacaggcttgctgaatgacaacacctttgcccagtgcaagaagggggtgcgtgtggtgaactgtgcccgtggagggatcgtggacgaaggcgccctgctccgggccctgcagtctggccagtgtgccggggctgcactggacgtgtttacggaagagccgccacgggaccgggccttggtggaccatgagaatgtcatcagctgtccccacctgggtgccagcaccaaggaggctcagagccgctgtggggaggaaattgctgttcagttcgtggacatggtgaaggggaaatctctcacgggggttgtgaatgcccaggcccttaccagtgccttctctccacacaccaagccttggattggtctggcagaagctctggggacactgatgcgagcctgggctgggtcccccaaagggaccatccaggtgataacacagggaacatccctgaagaatgctgggaactgcctaagccccgcagtcattgtcggcctcctgaaagaggcttccaagcaggcggatgtgaacttggtgaacgctaagctgctggtgaaagaggctggcctcaatgtcaccacctcccacagccctgctgcaccaggggagcaaggcttcggggaatgcctcctggccgtggccctggcaggcgccccttaccaggctgtgggcttggtccaaggcactacacctgtactgcaggggctcaatggagctgtcttcaggccagaagtgcctctccgcagggacctgcccctgctcctattccggactcagacctctgaccctgcaatgctgcctaccatgattggcctcctggcagaggcaggcgtgcggctgctgtcctaccagacttcactggtgtcagatggggagacctggcacgtcatgggcatctcctccttgctgcccagcctggaagcgtggaagcagcatgtgactgaagccttccagttccacttctaaccttggagctcactggtccctgcctctggggcttttctgaagaaacccacccactgtgatcaatagggagagaaaatccacattcttgggctgaacgcgggcctctgacactgcttacactgcactctgaccctgtagtacagcaataaccgtctaataaagagcctacccccaacaa

SEQ ID NO: 332865 - DNA, 949 bp, Homo sapiens
gataggtcagagctgctctagaggaacccttcgatgtgggctcagagccgctgtggggaggaaattgctgttcagttcgtggacatggtgaaggggaaatctctcacgggggttgtgaatgcccaggcccttaccagtgccttctctccacacaccaagccttggattggtctggcagaagctctggggacactgatgcgagcctgggctgggtcccccaaagggaccatccaggtgataacacagggaacatccctgaagaatgctgggaactgcctaagccccgcagtcattgtcggcctcctgaaagaggcttccaagcaggcggatgtgaacttggtgaacgctaagctgctggtgaaagaggctggcctcaatgtcaccacctcccacagccctgctgcaccaggggagcaaggcttcggggaatgcctcctggccgtggccctggcaggcgccccttaccaggctgtgggcttggtccaaggcactacacctgtactgcaggggctcaatggagctgtcttcaggccagaagtgcctctccgcagggacctgcccctgctcctattccggactcagacctctgaccctgcaatgctgcctaccatgattggcctcctggcagaggcaggcgtgcggctgctgtcctaccagacttcactggtgtcagatggggagacctggcacgtcatgggcatctcctccttgctgcccagcctggaagcgtggaagcagcatgtgactgaagccttccagttccacttctaaccttggagctcactggtccctgcctctggggcttttctgaagaaacccacccactgtgatcaatagggagagaaaatccacattcttgggctgaacgcgggcctctgacactgcttacactgcactctgaccctgtagtacagcaataaccgtctaataaagagcctacccccaacaa

SEQ ID NO: 332866 - DNA, 1326 bp, Homo sapiens
  misc_feature (1189)..(1189): n is a, c, g, or t
tgatagtcgaattccttcaacgtctagcacagtgccttcaaatttacccactcaaaaaaaaatttcgtaaggaattaataaatgaatccttaggaggaaaagtgaaaatgaagtttttctctcaggatgaggtgtatttctccgttcatttcagatatgcatcagctagtcagcgtaaattgtgctttttatatgctcaccaggtgtaggtaagagctttggctgagatggagaaattcatcgcgggaggataataaagcgggcagggatttggcaacctcagagccgcgaggaggaggcggagtcgcggagagtttgagtatttccgtccaatcaaaaggagactgtaggaggaggaggaggaggagatgactggggagcgggagctcgagaatactgcccagttactctagcgcgccaggccgaaccgcagcttcttggcttaggtacttctactcacagcggccgattccgaggccaactccagcaatggcttttgcaaatctgcggaaagtgctcatcagtgacagcctggacccttgctgccggaagatcttgcaagatggagggctgcaggtggtggaaaagcagaaccttagcaaagaggagctgatagcggagctgcaggactgtgaaggccttattgttcgctctgccaccaaggtgaccgctgatgtcatcaacgcagctgagaaactccaggtggtgggcagggctggcacaggtgtggacaatgtggatctggaggccgcaacaaggaagggcatcttggttatgaacacccccaatgggaacagcctcagtgccgcagaactcacttgtggaatgatcatgtgcctggccaggcagattccccaggcgacggcttcgatgaaggacggcaaatgggagcggaagaagttcatgggaacagagctgaatggaaagaccctgggaattcttggcctgggcaggattgggagagaggtagctacccggatgcagtcctttgggatgaagactatagggtatgaccccatcatttccccagaggtctcggcctcctttggtgttcagcagctgcccctggaggagatctggcctctctgtgatttcatcactgtgcacactcctctcctgccctccacgacaggctgctgatgaaaactttggccgtgcaaagggggcggttgtgacggccctggggtcntggaaggcgccgggcgggcctgattggccctttccgggtcgctgggttgtcggaaaccccgggcggctgttgccgaatttctgtgccccgttggcccggggcaccgggggagtgttcgacgtgggagccccggggca

SEQ ID NO: 332867 - DNA, 1256 bp, Homo sapiens
tgatagtcgaattccttcaacgtctagcacagtgccttcaaatttacccactcaaaaaaaaatttcgtaaggaattaataaatgaatccttaggaggaaaagtgaaaatgaagtttttctctcaggatgaggtgtatttctccgttcatttcagatatgcatcagctagtcagcgtaaattgtgctttttatatgctcaccaggtgtaggtaagagctttggctgagatggagaaattcatcgcgggaggataataaagcgggcagggatttggcaacctcagagccgcgaggaggaggcggagtcgcggagagtttgagtatttccgtccaatcaaaaggagactgtaggaggaggaggaggaggagatgactggggagcgggagctcgagaatactgcccagttactctagcgcgccaggccgaaccgcagcttcttggcttaggtacttctactcacagcggccgattccgaggccaactccagcaatggcttttgcaaatctgcggaaagtgctcatcagtgacagcctggacccttgctgccggaagatcttgcaagatggagggctgcaggtggtggaaaagcagaaccttagcaaagaggagctgatagcggagctgcaggactgtgaaggccttattgttcgctctgccaccaaggtgaccgctgatgtcatcaacgcagctgagaaactccaggtggtgggcagggctggcacaggtgtggacaatgtggatctggaggccgcaacaaggaagggcatcttggttatgaacacccccaatgggaacagcctcagtgccgcagaactcacttgtggaatgatcatgtgcctggccaggcagattccccaggcgacggcttcgatgaaggacggcaaatgggagcggaagaagttcatgggaacagagctgaatggaaagaccctgggaattcttggcctgggcaggattgggagagaggtagctacccggatgcagtcctttgggatgaaggcttccttctccgtggcaccactacacatcaatattcctggcaatattcttcatcatggagacttcggcagcgacttcaaccagatgaaaagccccacctcattcctgaatgattgaggtgctagaacatgctctttgtaaacccctgaaacatggcttggatcattccgtctcccacctcagcccctccggagctgcctggacctcatcattccggagagtctaagtggcctcttctcgtgctcagctgcttacct

SEQ ID NO: 332868 - DNA, 291 bp, Homo sapiens
ctggatgtctcaggagaaaaatacgagggctgcttcacccaccagtgttgacagcataaggtctcagtgatggctcctgggggagggatccaggacaccaacccactatcactgtggccctgtgagccagcactgtgggcctgtttgatgttaagaaaccagagagaggaggggatagccgggcacagtggctcacgcctgtaatcccagcactttcggaggccgaggtgggtggatcacttgaggtcaggagtttgagaccatcctggccaacatggcaaaaccccgtct

SEQ ID NO: 332869 - DNA, 246 bp, Homo sapiens
tgaggagagtttgccagaagttcatctccagtttagtcatctctggacccaaccactgggctgagcttctttctggaacttcttgaaacaacaagaactcaaggcgcaacagttacaaaagtgagttttctttttctttttcttttcagacggagtcttgctctgtcgccaggctggagtgcagtgacgccatcttggctcaccgcaacccctgtcccctgggttcaagcgattgtcctgcctcag

SEQ ID NO: 332870 - DNA, 474 bp, Homo sapiens
cctaattcatctggcatcactggggccaaaagctacaaagtccattttgagctctaactttgcagagtcatttccatcctcctgccttccccatcctgacaagtgcacatgcacacacacattgccagacacccagcagacacagaatcaatgcttttgcgtgagtgaaacagcccctctggcagccctcttcacctgcccagtccccagtgcccagcacccagtgctgagctggtgaagatcccgtggccagaggcacacttaccatatacatcatgactcagatcccatttgctgacttggaactgaagcctcttgccccaccaagcaattactggagaacaggaagtctcaacggaaaatgaggtcagcctggtggctgagaggaaaagggtcagcgagcacagccttctgcccccgtgggtccccacagcggccagcccagggccctgcatgcagcagatgcccaccaca

SEQ ID NO: 332871 - DNA, 510 bp, Homo sapiens
aataggcatttattctcacagttctggagactgggaagtccaagatcaaggcactggcaggcttggtgtctgtgaaggccttttttccacttccaagatggtgccttattgctgcatcctctggaggggaggaatgctgtgtcctcattaggcagaagggcagaggaggcaataagggacaaactccctctatcgagcccttttttgaaagtatttaatcccattcatgaaggaagactcctcatgactcaatcacctcctaaaggccacacctcttaatactgttggattggggattaagttcctgcacgaattttggaggggacaaaaaccattcaaaccatatcagaggccaatgttgtagcctggatgagagattgaagtggcttggattaagatgacagtaagtgaatatcatagtaaatgtagacaaaaaggtagagatttgaagtatattttggaggtagacttgaaaagacttgatagattcaatatatggaggctgagggt

SEQ ID NO: 332872 - DNA, 345 bp, Homo sapiens
gccccaagattcacatgaattaggagctacacaaaggaagtaggcccaggaataaccacacctaccacggatctcccgaggcagccgagcaaatgatgaggaaccacccctgggcatcctgaaggacaaccccaagggctcaaagcagcatctcatccacagcactcccctaaccccaccaatctgtggacccagtggatggttagtgggaactctggcgaggccaacgcaaggaatgggagcatcacaccagaccatccagtgaggtgaggaccttgactgggaattcctctcatctatgcttggcagagtggcccaagctcccaatctgtcaggtgactggaa

SEQ ID NO: 332873 - DNA, 462 bp, Homo sapiens
ttatgtggccacatctttcttagtttttttattacctgtaatctggctataataatgctaaatattgaagtataagtatatttattacagtaacagctattgtgtgttgactgcttgctatggacaaagcagtaagacagcactttccatacattatcttttagaatcttcttgctaatccctgaaaataataattaaagtgcagaaagtccaataaattacccaaggtcatgtttctactgactgaaggagctgtggttgaaaactaggtttatcagacccccaaatcagtgcttagagcagctgtgctcactaccttcacacacagaaacacacacacatacacagacacacacacacagacacacacacacactaagcaaaactactgaacactctttgccatcattctgctgctatttagacttaaaacaaaaatctaattaagaacaagcaggagaa

SEQ ID NO: 332874 - DNA, 581 bp, Homo sapiens
agttctggagatgggttacacaccaatgtaaatgtacttaacagtactgaattgtacacttaaaaatggttaagatggtaaaaaaacaaaaacaaaacaaccaacacccaaaatctagagcaataatgttctagaaggattatgagcacattacagaaaaatgaggaaaagtctccatcaagcgggaaccactaccgagagcatgacttttctgccaagaaaggaggtcttttctggacctccaacccacagttcactgtggttcctagtcattttgtttttgccagtggcctatcttttgcttctgttccctctctcccagaacctaaaatattatgaatttgccgattgtttttaggaggtgcttaataattatttgtagatggctgattaatggaagggacagtggttaaatacgtagctgtggagactcagatctaatacaggtctgggtttcacaatttacttgctcaccacaagctacatgacttctctgagcctcatttttctcatacctaaattaaagagagaatagtaactacttcctagagttactgtgagagttaaacaagctagttctt

SEQ ID NO: 332875 - DNA, 225 bp, Homo sapiens
gctggtctcgaacttctggactcaagtgattctcccacattggcctcccgaaatggtgggattataggcacgagccactgaacctggcatgtactactttttaagtgtttctgggttgtgagattatagatgaattttgttttattcttcacactcatatgttgtttactaggcttttaactatgtgtatatatatatattgcctttgtcatgagagacactttt

SEQ ID NO: 332876 - DNA, 411 bp, Homo sapiens
gtcccacactccaggccttgctccctgtcctgaacagaagtccatgagctcatacttccctgtacctgcccatggtgtgatggttacctccgtggggcagtaaccaagatgggagctgctgaggaactggtttgaagcctccagccttccctcctgcctccctaaccctctagaaaaacctgctggagctacacacaccgtgtggataactcctagcacccaccagtcccagaccttgggtttcaggctgctgttcctatcaggctcacttcaggccctgccccatgccccactcccagcctggcagaggctagggtgtcagtttcgtggagctccagcttcagtttcatgtccccgtcaccagcctcttcatgaccttgcccttcaatggattgacacccctcaggcctt

SEQ ID NO: 332877 - DNA, 898 bp, Homo sapiens
  misc_feature (831)..(831): n is a, c, g, or t
  misc_feature (855)..(855): n is a, c, g, or t
  misc_feature (867)..(867): n is a, c, g, or t
  misc_feature (898)..(898): n is a, c, g, or t
cgtggcgggttgtggtaggtcgtggtctgaggccggtacagctgcgcgtctgcgggaataggtgcagcgggcccttggcgggggactctgagggaggagctggggacggcgaccctaggagagttctttggggtgactttcaagatggactctactctaacagcaagtgaaatccggcagcgatttatagatttcttcaagaggaacgagcatacgtatgttcactcgtctgccaccatcccattggatgaccccactttgctctttgccaatgcaggcatgaaccagtttaaacccattttcctgaacacaattgacccatctcaccccatggcaaagctgagcagagctgccaatacccagaagtgcatccgggctgggggcaaacataatgacctggacgatgtgggcaaggatgtctatcatcacaccttcttcgagatgctgggctcttggtcttttggagattactttaaggaattggcatgtaagatggctctggaactcctcacccaagagtttggcattcccattgaaagactttatgttacttactttggcggggatgaagcagctggcttagaagcagatctggaatgcaaacagatctggcaaaatttggggctggatgacaccaaaatcctcccaggcaacatgaaggataacttctgggagatgggtgacacgggcccctgtggtccttgcagtgagatccactacgaccggattggtggtcgggacgccgcacatcttgtcaaccaggacgaccctaatgtgctggagatctggaaccttgtgttcatccagtataacagggaaactgatgggaantcctgaaaacctccttcccaaagnaaaagcattggncacaaggggaatgggggcctgggaaacaaan

SEQ ID NO: 332878 - DNA, 396 bp, Homo sapiens
ggccactccccctgccccagtgtcctacccctgagtggcagaagaaacctgccaccacacaagatctcctagctttcctatgtttagtcttttaaaatatatgtgaatcaggccggacgcagtgctcacgcctgtaatcccagcactttgggaggccgaggcgggtggatcactaggtcaagagttcgagaccagcctgaccaacatactgaaaccctgtctctactaaaaatacaaaaattagctgggtgtagtggcgcgcgtctgtaatcccagctacttgggaggctggggcaggagaatcacttgaacctgggaggcagaggttgcagtgagccgagatcgcaccactgcgttccagcttgggtgacggggcgagactccgtctccaaaaaa

SEQ ID NO: 332879 - DNA, 3487 bp, Homo sapiens
cgtggcgggttgtggtaggtcgtggtctgaggccggtacagctgcgcgtctgcgggaataggtgcagcgggcccttggcgggggactctgagggaggagctggggacggcgaccctaggagagttctttggggtgactttcaagatggactctactctaacagcaagtgaaatccggcagcgatttatagatttcttcaagaggaacgagcatacgtatgttcactcgtctgccaccatcccattggatgaccccactttgctctttgccaatgcaggcatgaaccagtttaaacccattttcctgaacacaattgacccatctcaccccatggcaaagctgagcagagctgccaatacccagaagtgcatccgggctgggggcaaacataatgacctggacgatgtgggcaaggatgtctatcatcacaccttcttcgagatgctgggctcttggtcttttggagattactttaaggaattggcatgtaagatggctctggaactcctcacccaagagtttggcattcccattgaaagactttatgttacttactttggcggggatgaagcagctggcttagaagcagatctggaatgcaaacagatctggcaaaatttggggctggatgacaccaaaatcctcccaggcaacatgaaggataacttctgggagatgggtgacacgggcccctgtggtccttgcagtgagatccactacgaccggattggtggtcgggacgccgcacatcttgtcaaccaggacgaccctaatgtgctggagatctggaaccttgtgttcatccagtataacagggaagctgatggcattctgaaacctcttcccaagaaaagcattgacacagggatgggcctggaacgactggtatctgtgctgcagaataagatgtccaactatgacactgacctttttgtcccttactttgaagccattcagaagggcacaggtgcccgaccatacactgggaaagttggtgctgaggatgccgatgggattgacatggcctaccgggtgctggctgaccatgctcggaccatcactgtggcactggctgatggtggccggcctgacaacacagggcgtggatatgtgttgagacggattctccgccgagctgtccgatacgcccatgaaaagctcaatgccagcaggggcttctttgctacgttagtggatgttgtcgtccagtccctgggagatgcatttcctgagctgaagaaggacccagacatggtgaaggacatcattaatgaagaagaggtgcagtttctcaagactctcagcagagggcgtcgcatcctggacaggaaaattcagagcctgggagacagcaagaccattcccggagacactgcttggctcctctatgacacctatgggtttccagtggatctgactggactgattgctgaagagaagggcctggtggtagacatggatggctttgaagaggagaggaaactggcccagctgaaatcacagggcaagggagctggtggggaagacctcattatgctggacatttacgctatcgaagagctccgggcacggggtctggaggtcacagatgattccccaaagtacaattaccatttggactccagtggtagctatgtatttgagaacacagtggctacggtgatggctctgcgcagggagaagatgttcgtggaagaggtgtccacaggccaggagtgtggagtggtgctggacaagacctgtttctatgctgagcaaggaggccagatctatgacgaaggctacctggtgaaggtggatgacagcagtgaagataaaacagagtttacagtgaagaatgctcaggtccgaggagggtatgtgctacacattggaaccatctacggtgacctgaaagtgggggatcaggtctggctgtttattgatgagccccgacgaagacccatcatgagcaaccacacagctacgcacattctgaacttcgccctgcgctcagtgcttggggaagctgaccagaaaggctcattggttgctcctgaccgcctcagatttgactttactgccaagggagccatgtccacccaacagatcaagaaggctgaagagattgctaatgagatgattgaggcagccaaggccgtctatacccaggattgccccctggcagcagcgaaagccatccagggcctacgggctgtgtttgatgagacctatcctgaccctgtgcgagtcgtctccattggggtcccggtgtccgagttgctggatgacccctctgggcctgctggctccctgacttctgttgagttctgtgggggaacgcacctgcggaactcgagtcatgcaggagcttttgtgatcgtgacggaagaagccattgccaagggtatccggaggattgtggctgtcacaggtgccgaggcccagaaggccctcaggaaagcagagagcttgaagaaatgtctctctgtcatggaagccaaagtgaaggctcagactgctccaaacaaggatgtgcagagggagatcgctgaccttggagaggccctggccactgcagtcatcccccagtggcagaaggatgaattgcgggagactctcaaatccctaaagaaggtcatggatgacttggaccgagccagcaaagccgatgtccagaaacgagtgttagagaagacgaagcagttcatcgacagcaaccccaaccagcctcttgtcatcctggagatggagagcggcgcctcagccaaggccctgaatgaagccttgaagctcttcaagatgcactcccctcagacttctgccatgctcttcacggtggacaatgaggctggcaagatcacgtgcctgtgtcaagtcccccagaatgcagccaatcggggcttaaaagccagcgagtgggtgcagcaggtgtcaggcttgatggacggtaaaggtggtggcaaggatgtgtctgcacaggccacaggcaagaacgttggctgcctgcaggaggcgctgcagctggccacttccttcgcccagctgcgcctcggggatgtaaagaactgagtggggaaggaggaggctcccactggatccatccgtccagccaagagctcttcatctgctacaagaacatttgaatcttgggacctttaaagagcccctcctaacccagcagtaactggaacacacttgggagcagtcctatgtctcagtgccccttaaatttctgccctgagccctccacgtcagtgccatcggtctagaaccactaaccccgcattgctgttgatcgtcacgctcgcatctatagataacggctctccagacctgagctttccgcgtcagcaagtaggaatcgtttttgctgcagagaataaaaggaccacgtgcaatacttaatgccgcatgatctctatccctcttcccaataggggctggctcttttgacagcctttggcgtctgtagaataaatgctgtggctcctgctggctgctgtgg

SEQ ID NO: 332880 - DNA, 3316 bp, Homo sapiens
cgtggcgggttgtggtaggtcgtggtctgaggccggtacagctgcgcgtctgcgggaataggtgcagcgggcccttggcgggggactctgagggaggagctggggacggcgaccctaggagagttctttggggtgactttcaagatggactctactctaacagcaagtgaaatccggcagcgatttatagatttcttcaagaggaacgagcatacgtatgttcactcgtctgccaccatcccattggatgaccccactttgctctttgccaatgcaggcatgaaccagtttaaacccattttcctgaacacaattgacccatctcaccccatggcaaagctgagcagagctgccaatacccagaagtgcatccgggctgggggcaaacataatgacctggacgatgtgggcaaggatgtctatcatcacaccttcttcgagatgctgggctcttggtcttttggagattactttaaggaattggcatgtaagatggctctggaactcctcacccaagagtttggcattcccattgaaagactttatgttacttactttggcggggatgaagcagctggcttagaagcagatctggaatgcaaacagatctggcaaaatttggggctggatgacaccaaaatcctcccaggcaacatgaaggataacttctgggagatgggtgacacgggcccctgtggtccttgcagtgagatccactacgaccggattggtggtcgggacgccgcacatcttgtcaaccaggacgaccctaatgtgctggagatctggaaccttgtgttcatccagtataacagggaagctgatggcattctgaaacctcttcccaagaaaagcattgacacagggatgggcctggaacgactggtatctgtgctgcagaataagatgtccaactatgacactgacctttttgtcccttactttgaagccattcagaagggcacaggtgcccgaccatacactgggaaagttggtgctgaggatgccgatgggattgacatggcctaccgggtgctggctgaccatgctcggaccatcactgtggcactggctgatggtggccggcctgacaacacagggcgtggatatgtgttgagacggattctccgccgagctgtccgatacgcccatgaaaagctcaatgccagcaggggcttctttgctacgttagtggatgttgtcgtccagtccctgggagatgcatttcctgagctgaagaaggacccagacatggtgaaggacatcattaatgaagaagaggtgcagtttctcaagactctcagcagagggcgtcgcatcctggacaggaaaattcagagcctgggagacagcaagaccattcccggagacactgcttggctcctctatgacacctatgggtttccagtggatctgactggactgattgctgaagagaagggcctggtggtagacatggatggctttgaagaggagaggaaactggcccagctgaaatcacagggcaagggagctggtggggaagacctcattatgctggacatttacgctatcgaagagctccgggcacggggtctggaggtcacagatgattccccaaagtacaattaccatttggactccagtggtagctatgtatttgagaacacagtggctacggtgatggctctgcgcagggagaagatgttcgtggaagaggtgtccacaggccaggagtgtggagtggtgctggacaagacctgtttctatgctgagcaaggaggccagatctatgacgaaggctacctggtgaaggtggatgacagcagtgaagataaaacagagtttacagtgaagaatgctcaggtccgaggagggtatgtgctacacattggaaccatctacggtgacctgaaagtgggggatcaggtctggctgtttattgatgagccccgacgaagacccatcatgagcaaccacacagctacgcacattctgaacttcgccctgcgctcagtgcttggggaagctgaccagaaaggctcattggttgctcctgaccgcctcagatttgactttactgccaagggagccatgtccacccaacagatcaagaaggctgaagagattgctaatgagatgattgaggcagccaaggccgtctatacccaggattgccccctggcagcagcgaaagccatccagggcctacgggctgtgtttgatgagacctatcctgaccctgtgcgagtcgtctccattggggtcccggtgtccgagttgctggatgacccctctgggcctgctggctccctgacttctgttgagttctgtgggggaacgcacctgcggaactcgagtcatgcaggagcttttgtgatcgtgacggaagaagccattgccaagggtatccggaggattgtggctgtcacaggtgccgaggcccagaaggccctcaggaaagcagagagcttgaagaaatgtctctctgtcatggaagccaaagtgaaggctcagactgctccaaacaaggatgtgcagagggagatcgctgaccttggagaggccctggccactgcagtcatcccccagtggcagaaggatgaattgcgggagactctcaaatccctaaagaaggtcatggatgacttggaccgagccagcaaagccgatgtccagaaacgagtgttagagaagacgaagcagttcatcgacagcaaccccaaccagcctcttgtcatcctggagatggagagcggcgcctcagccaaggccctgaatgaagccttgaagctcttcaagatgcactcccctcagacttctgccatgctcttcacggtggacaatgaggctggcaagatcacgtgcctgtgtcaagtcccccaggtggtggcaaggatgtgtctgcacaggccacaggcaagaacgttggctgcctgcaggaggcgctgcagctggccacttccttcgcccagctgcgcctcggggatgtaaagaactgagtggggaaggaggaggctcccactggatccatccgtccagccaagagctcttcatctgctacaagaacatttgaatcttgggacctttaaagagcccctcctaacccagcagtaactggaacacacttgggagcagtcctatgtctcagtgccccttaaatttctgccctgagccctccacgtcagtgccatcggtctagaaccactaaccccgcattgctgttgatcgtcacgctcgcatctatagataacggctctccagacctgagctttccgcgtcagcaagtaggaatcgtttttgctgcagagaataaaaggaccacgtgcaatactta

SEQ ID NO: 332881 - DNA, 3003 bp, Homo sapiens
cgtggcgggttgtggtaggtcgtggtctgaggccggtacagctgcgcgtctgcgggaataggtgcagcgggcccttggcgggggactctgagggaggagctggggacggcgaccctaggagagttctttggggtgactttcaagatggactctactctaacagcaagtgaaatccggcagcgatttatagatttcttcaagaggaacgagcatacgtatgttcactcgtctgccaccatcccattggatgaccccactttgctctttgccaatgcaggcatgaaccagtttaaacccattttcctgaacacaattgacccatctcaccccatggcaaagctgagcagagctgccaatacccagaagtgcatccgggctgggggcaaacataatgacctggacgatgtgggcaaggatgtctatcatcacaccttcttcgagatgctgggctcttggtcttttggagattactttaaggaattggcatgtaagatggctctggaactcctcacccaagagtttggcattcccattgaaagactttatgttacttactttggcggggatgaagcagctggcttagaagcagatctggaatgcaaacagatctggcaaaatttggggctggatgacaccaaaatcctcccaggcaacatgaaggataacttctgggagatgggtgacacgggcccctgtggtccttgcagtgagatccactacgaccggattggtggtcgggacgccgcacatcttgtcaaccaggacgaccctaatgtgctggagatctggaaccttgtgttcatccagtataacagggaagctgatggcattctgaaacctcttcccaagaaaagcattgacacagggatgggcctggaacgactggtatctgtgctgcagaataagatgtccaactatgacactgacctttttgtcccttactttgaagccattcagaagggcacaggtgcccgaccatacactgggaaagttggtgctgaggatgccgatgggattgacatggcctaccgggtgctggctgaccatgctcggaccatcactgtggcactggctgatggtggccggcctgacaacacagggcgtggatatgtgttgagacggattctccgccgagctgtccgatacgcccatgaaaagctcaatgccagcaggggcttctttgctacgttagtggatgttgtcgtccagtccctgggagatgcatttcctgagctgaagaaggacccagacatggtgaaggacatcattaatgaagaagaggtgcagtttctcaagactctcagcagagggcgtcgcatcctggacaggaaaattcagagcctgggagacagcaagaccattcccggagacactgcttggctcctctatgacacctatgggtttccagtggatctgactggactgattgctgaagagaagggcctggtggtagacatggatggctttgaagaggagaggaaactggcccagctgaaatcacagggcaagggagctggtggggaagacctcattatgctggacatttacgctatcgaagagctccgggcacggggtctggaggtcacagatgattccccaaagtacaattaccatttggactccagtggtagctatgtatttgagaacacagtggctacggtgatggctctgcgcagggagaagatgttcgtggaagaggtgtccacaggccaggagtgtggagtggtgctggacaagacctgtttctatgctgagcaaggaggccagatctatgacgaaggctacctggtgaaggtggatgacagcagtgaagataaaacagagtttacagtgaagaatgctcaggtccgaggagggtatgtgctacacattggaaccatctacggtgacctgaaagtgggggatcaggtctggctgtttattgatgagccccgacgaagacccatcatgagcaaccacacagctacgcacattctgaacttcgccctgcgctcagtgcttggggaagctgaccagaaaggctcattggttgctcctgaccgcctcagatttgactttactgccaagggagccatgtccacccaacagatcaagaaggctgaagagattgctaatgagatgattgaggcagccaaggccgtctatacccaggattgccccctggcagcagcgaaagccatccagggcctacgggctgtgtttgatgagacctatcctgaccctgtgcgagtcgtctccattggggtcccggtgtccgagttgctggatgacccctctgggcctgctggctccctgacttctgttgagttctgtgggggaacgcacctgcggaactcgagtcatgcaggagcttttgtgatcgtgacggaagaagccattgccaagggtatccggaggattgtggctgtcacaggtgccgaggcccagaaggccctcaggaaagcagagagcttgaagaaatgtctctctgtcatggaagccaaagtgaaggctcagactgctccaaacaaggatgtgcagagggagatcgctgaccttggagaggccctggccactgcagtcatcccccagtggcagaaggatgaattgcgggagactctcaaatccctaaagaaggtcactggccacttccttcgcccagctgcgcctcggggatgtaaagaactgagtggggaaggaggaggctcccactggatccatccgtccagccaagagctcttcatctgctacaagaacatttgaatcttgggacctttaaagagcccctcctaacccagcagtaactggaacacacttgggagcagtcctatgtctcagtgccccttaaatttctgccctgagccctccacgtcagtgccatcggtctagaaccactaaccccgcattgctgttgatcgtcacgctcgcatctatagataacggctctccagacctgagctttccgcgtcagcaagtaggaatcgtttttgctgcagagaataaaaggaccacgtgcaatactta

SEQ ID NO: 332882 - DNA, 3006 bp, Homo sapiens
cgtggcgggttgtggtaggtcgtggtctgaggccggtacagctgcgcgtctgcgggaataggtgcagcgggcccttggcgggggactctgagggaggagctggggacggcgaccctaggagagttctttggggtgactttcaagatggactctactctaacagcaagtgaaatccggcagcgatttatagatttcttcaagaggaacgagcatacgtatgttcactcgtctgccaccatcccattggatgaccccactttgctctttgccaatgcaggcatgaaccagtttaaacccattttcctgaacacaattgacccatctcaccccatggcaaagctgagcagagctgccaatacccagaagtgcatccgggctgggggcaaacataatgacctggacgatgtgggcaaggatgtctatcatcacaccttcttcgagatgctgggctcttggtcttttggagattactttaaggaattggcatgtaagatggctctggaactcctcacccaagagtttggcattcccattgaaagactttatgttacttactttggcggggatgaagcagctggcttagaagcagatctggaatgcaaacagatctggcaaaatttggggctggatgacaccaaaatcctcccaggcaacatgaaggataacttctgggagatgggtgacacgggcccctgtggtccttgcagtgagatccactacgaccggattggtggtcgggacgccgcacatcttgtcaaccaggacgaccctaatgtgctggagatctggaaccttgtgttcatccagtataacagggaagctgatggcattctgaaacctcttcccaagaaaagcattgacacagggatgggcctggaacgactggtatctgtgctgcagaataagatgtccaactatgacactgacctttttgtcccttactttgaagccattcagaagggcacaggtgcccgaccatacactgggaaagttggtgctgaggatgccgatgggattgacatggcctaccgggtgctggctgaccatgctcggaccatcactgtggcactggctgatggtggccggcctgacaacacagggcgtggatatgtgttgagacggattctccgccgagctgtccgatacgcccatgaaaagctcaatgccagcaggggcttctttgctacgttagtggatgttgtcgtccagtccctgggagatgcatttcctgagctgaagaaggacccagacatggtgaaggacatcattaatgaagaagaggtgcagtttctcaagactctcagcagagggcgtcgcatcctggacaggaaaattcagagcctgggagacagcaagaccattcccggagacactgcttggctcctctatgacacctatgggtttccagtggatctgactggactgattgctgaagagaagggcctggtggtagacatggatggctttgaagaggagaggaaactggcccagctgaaatcacagggcaagggagctggtggggaagacctcattatgctggacatttacgctatcgaagagctccgggcacggggtctggaggtcacagatgattccccaaagtacaattaccatttggactccagtggtagctatgtatttgagaacacagtggctacggtgatggctctgcgcagggagaagatgttcgtggaagaggtgtccacaggccaggagtgtggagtggtgctggacaagacctgtttctatgctgagcaaggaggccagatctatgacgaaggctacctggtgaaggtggatgacagcagtgaagataaaacagagtttacagtgaagaatgctcaggtccgaggagggtatgtgctacacattggaaccatctacggtgacctgaaagtgggggatcaggtctggctgtttattgatgagccccgacgaagacccatcatgagcaaccacacagctacgcacattctgaacttcgccctgcgctcagtgcttggggaagctgaccagaaaggctcattggttgctcctgaccgcctcagatttgactttactgccaagggagccatgtccacccaacagatcaagaaggctgaagagattgctaatgagatgattgaggcagccaaggccgtctatacccaggattgccccctggcagcagcgaaagccatccagggcctacgggctgtgtttgatgagacctatcctgaccctgtgcgagtcgtctccattggggtcccggtgtccgagttgctggatgacccctctgggcctgctggctccctgacttctgttgagttctgtgggggaacgtgagtactgcagaggggcagagtagacaggtcatctaccttcatcctctgaggatgtaggtcttaggctggaccaactcttgtctgtctaaggttgaagtgaagtcctcagaaatgccgttgctaaatagcgttcccaagaatctcagcatcctagcatgctcattagatccctgtatctgaaggtaacatttcctgacgaaacattcccaggaggaaaagggggaaaacattgtattcacattaccacacagttgcttgctgttgtttgctgggctgaaactagcaagaaggcttgtgtgaatttgggattcagcaaggcctggagtgcttgttgagctcttgatgtgggcctagcccttcccattcctggtatctcacctaatttcctttgacagcttgggcggcatctggggaatgtagctccattgtctcagagcccccgagcaggccacgtggttgactcagctcagtttggcttgggatagccacttctgccaatttggattcctctgtatctctctgggcctttttgggaaggtcatggtggcctggaaagtttctgcttccaaatgaagccttgtgaaaagaattgtggttttttttgtttgtttttttgaatgagccgagatcgcaccactgcgttccagcttgggtgacggggcgagactccgtctccaaaaaa

SEQ ID NO: 332883 - DNA, 2118 bp, Homo sapiens
cgtggcgggttgtggtaggtcgtggtctgaggccggtacagctgcgcgtctgcgggaataggtgcagcgggcccttggcgggggactctgagggaggagctggggacggcgaccctaggagagttctttggggtgactttcaagatggactctactctaacagcaagtgaaatccggcagcgatttatagatttcttcaagaggaacgagcatacgtatgttcactcgtctgccaccatcccattggatgaccccactttgctctttgccaatgcaggcatgaaccagtttaaacccattttcctgaacacaattgacccatctcaccccatggcaaagctgagcagagctgccaatacccagaagtgcatccgggctgggggcaaacataatgacctggacgatgtgggcaaggatgttcgtggaagaggtgtccacaggccaggagtgtggagtggtgctggacaagacctgtttctatgctgagcaaggaggccagatctatgacgaaggctacctggtgaaggtggatgacagcagtgaagataaaacagagtttacagtgaagaatgctcaggtccgaggagggtatgtgctacacattggaaccatctacggtgacctgaaagtgggggatcaggtctggctgtttattgatgagccccgacgaagacccatcatgagcaaccacacagctacgcacattctgaacttcgccctgcgctcagtgcttggggaagctgaccagaaaggctcattggttgctcctgaccgcctcagatttgactttactgccaagggagccatgtccacccaacagatcaagaaggctgaagagattgctaatgagatgattgaggcagccaaggccgtctatacccaggattgccccctggcagcagcgaaagccatccagggcctacgggctgtgtttgatgagacctatcctgaccctgtgcgagtcgtctccattggggtcccggtgtccgagttgctggatgacccctctgggcctgctggctccctgacttctgttgagttctgtgggggaacgcacctgcggaactcgagtcatgcaggagcttttgtgatcgtgacggaagaagccattgccaagggtatccggaggattgtggctgtcacaggtgccgaggcccagaaggccctcaggaaagcagagagcttgaagaaatgtctctctgtcatggaagccaaagtgaaggctcagactgctccaaacaaggatgtgcagagggagatcgctgaccttggagaggccctggccactgcagtcatcccccagtggcagaaggatgaattgcgggagactctcaaatccctaaagaaggtcatggatgacttggaccgagccagcaaagccgatgtccagaaacgagtgttagagaagacgaagcagttcatcgacagcaaccccaaccagcctcttgtcatcctggagatggagagcggcgcctcagccaaggccctgaatgaagccttgaagctcttcaagatgcactcccctcagacttctgccatgctcttcacggtggacaatgaggctggcaagatcacgtgcctgtgtcaagtcccccagaatgcagccaatcggggcttaaaagccagcgagtgggtgcagcaggtgtcaggcttgatggacggtaaaggtggtggcaaggatgtgtctgcacaggccacaggcaagaacgttggctgcctgcaggaggcgctgcagctggccacttccttcgcccagctgcgcctcggggatgtaaagaactgagtggggaaggaggaggctcccactggatccatccgtccagccaagagctcttcatctgctacaagaacatttgaatcttgggacctttaaagagcccctcctaacccagcagtaactggaacacacttgggagcagtcctatgtctcagtgccccttaaatttctgccctgagccctccacgtcagtgccatcggtctagaaccactaaccccgcattgctgttgatcgtcacgctcgcatctatagataacggctctccagacctgagctttccgcgtcagcaagtaggaatcgtttttgctgcagagaataaaaggaccacgtgcaatactta

SEQ ID NO: 332884 - DNA, 1895 bp, Homo sapiens
cgtggcgggttgtggtaggtcgtggtctgaggccggtacagctgcgcgtctgcgggaataggtgcagcgggcccttggcgggggactctgagggaggagctggggacggcgaccctaggagagttctttggggtgactttcaagatggactctactctaacagcaagtgaaatccggcagcgatttatagatttcttcaagaggaacgagcatacgtatgttcactcgtctgccaccatcccattggatgaccccactttgctctttgccaatgcaggcatgaaccagtttaaacccattttcctgaacacaattgacccatctcaccccatggcaaagctgagcagagctgccaatacccagaagtgcatccgggctgggggcaaacataatgacctggacgatgtgggcaaggatgtctatcatcacaccttcttcgagatgctgggctcttggtcttttggagattactttaaggaattggcatgtaagatggctctggaactcctcacccaagagtttggcattcccattgaaagactttatgttacttactttggcggggatgaagcagctggcttagaagcagatctggaatgcaaacagatctggcaaaatttggggctggatgacaccaaaatcctcccaggcaacatgaaggataacttctgggagatgggtgacacgggcccctgtggtccttgcagtgagatccactacgaccggattggtggtcgggacgccgcacatcttgtcaaccaggacgaccctaatgtgctggagatctggaaccttgtgttcatccagtataacagggaagctgatggcattctgaaacctcttcccaagaaaagcattgacacagggatgggcctggaacgactggtatctgtgctgcagaataagatgtccaactatgacactgacctttttgtcccttactttgaagccattcagaagggcacaggtgcccgaccatacactgggaaagttggtgctgaggatgccgatgggattgacatggcctaccgggtgctggctgaccatgctcggaccatcactgtggcactggctgatggtggccggcctgacaacacagggcgtggatatgtgttgagacggattctccgccgagctgtccgatacgcccatgaaaagctcaatgccagcaggggcttctttgctacgttagtggatgttgtcgtccagtccctgggagatgcatttcctgagctgaagaaggacccagacatggtgaaggacatcattaatgaagaagaggtgcagtttctcaagactctcagcagagggcgtcgcatcctggacaggaaaattcagagcctgggagacagcaagaccattcccggagacactgcttggctcctctatgacacctatgggtttccagtggatctgactggactgattgctgaagagaagggcctggtggtagacatggatggctttgaagaggagaggaaactggcccagctgaaatcacagggcaagggagctggtggggaagacctcattatgctggacatttacgctatcgaagagctccgggcacggggtctggaggtcacagatgattccccaaagtacaattaccatttggactccagtggtagctatgtatttgagaacacagtggctacggtgatggctctgcgcagggagaagatgttcgtggaagaggtgtccacaggccaggagtgtggagtggtgctggacaagacctgtttctatgctgagcaaggaggccagatctatgacgaaggctacctggtgaaggtggatgacagcagtgaagattctccagacctgagctttccgcgtcagcaagtaggaatcgtttttgctgcagagaataaaaggaccacgtgcaatactta

SEQ ID NO: 332885 - DNA, 1996 bp, Homo sapiens
cgtggcgggttgtggtaggtcgtggtctgaggccggtacagctgcgcgtctgcgggaataggtgcagcgggcccttggcgggggactctgagggaggagctggggacggcgaccctaggagagttctttggggtgactttcaagatggactctactctaacagcaagtgaaatccggcagcgatttatagatttcttcaagaggaacgagcatacgtatgttcactcgtctgccaccatcccattggatgaccccactttgctctttgccaatgcaggcatgaaccagtttaaacccattttcctgaacacaattgacccatctcaccccatggcaaagctgagcagagctgccaatacccagaagtgcatccgggctgggggcaaacataatgacctggacgatgtgggcaaggatgtctatcatcacaccttcttcgagatgctgggctcttggtcttttggagattactttaaggaattggcatgtaagatggctctggaactcctcacccaagagtttggcattcccattgaaagactttatgttacttactttggcggggatgaagcagctggcttagaagcagatctggaatgcaaacagatctggcaaaatttggggctggatgacaccaaaatcctcccaggcaacatgaaggataacttctgggagatgggtgacacgggcccctgtggtccttgcagtgagatccactacgaccggattggtggtcgggacgccgcacatcttgtcaaccaggacgaccctaatgtgctggagatctggaaccttgtgttcatccagtataacagggaagctgatggcattctgaaacctcttcccaagaaaagcattgacacagggatgggcctggaacgactggtatctgtgctgcagaataagatgtccaactatgacactgacctttttgtcccttactttgaagccattcagaagggcacaggtgcccgaccatacactgggaaagttggtgctgaggatgccgatgggattgacatggcctaccgggtgctggctgaccatgctcggaccatcactgtggcactggctgatggtggccggcctgacaacacagggcgtggatatgtgttgagacggattctccgccgagctgtccgatacgcccatgaaaagctcaatgccagcaggggcttctttgctacgttagtggatgttgtcgtccagtccctgggagatgcatttcctgagctgaagaaggacccagacatggtgaaggacatcattaatgaagaagaggtgcagtttctcaagactctcagcagagggcgtcgcatcctggacaggaaaattcagagcctgggagacagcaagaccattcccggagacactgcttggctcctctatgacacctatgggtttccagtggatctgactggactgattgctgaagagaagggcctggtggtagacatggatggctttgaagaggagaggaaactggcccagctgaaatcacagggcaagggagctggtggggaagacctcattatgctggacatttacgctatcgaagagctccgggcacggggtctggaggtcacagatgattccccaaagtacaattaccatttggactccagtggtagctatgtatttgagaacacagtggctacggtgatggctctgcgcagggagaagatgttcgtggaagaggtgtccacaggccaggagtgtggagtggtgctggacaagacctgtttctatgctgagcaaggaggccagatctatgacgaaggctacctggtgaaggtggatgacagcagtgaagattctccagacctgagctttccgcgtcagcaagtaggaatcgtttttgctgcagagaataaaaggaccacgtgcaatacttaatgccgcatgatctctatccctcttcccaataggggctggctcttttgacagcctttggcgtctgtagaataaatgctgtggctcctgctggctgctgtgg

SEQ ID NO: 332886 - DNA, 1545 bp, Homo sapiens
ggtggaggggagagggagaggcatttgtcccaccccaccttgggagaaccagagctgttctagttaagtctgttcacatatgagatttggtccacagtttaacaaaatagttggaaattcccatactgatgcccttgactttgcacgtggcgtgtgattgaggaagctcatggcacgtgctaggccaagccaggttggaacccgagtcctgcctgcaggaccatgctttcctgcctcgtcgtaccgcacctccagggatctcttccagctcttttctgtcttcttggtctggcaggccgtctatacccaggattgccccctggcagcagcgaaagccatccagggcctacgggctgtgtttgatgagacctatcctgaccctgtgcgagtcgtctccattggggtcccggtgtccgagttgctggatgacccctctgggcctgctggctccctgacttctgttgagttctgtgggggaacgcacctgcggaactcgagtcatgcaggagcttttgtgatcgtgacggaagaagccattgccaagggtatccggaggattgtggctgtcacaggtgccgaggcccagaaggccctcaggaaagcagagagcttgaagaaatgtctctctgtcatggaagccaaagtgaaggctcagactgctccaaacaaggatgtgcagagggagatcgctgaccttggagaggccctggccactgcagtcatcccccagtggcagaaggatgaattgcgggagactctcaaatccctaaagaaggtcatggatgacttggaccgagccagcaaagccgatgtccagaaacgagtgttagagaagacgaagcagttcatcgacagcaaccccaaccagcctcttgtcatcctggagatggagagcggcgcctcagccaaggccctgaatgaagccttgaagctcttcaagatgcactcccctcagacttctgccatgctcttcacggtggacaatgaggctggcaagatcacgtgcctgtgtcaagtcccccagaatgcagccaatcggggcttaaaagccagcgagtgggtgcagcaggtgtcaggcttgatggacggtaaaggtggtggcaaggatgtgtctgcacaggccacaggcaagaacgttggctgcctgcaggaggcgctgcagctggccacttccttcgcccagctgcgcctcggggatgtaaagaactgagtggggaaggaggaggctcccactggatccatccgtccagccaagagctcttcatctgctacaagaacatttgaatcttgggacctttaaagagcccctcctaacccagcagtaactggaacacacttgggagcagtcctatgtctcagtgccccttaaatttctgccctgagccctccacgtcagtgccatcggtctagaaccactaaccccgcattgctgttgatcgtcacgctcgcatctatagataacggctctccagacctgagctttccgcgtcagcaagtaggaatcgtttttgctgcagagaataaaaggaccacgtgcaatactta

SEQ ID NO: 332887 - DNA, 904 bp, Homo sapiens
cctaggctagtacgaggctgggttgtgcaaggatgtgcagagggagatgctgacttggagaggccctggccactgcagtcatcccccagtggcagaaggatgaattgcgggagactctcaaatccctaaagaaggtcatggatgacttggaccgagccagcaaagccgatgtccagaaacgagtgttagagaagacgaagcagttcatcgacagcaaccccaaccagcctcttgtcatcctggagatggagagcggcgcctcagccaaggccctgaatgaagccttgaagctcttcaagatgcactcccctcagacttctgccatgctcttcacggtggacaatgaggctggcaagatcacgtgcctgtgtcaagtcccccagaatgcagccaatcggggcttaaaagccagcgagtgggtgcagcaggtgtcaggcttgatggacggtaaaggtggtggcaaggatgtgtctgcacaggccacaggcaagaacgttggctgcctgcaggaggcgctgcagctggccacttccttcgcccagctgcgcctcggggatgtaaagaactgagtggggaaggaggaggctcccactggatccatccgtccagccaagagctcttcatctgctacaagaacatttgaatcttgggacctttaaagagcccctcctaacccagcagtaactggaacacacttgggagcagtcctatgtctcagtgccccttaaatttctgccctgagccctccacgtcagtgccatcggtctagaaccactaaccccgcattgctgttgatcgtcacgctcgcatctatagataacggctctccagacctgagctttccgcgtcagcaagtaggaatcgtttttgctgcagagaataaaaggaccacgtgcaatactta

SEQ ID NO: 332888 - DNA, 1005 bp, Homo sapiens
cctaggctagtacgaggctgggttgtgcaaggatgtgcagagggagatgctgacttggagaggccctggccactgcagtcatcccccagtggcagaaggatgaattgcgggagactctcaaatccctaaagaaggtcatggatgacttggaccgagccagcaaagccgatgtccagaaacgagtgttagagaagacgaagcagttcatcgacagcaaccccaaccagcctcttgtcatcctggagatggagagcggcgcctcagccaaggccctgaatgaagccttgaagctcttcaagatgcactcccctcagacttctgccatgctcttcacggtggacaatgaggctggcaagatcacgtgcctgtgtcaagtcccccagaatgcagccaatcggggcttaaaagccagcgagtgggtgcagcaggtgtcaggcttgatggacggtaaaggtggtggcaaggatgtgtctgcacaggccacaggcaagaacgttggctgcctgcaggaggcgctgcagctggccacttccttcgcccagctgcgcctcggggatgtaaagaactgagtggggaaggaggaggctcccactggatccatccgtccagccaagagctcttcatctgctacaagaacatttgaatcttgggacctttaaagagcccctcctaacccagcagtaactggaacacacttgggagcagtcctatgtctcagtgccccttaaatttctgccctgagccctccacgtcagtgccatcggtctagaaccactaaccccgcattgctgttgatcgtcacgctcgcatctatagataacggctctccagacctgagctttccgcgtcagcaagtaggaatcgtttttgctgcagagaataaaaggaccacgtgcaatacttaatgccgcatgatctctatccctcttcccaataggggctggctcttttgacagcctttggcgtctgtagaataaatgctgtggctcctgctggctgctgtgg

SEQ ID NO: 332889 - DNA, 722 bp, Homo sapiens
gtggcaggccttctgagggctgcaaatgctcacactagtgagggtccctgctccagcaccgtggcctgagccaggtcctccccacaggccctgaatgaagccttgaagctcttcaagatgcactcccctcagacttctgccatgctcttcacggtggacaatgaggctggcaagatcacgtgcctgtgtcaagtcccccagaatgcagccaatcggggcttaaaagccagcgagtgggtgcagcaggtgtcaggcttgatggacggtaaaggtggtggcaaggatgtgtctgcacaggccacaggcaagaacgttggctgcctgcaggaggcgctgcagctggccacttccttcgcccagctgcgcctcggggatgtaaagaactgagtggggaaggaggaggctcccactggatccatccgtccagccaagagctcttcatctgctacaagaacatttgaatcttgggacctttaaagagcccctcctaacccagcagtaactggaacacacttgggagcagtcctatgtctcagtgccccttaaatttctgccctgagccctccacgtcagtgccatcggtctagaaccactaaccccgcattgctgttgatcgtcacgctcgcatctatagataacggctctccagacctgagctttccgcgtcagcaagtaggaatcgtttttgctgcagagaataaaaggaccacgtgcaatactta

SEQ ID NO: 332890 - DNA, 193 bp, Homo sapiens
tgcagcgggcccttggcgggggactctgagggaggagctggggacggcgaccctaggagaggtaggccgccctcggagagctctgcggtgctaggagagcggctgggcccgcagactggggggaaagctccgcagccgcagtgggccccaggatcaggccccgcgtggcctggagaagcccagtctgggctgg

SEQ ID NO: 332891 - DNA, 383 bp, Homo sapiens
gccatagggaagctgggaaatgtaacctttattctgcacagccatatttccaactaaaaattgtagcactcgggggagcagataacgaggagataactagcagtctattacagacctctccatgagcccctctgccctttccagccccgacgaagacccatcatgagcaaccacacagctacgcacattctgaacttcgccctgcgctcagtgcttggggaagctgaccagaaaggctcattggttgctcctgaccgcctcagatttgactttactgccaagggagccatgtccacccaacagatcaagaaggctgaagagattgctaatgagatgattgaggcagccaaggtaggatgggcgacggctgaatgccccccctc

SEQ ID NO: 332892 - DNA, 406 bp, Homo sapiens
ctggttgatacctggctttgccactctgtcctgtcctggcagtggccatggccgccccctgtaccagccgtaaagtctgtctcggcctccagcagtatcacccagggcaaggagtgggtgatggctcctccatcctttctttccctgcattcctccctcaatcccatcttctgtgctgactcccccttcccttcctgtcttctagaatgcagccaatcggggcttaaaagccagcgagtgggtgcagcaggtgtcaggcttgatggacggtaaaggtggtggcaaggatgtgtctgcacaggccacaggcaagaacgttggctgcctgcaggaggcgctgcagctggccacttccttcgcccagctgcgcctcggggatgtaaagaactgagtggggaaggaggag

SEQ ID NO: 332893 - DNA, 3386 bp, Homo sapiens
cgtggcgggttgtggtaggtcgtggtctgaggccggtacagctgcgcgtctgcgggaataggtgcagcgggcccttggcgggggactctgagggaggagctggggacggcgaccctaggagagttctttggggtgactttcaagatggactctactctaacagcaagtgaaatccggcagcgatttatagatttcttcaagaggaacgagcatacgtatgttcactcgtctgccaccatcccattggatgaccccactttgctctttgccaatgcaggcatgaaccagtttaaacccattttcctgaacacaattgacccatctcaccccatggcaaagctgagcagagctgccaatacccagaagtgcatccgggctgggggcaaacataatgacctggacgatgtgggcaaggatgtctatcatcacaccttcttcgagatgctgggctcttggtcttttggagattactttaaggaattggcatgtaagatggctctggaactcctcacccaagagtttggcattcccattgaaagactttatgttacttactttggcggggatgaagcagctggcttagaagcagatctggaatgcaaacagatctggcaaaatttggggctggatgacaccaaaatcctcccaggcaacatgaaggataacttctgggagatgggtgacacgggcccctgtggtccttgcagtgagatccactacgaccggattggtggtcgggacgccgcacatcttgtcaaccaggacgaccctaatgtgctggagatctggaaccttgtgttcatccagtataacagggaagctgatggcattctgaaacctcttcccaagaaaagcattgacacagggatgggcctggaacgactggtatctgtgctgcagaataagatgtccaactatgacactgacctttttgtcccttactttgaagccattcagaagggcacaggtgcccgaccatacactgggaaagttggtgctgaggatgccgatgggattgacatggcctaccgggtgctggctgaccatgctcggaccatcactgtggcactggctgatggtggccggcctgacaacacagggcgtggatatgtgttgagacggattctccgccgagctgtccgatacgcccatgaaaagctcaatgccagcaggggcttctttgctacgttagtggatgttgtcgtccagtccctgggagatgcatttcctgagctgaagaaggacccagacatggtgaaggacatcattaatgaagaagaggtgcagtttctcaagactctcagcagagggcgtcgcatcctggacaggaaaattcagagcctgggagacagcaagaccattcccggagacactgcttggctcctctatgacacctatgggtttccagtggatctgactggactgattgctgaagagaagggcctggtggtagacatggatggctttgaagaggagaggaaactggcccagctgaaatcacagggcaagggagctggtggggaagacctcattatgctggacatttacgctatcgaagagctccgggcacggggtctggaggtcacagatgattccccaaagtacaattaccatttggactccagtggtagctatgtatttgagaacacagtggctacggtgatggctctgcgcagggagaagatgttcgtggaagaggtgtccacaggccaggagtgtggagtggtgctggacaagacctgtttctatgctgagcaaggaggccagatctatgacgaaggctacctggtgaaggtggatgacagcagtgaagataaaacagagtttacagtgaagaatgctcaggtccgaggagggtatgtgctacacattggaaccatctacggtgacctgaaagtgggggatcaggtctggctgtttattgatgagccccgacgaagacccatcatgagcaaccacacagctacgcacattctgaacttcgccctgcgctcagtgcttggggaagctgaccagaaaggctcattggttgctcctgaccgcctcagatttgactttactgccaagggagccatgtccacccaacagatcaagaaggctgaagagattgctaatgagatgattgaggcagccaaggccgtctatacccaggattgccccctggcagcagcgaaagccatccagggcctacgggctgtgtttgatgagacctatcctgaccctgtgcgagtcgtctccattggggtcccggtgtccgagttgctggatgacccctctgggcctgctggctccctgacttctgttgagttctgtgggggaacgcacctgcggaactcgagtcatgcaggagcttttgtgatcgtgacggaagaagccattgccaagggtatccggaggattgtggctgtcacaggtgccgaggcccagaaggccctcaggaaagcagagagcttgaagaaatgtctctctgtcatggaagccaaagtgaaggctcagactgctccaaacaaggatgtgcagagggagatcgctgaccttggagaggccctggccactgcagtcatcccccagtggcagaaggatgaattgcgggagactctcaaatccctaaagaaggtcatggatgacttggaccgagccagcaaagccgatgtccagaaacgagtgttagagaagacgaagcagttcatcgacagcaaccccaaccagcctcttgtcatcctggagatggagagcggcgcctcagccaaggccctgaatgaagccttgaagctcttcaagatgcactcccctcagacttctgccatgctcttcacggtggacaatgaggctggcaagatcacgtgcctgtgtcaagtcccccagaatgcagccaatcggggcttaaaagccagcgagtgggtgcagcaggtgtcaggcttgatggacggtaaaggtggtggcaaggatgtgtctgcacaggccacaggcaagaacgttggctgcctgcaggaggcgctgcagctggccacttccttcgcccagctgcgcctcggggatgtaaagaactgagtggggaaggaggaggctcccactggatccatccgtccagccaagagctcttcatctgctacaagaacatttgaatcttgggacctttaaagagcccctcctaacccagcagtaactggaacacacttgggagcagtcctatgtctcagtgccccttaaatttctgccctgagccctccacgtcagtgccatcggtctagaaccactaaccccgcattgctgttgatcgtcacgctcgcatctatagataacggctctccagacctgagctttccgcgtcagcaagtaggaatcgtttttgctgcagagaataaaaggaccacgtgcaatactta

SEQ ID NO: 332894 - DNA, 419 bp, Homo sapiens
tccacggttggctagtgtggtagacccagaaacttctggggacgtcagtcatagttactaatatttggaggcagtgggagatgctggccccaaggttgaggtatcagttagagcagaacaattggacctagagctggtttttcctttgggtttaggtgtaagtgaactattatcattggagtggagaactggagagaaagggttgtcactgtccagcactacacagcgccctggccactgcagtcatcccccagtggcagaaggatgaattgcgggagactctcaaatccctaaagaaggtcatggatgacttggaccgagccagcaaagccgatgtccagaaacgagtgttagagaagacgaagcagttcatcgacagcaaccccaaccagccaaccgtggacaagtggtaccgagct

SEQ ID NO: 332895 - DNA, 3049 bp, Homo sapiens
cgtggcgggttgtggtaggtcgtggtctgaggccggtacagctgcgcgtctgcgggaataggtgcagcgggcccttggcgggggactctgagggaggagctggggacggcgaccctaggagagttctttggggtgactttcaagatggactctactctaacagcaagtgaaatccggcagcgatttatagatttcttcaagaggaacgagcatacgtatgttcactcgtctgccaccatcccattggatgaccccactttgctctttgccaatgcaggcatgaaccagtttaaacccattttcctgaacacaattgacccatctcaccccatggcaaagctgagcagagctgccaatacccagaagtgcatccgggctgggggcaaacataatgacctggacgatgtgggcaaggatgtctatcatcacaccttcttcgagatgctgggctcttggtcttttggagattactttaaggaattggcatgtaagatggctctggaactcctcacccaagagtttggcattcccattgaaagactttatgttacttactttggcggggatgaagcagctggcttagaagcagatctggaatgcaaacagatctggcaaaatttggggctggatgacaccaaaatcctcccaggcaacatgaaggataacttctgggagatgggtgacacgggcccctgtggtccttgcagtgagatccactacgaccggattggtggtcgggacgccgcacatcttgtcaaccaggacgaccctaatgtgctggagatctggaaccttgtgttcatccagtataacagggaagctgatggcattctgaaacctcttcccaagaaaagcattgacacagggatgggcctggaacgactggtatctgtgctgcagaataagatgtccaactatgacactgacctttttgtcccttactttgaagccattcagaagggcacaggtgcccgaccatacactgggaaagttggtgctgaggatgccgatgggattgacatggcctaccgggtgctggctgaccatgctcggaccatcactgtggcactggctgatggtggccggcctgacaacacagggcgtggatatgtgttgagacggattctccgccgagctgtccgatacgcccatgaaaagctcaatgccagcaggggcttctttgctacgttagtggatgttgtcgtccagtccctgggagatgcatttcctgagctgaagaaggacccagacatggtgaaggacatcattaatgaagaagaggtgcagtttctcaagactctcagcagagggcgtcgcatcctggacaggaaaattcagagcctgggagacagcaagaccattcccggagacactgcttggctcctctatgacacctatgggtttccagtggatctgactggactgattgctgaagagaagggcctggtggtagacatggatggctttgaagaggagaggaaactggcccagctgaaatcacagggcaagggagctggtggggaagacctcattatgctggacatttacgctatcgaagagctccgggcacggggtctggaggtcacagatgattccccaaagtacaattaccatttggactccagtggtagctatgtatttgagaacacagtggctacggtgatggctctgcgcagggagaagatgttcgtggaagaggtgtccacaggccaggagtgtggagtggtgctggacaagacctgtttctatgctgagcaaggaggccagatctatgacgaaggctacctggtgaaggtggatgacagcagtgaagataaaacagagtttacagtgaagaatgctcaggtccgaggagggtatgtgctacacattggaaccatctacggtgacctgaaagtgggggatcaggtctggctgtttattgatgagccccgacgaagacccatcatgagcaaccacacagctacgcacattctgaacttcgccctgcgctcagtgcttggggaagctgaccagaaaggctcattggttgctcctgaccgcctcagatttgactttactgccaagggagccatgtccacccaacagatcaagaaggctgaagagattgctaatgagatgattgaggcagccaaggccgtctatacccaggattgccccctggcagcagcgaaagccatccagggcctacgggctgtgtttgatgagacctatcctgaccctgtgcgagtcgtctccattggggtcccggtgtccgagttgctggatgacccctctgggcctgctggctccctgacttctgttgagttctgtgggggaacgcacctgcggaactcgagtcatgcaggagcttttgtgatcgtgacggaagaagccattgccaagggtatccggaggattgtggctgtcacaggtgccgaggcccagaaggccctcaggaaagcagagagcttgaagaaatgtctctctgtcatggaagccaaagtgaaggctcagactgctccaaacaaggatgtgcagagggagatcgctgaccttggagaggccctggccactgcagtcatcccccagtggcagaaggatgaattgcgggagactctcaaatccctaaagaaggtcatggatgacttggaccgagccagcaaagccgatgtccagaaacgagtgttagagaagacgaagcagttcatcgacagcaaccccaaccagcctcttgtcatcctggagatggagagcggcgcctcagccaaggccctgaatgaagccttgaagctcttcaagatgcactcccctcagacttctgccatgctcttcacggtggacaatgaggctggcaagatcacgtgcctgtgtcaagtcccccagaatgcagccaatcggggcttaaaagccagcgagtgggtgcagcaggtgtcaggcttgatggacggtaaaggtggtggcaaggatgtgtctgcacaggcttcagtgcctgaccaggcttcaatgcctgaccaggcttcagtgcctgaccaggcttcagtgcctgaccaggcttcagtgcctgacc

SEQ ID NO: 332896 - DNA, 2885 bp, Homo sapiens
cgtggcgggttgtggtaggtcgtggtctgaggccggtacagctgcgcgtctgcgggaataggtgcagcgggcccttggcgggggactctgagggaggagctggggacggcgaccctaggagagttctttggggtgactttcaagatggactctactctaacagcaagtgaaatccggcagcgatttatagatttcttcaagaggaacgagcatacgtatgttcactcgtctgccaccatcccattggatgaccccactttgctctttgccaatgcaggcatgaaccagtttaaacccattttcctgaacacaattgacccatctcaccccatggcaaagctgagcagagctgccaatacccagaagtgcatccgggctgggggcaaacataatgacctggacgatgtgggcaaggatgtctatcatcacaccttcttcgagatgctgggctcttggtcttttggagattactttaaggaattggcatgtaagatggctctggaactcctcacccaagagtttggcattcccattgaaagactttatgttacttactttggcggggatgaagcagctggcttagaagcagatctggaatgcaaacagatctggcaaaatttggggctggatgacaccaaaatcctcccaggcaacatgaaggataacttctgggagatgggtgacacgggcccctgtggtccttgcagtgagatccactacgaccggattggtggtcgggacgccgcacatcttgtcaaccaggacgaccctaatgtgctggagatctggaaccttgtgttcatccagtataacagggaagctgatggcattctgaaacctcttcccaagaaaagcattgacacagggatgggcctggaacgactggtatctgtgctgcagaataagatgtccaactatgacactgacctttttgtcccttactttgaagccattcagaagggcacaggtgcccgaccatacactgggaaagttggtgctgaggatgccgatgggattgacatggcctaccgggtgctggctgaccatgctcggaccatcactgtggcactggctgatggtggccggcctgacaacacagggcgtggatatgtgttgagacggattctccgccgagctgtccgatacgcccatgaaaagctcaatgccagcaggggcttctttgctacgttagtggatgttgtcgtccagtccctgggagatgcatttcctgagctgaagaaggacccagacatggtgaaggacatcattaatgaagaagaggtgcagtttctcaagactctcagcagagggcgtcgcatcctggacaggaaaattcagagcctgggagacagcaagaccattcccggagacactgcttggctcctctatgacacctatgggtttccagtggatctgactggactgattgctgaagagaagggcctggtggtagacatggatggctttgaagaggagaggaaactggcccagctgaaatcacagggcaagggagctggtggggaagacctcattatgctggacatttacgctatcgaagagctccgggcacggggtctggaggtcacagatgattccccaaagtacaattaccatttggactccagtggtagctatgtatttgagaacacagtggctacggtgatggctctgcgcagggagaagatgttcgtggaagaggtgtccacaggccaggagtgtggagtggtgctggacaagacctgtttctatgctgagcaaggaggccagatctatgacgaaggctacctggtgaaggtggatgacagcagtgaagataaaacagagtttacagtgaagaatgctcaggtccgaggagggtatgtgctacacattggaaccatctacggtgacctgaaagtgggggatcaggtctggctgtttattgatgagccccgacgaagacccatcatgagcaaccacacagctacgcacattctgaacttcgccctgcgctcagtgcttggggaagctgaccagaaaggctcattggttgctcctgaccgcctcagatttgactttactgccaagggagccatgtccacccaacagatcaagaaggctgaagagattgctaatgagatgattgaggcagccaaggccgtctatacccaggattgccccctggcagcagcgaaagccatccagggcctacgggctgtgtttgatgagacctatcctgaccctgtgcgagtcgtctccattggggtcccggtgtccgagttgctggatgacccctctgggcctgctggctccctgacttctgttgagttctgtgggggaacgcacctgcggaactcgagtcatgcaggagcttttgtgatcgtgacggaagaagccattgccaagggtatccggaggattgtggctgtcacaggtgccgaggcccagaaggccctcaggaaagcagagagcttgaagaaatgtctctctgtcatggaagccaaagtgaaggctcagactgctccaaacaaggatgtgcagagggagatcgctgaccttggagaggccctggccactgcagtcatcccccagtggcagaaggatgaattgcgggagactctcaaatccctaaagaaggtcatggatgacttggaccgagccagcaaagccgatgtccagaaacgagtgttagagaagacgaagcagttcatcgacagcaaccccaaccagcctcttgtcatcctggagatggagagcggcgcctcagccaaggcaacccaggggccagggtcccctcccctagggctcatcagctctctggtggctgacatgtggcctctgtggctctgagcgaagtggttgcctaagggcccacggtctgggattgagattgggaggagcagcag

SEQ ID NO: 332897 - DNA, 2533 bp, Homo sapiens
cgtggcgggttgtggtaggtcgtggtctgaggccggtacagctgcgcgtctgcgggaataggtgcagcgggcccttggcgggggactctgagggaggagctggggacggcgaccctaggagagttctttggggtgactttcaagatggactctactctaacagcaagtgaaatccggcagcgatttatagatttcttcaagaggaacgagcatacgtatgttcactcgtctgccaccatcccattggatgaccccactttgctctttgccaatgcaggcatgaaccagtttaaacccattttcctgaacacaattgacccatctcaccccatggcaaagctgagcagagctgccaatacccagaagtgcatccgggctgggggcaaacataatgacctggacgatgtgggcaaggatgtctatcatcacaccttcttcgagatgctgggctcttggtcttttggagattactttaaggaattggcatgtaagatggctctggaactcctcacccaagagtttggcattcccattgaaagactttatgttacttactttggcggggatgaagcagctggcttagaagcagatctggaatgcaaacagatctggcaaaatttggggctggatgacaccaaaatcctcccaggcaacatgaaggataacttctgggagatgggtgacacgggcccctgtggtccttgcagtgagatccactacgaccggattggtggtcgggacgccgcacatcttgtcaaccaggacgaccctaatgtgctggagatctggaaccttgtgttcatccagtataacagggaagctgatggcattctgaaacctcttcccaagaaaagcattgacacagggatgggcctggaacgactggtatctgtgctgcagaataagatgtccaactatgacactgacctttttgtcccttactttgaagccattcagaagggcacaggtgcccgaccatacactgggaaagttggtgctgaggatgccgatgggattgacatggcctaccgggtgctggctgaccatgctcggaccatcactgtggcactggctgatggtggccggcctgacaacacagggcgtggatatgtgttgagacggattctccgccgagctgtccgatacgcccatgaaaagctcaatgccagcaggggcttctttgctacgttagtggatgttgtcgtccagtccctgggagatgcatttcctgagctgaagaaggacccagacatggtgaaggacatcattaatgaagaagaggtgcagtttctcaagactctcagcagagggcgtcgcatcctggacaggaaaattcagagcctgggagacagcaagaccattcccggagacactgcttggctcctctatgacacctatgggtttccagtggatctgactggactgattgctgaagagaagggcctggtggtagacatggatggctttgaagaggagaggaaactggcccagctgaaatcacagggcaagggagctggtggggaagacctcattatgctggacatttacgctatcgaagagctccgggcacggggtctggaggtcacagatgattccccaaagtacaattaccatttggactccagtggtagctatgtatttgagaacacagtggctacggtgatggctctgcgcagggagaagatgttcgtggaagaggtgtccacaggccaggagtgtggagtggtgctggacaagacctgtttctatgctgagcaaggaggccagatctatgacgaaggctacctggtgaaggtggatgacagcagtgaagataaaacagagtttacagtgaagaatgctcaggtccgaggagggtatgtgctacacattggaaccatctacggtgacctgaaagtgggggatcaggtctggctgtttattgatgagccccgacgaagacccatcatgagcaaccacacagctacgcacattctgaacttcgccctgcgctcagtgcttggggaagctgaccagaaaggctcattggttgctcctgaccgcctcagatttgactttactgccaagggagccatgtccacccaacagatcaagaaggctgaagagattgctaatgagatgattgaggcagccaaggtaggatgggcgacggctgaatgccccccctccccacaccgtcactgtctgtccacagtcttagcagtgcggtgctctcactctgttgtatcagattcgtcctgcacgtagatttgcttaaagcaggctgggcacggtagctcacgcctgtaatcccagcactttgggaggccgaggcgggcggatcacgaggtcaggagattgagaccatcctggctaaccctgtctctactaaaaatagaaaaaattagccgggcgtggtggcgggcacctgtagtcccagctactcaggaggctgaggcaggagaatggtgtgaacccgggaggtggagcttgcagtgagccgagattgcgccattgcactctagcctgggaaacagagcgagactccgtctca

SEQ ID NO: 332898 - DNA, 1759 bp, Homo sapiens
cgtggcgggttgtggtaggtcgtggtctgaggccggtacagctgcgcgtctgcgggaataggtgcagcgggcccttggcgggggactctgagggaggagctggggacggcgaccctaggagagttctttggggtgactttcaagatggactctactctaacagcaagtgaaatccggcagcgatttatagatttcttcaagaggaacgagcatacgtatgttcactcgtctgccaccatcccattggatgaccccactttgctctttgccaatgcaggcatgaaccagtttaaacccattttcctgaacacaattgacccatctcaccccatggcaaagctgagcagagctgccaatacccagaagtgcatccgggctgggggcaaacataatgacctggacgatgtgggcaaggatgtctatcatcacaccttcttcgagatgctgggctcttggtcttttggagattactttaaggaattggcatgtaagatggctctggaactcctcacccaagagtttggcattcccattgaaagactttatgttacttactttggcggggatgaagcagctggcttagaagcagatctggaatgcaaacagatctggcaaaatttggggctggatgacaccaaaatcctcccaggcaacatgaaggataacttctgggagatgggtgacacgggcccctgtggtccttgcagtgagatccactacgaccggattggtggtcgggacgccgcacatcttgtcaaccaggacgaccctaatgtgctggagatctggaaccttgtgttcatccagtataacagggaagctgatggcattctgaaacctcttcccaagaaaagcattgacacagggatgggcctggaacgactggtatctgtgctgcagaataagatgtccaactatgacactgacctttttgtcccttactttgaagccattcagaagggcacaggtgcccgaccatacactgggaaagttggtgctgaggatgccgatgggattgacatggcctaccgggtgctggctgaccatgctcggaccatcactgtggcactggctgatggtggccggcctgacaacacagggcgtggatatgtgttgagacggattctccgccgagctgtccgatacgcccatgaaaagctcaatgccagcaggggcttctttgctacgttagtggatgttgtcgtccagtccctgggagatgcatttcctgagctgaagaaggacccagacatggtgaaggacatcattaatgaagaagaggtgcagtttctcaagactctcagcagagggcgtcgcatcctggacaggaaaattcagagcctgggagacagcaagaccattcccggagacactgcttggctcctctatgacacctatgggtttccagtggatctgactggactgattgctgaagagaagggcctggtggtagacatggatggctttgaagaggagaggaaactggcccagctgaaatcacagggcaagggagctggtggggaagacctcattatgctggacatttacgctatcgaagagctccgggcacggggtctggaggtcacagatgattccccaaagtacaattaccatttggactccagtggtagctatgtatttgagaacacagtggctacggtgatggctctgcgcagggagaagattttcctgtcccggatgcgacgccctctgtctgagagtcttgagaaactgcacctcttcttcactaatgatgtcc

SEQ ID NO: 332899 - DNA, 1307 bp, Homo sapiens
cgtggcgggttgtggtaggtcgtggtctgaggccggtacagctgcgcgtctgcgggaataggtgcagcgggcccttggcgggggactctgagggaggagctggggacggcgaccctaggagagttctttggggtgactttcaagatggactctactctaacagcaagtgaaatccggcagcgatttatagatttcttcaagaggaacgagcatacgtatgttcactcgtctgccaccatcccattggatgaccccactttgctctttgccaatgcaggcatgaaccagtttaaacccattttcctgaacacaattgacccatctcaccccatggcaaagctgagcagagctgccaatacccagaagtgcatccgggctgggggcaaacataatgacctggacgatgtgggcaaggatgtctatcatcacaccttcttcgagatgctgggctcttggtcttttggagattactttaaggaattggcatgtaagatggctctggaactcctcacccaagagtttggcattcccattgaaagactttatgttacttactttggcggggatgaagcagctggcttagaagcagatctggaatgcaaacagatctggcaaaatttggggctggatgacaccaaaatcctcccaggcaacatgaaggataacttctgggagatgggtgacacgggcccctgtggtccttgcagtgagatccactacgaccggattggtggtcgggacgccgcacatcttgtcaaccaggacgaccctaatgtgctggagatctggaaccttgtgttcatccagtataacagggaagctgatggcattctgaaacctcttcccaagaaaagcattgacacagggatgggcctggaacgactggtatctgtgctgcagaataagatgtccaactatgacactgacctttttgtcccttactttgaagccattcagaagggcacaggtgcccgaccatacactgggaaagttggtgctgaggatgccgatgggattgacatggccttaaatttctgccctgagccctccacgtcagtgccatcggtctagaaccactaaccccgcattgctgttgatcgtcacgctcgcatctatagataacggctctccagacctgagctttccgcgtcagcaagtaggaatcgtttttgctgcagagaataaaaggaccacgtgcaatacttaatgccgcatgatctctatccctcttcccaataggggctggctcttttgacagcctttggcgtctgtagaataaatgctgtggctcctgctggctgctgtgg

SEQ ID NO: 332900 - DNA, 909 bp, Homo sapiens
cgttatagcaccgtggtaacagccattctcatccaaaccccctgaagcttcacccgttatagcaccggccctggccactgcagtcatcccccagtggcagaaggatgaattgcgggagactctcaaatccctaaagaaggtcatggatgacttggaccgagccagcaaagccgatgtccagaaacgagtgttagagaagacgaagcagttcatcgacagcaaccccaaccagcctcttgtcatcctggagatggagagcggcgcctcagccaaggccctgaatgaagccttgaagctcttcaagatgcactcccctcagacttctgccatgctcttcacggtggacaatgaggctggcaagatcacgtgcctgtgtcaagtcccccagaatgcagccaatcggggcttaaaagccagcgagtgggtgcagcaggtgtcaggcttgatggacggtaaaggtggtggcaaggatgtgtctgcacaggccacaggcaagaacgttggctgcctgcaggaggcgctgcagctggccacttccttcgcccagctgcgcctcggggatgtaaagaactgagtggggaaggaggaggctcccactggatccatccgtccagccaagagctcttcatctgctacaagaacatttgaatcttgggacctttaaagagcccctcctaacccagcagtaactggaacacacttgggagcagtcctatgtctcagtgccccttaaatttctgccctgagccctccacgtcagtgccatcggtctagaaccactaaccccgcattgctgttgatcgtcacgctcgcatctatagataacggctctccagacctgagctttccgcgtcagcaagtaggaatcgtttttgctgcagagaataaaaggaccacgtgcaatactta

SEQ ID NO: 332901 - DNA, 500 bp, Homo sapiens
cgtggcgggttgtggtaggtcgtggtctgaggccggtacagctgcgcgtctgcgggaataggtgcagcgggcccttggcgggggactctgagggaggagctggggacggcgaccctaggagagttctttggggtgactttcaagatggactctactctaacagcaagtgaaatccggcagcgatttatagatttcttcaagaggaacgagcatacgtatgttcactcgtctgccaccatcccattggatgaccccactttgctctttgccaatgcaggcatgaaccagtttaaacccattttcctgaacacaattgacccatctcaccccatggcaaagctgagcagagctgccaatacccagaagtgcatccgggctgggggcaaacataatgacctggacgatgtgggcaaggatgtctatcatcacaccttcttcgagatgctgggctcttggtcttttggagattactttaaggtaagttcagagcagaagaacca

SEQ ID NO: 332902 - DNA, 284 bp, Homo sapiens
aagagatgaaatgactgctccaaggtgacacaaaaaaggcacagtccattcaactagacctccccaggatcttggaaccatgttttttccttcttcccttaccatattcattcaatacattactgcatgcctacctgggccagaaacttctcagacgctacacatgcagaagggaatgaaatgaaagacaaatggatgctgcacccattgttaagctgtaacattgtaaaggaagagggtagtgagaaagacacaagtacgccatcaatgtgggtttgaggcag

SEQ ID NO: 332903 - DNA, 610 bp, Homo sapiens
aaaggtgactaactagacgtctatctatctatctatctatctatctatctatctatctatctatgtctatctgtcatgtatctatactcgattataatttgtaggattttatttgtactcagtttttaaaatttcatgttttaattgaataattgttccactgggcttggggtagggtaggcattctttttgttgtttattgctgcttccagaccagagtccctccctgcttcccaaaagctcccacatgtgaatatcgtgtcattcagactctgccacctattagctttcttggttctactcatcttctgtcccctgggtttcacttctcctggctcactctcactctccccatataatcactcctgtcctaattcttggtgatttcagtattacaaagatgatcctcccaacaccttgacacctccctcagtaatcttgttctccactctcagtaaatgaaattatttttagcttagacaagagtgatagcagtaaaagtggtatgaaacaagcatatttgggatataatttgaagacaaagctgaaagatttgatgagggattggaatgtggaggaattctagaaggggcaatgtggcttgaggatt

SEQ ID NO: 332904 - DNA, 950 bp, Homo sapiens
gccgcagtgccagccggaacttgtggttcggaccgtgggtgggggtggggccggggccgggcctggaggcgggcgggggccgggggcgggcgcctgcccctcccccgtcacttcctgccgggctgcgggcgcctgagcggctcttcagcgtttgcgccggcggctgccgcgtctctctcggctcccgcttcctttgaccgcctccccccccggcccggcggcgcccgcctcctccacggccactccgcctcttccctcccttcgtcccttcttcctctcccttttttccttcttccttcccctcctcgccgccaccgcccaggaccgccggccgggggacgagctcggagcagcagccagaaagcataacccctactgtagaactaaatgcactgtgcatgaaacttggaaaaaaaccaatgtataagcctgttgacccttactctcggatgcagtccacctataactacaacatgagaggaggtgcttatcccccgaggtacttttacccatttccagttccacctttactttatcaagtggaactttctgtgggaggacagcaatttaatggcaaaggaaagacaagacaggctgcgaaacacgatgctgctgccaaagcgttgaggatcctgcagaatgagcccctgccagagaggctggaggtgaatggaagagaatccgaagaagaaaatctcaataaatctgaaataagtcaagtgtttgagattgcacttaaacggaacttgcctgtgaatttcgaggtggcccgggagagtggcccaccccacatgaagaactttgtgaccaaggtttcggttggggagtttgtgggggaaggtgaagggaaaagcaagaagatttcaaagaaaaatgccgccatagctgttcttgaggagctgaagaagttaccgcccctgcctgcagttgaacgagtaaagcctagaatc

SEQ ID NO: 332905 - DNA, 3317 bp, Homo sapiens
gccgcagtgccagccggaacttgtggttcggaccgtgggtgggggtggggccggggccgggcctggaggcgggcgggggccgggggcgggcgcctgcccctcccccgtcacttcctgccgggctgcgggcgcctgagcggctcttcagcgtttgcgccggcggctgccgcgtctctctcggctcccgcttcctttgaccgcctccccccccggcccggcggcgcccgcctcctccacggccactccgcctcttccctcccttcgtcccttcttcctctcccttttttccttcttccttcccctcctcgccgccaccgcccaggaccgccggccgggggacgagctcggagcagcagccagagtttattaaccacttaacctctcagaactgaacaaagacaacattgttcctggaacgccctctttttaaaaaagaaagcataacccctactgtagaactaaatgcactgtgcatgaaacttggaaaaaaaccaatgtataagcctgttgacccttactctcggatgcagtccacctataactacaacatgagaggaggtgcttatcccccgaggtacttttacccatttccagttccacctttactttatcaagtggaactttctgtgggaggacagcaatttaatggcaaaggaaagacaagacaggctgcgaaacacgatgctgctgccaaagcgttgaggatcctgcagaatgagcccctgccagagaggctggaggtgaatggaagagaatccgaagaagaaaatctcaataaatctgaaataagtcaagtgtttgagattgcacttaaacggaacttgcctgtgaatttcgaggtggcccgggagagtggcccaccccacatgaagaactttgtgaccaaggtttcggttggggagtttgtgggggaaggtgaagggaaaagcaagaagatttcaaagaaaaatgccgccatagctgttcttgaggagctgaagaagttaccgcccctgcctgcagttgaacgagtaaagcctagaatcaaaaagaaaacaaaacccatagtcaagccacagacaagcccagaatatggccaggggatcaatccgattagccgactggcccagatccagcaggcaaaaaaggagaaggagccagagtacacgctcctcacagagcgaggcctcccgcgccgcagggagtttgtgatgcaggtgaaggttggaaaccacactgcagaaggaacgggcaccaacaagaaggtggccaagcgcaatgcagccgagaacatgctggagatccttggtttcaaagtcccgcaggcgcagcccaccaaacccgcactcaagtcagaggagaagacacccataaagaaaccaggggatggaagaaaagtaaccttttttgaacctggctctggggatgaaaatgggactagtaataaagaggatgagttcaggatgccttatctaagtcatcagcagctgcctgctggaattcttcccatggtgcccgaggtcgcccaggctgtaggagttagtcaaggacatcacaccaaagattttaccagggcagctccgaatcctgccaaggccacggtaactgccatgatagcccgagagttgttgtatgggggcacctcgcccacagccgagaccattttaaagaataacatctcttcaggccacgtaccccatggacctctcacgagaccctctgagcaactggactatctttccagagtccagggattccaggttgaatacaaagacttccccaaaaacaacaagaacgaatttgtatctcttatcaattgctcctctcagccacctctgatcagccatggtatcggcaaggatgtggagtcctgccatgatatggctgcgctgaacatcttaaagttgctgtctgagttggaccaacaaagtacagagatgccaagaacaggaaacggaccaatgtctgtgtgtgggaggtgctgaaccttttctggccatgaaccattataaaatcccaacatatatactgaaaatactgaaactgctttgaaaatttggaatttctgatacctccagtgggccgagagacacggtgggtaaaggatgtgggcagcagcagggaagacaacagaaacacaaggaggcggctgtggccgggctggactgtgctggggtttgttgtgatggccactcggtgacctggcggtccctacgcaatagcagctgcctgtggggaagaagggctgcccagccagctggttctcccgggacaccagcagatccacaccctgggcacctccgtgtttggtcttttttttcccctgtgtgaaagaagaaacggcacgaccccttctcaagctggctcactcagacacattgggacaaaccctggacagccatgccagagagaggcctttgaccggccccagagctaaaagcaccagagaaaatcaaatgcttcctactcagcgtgacccaacttttctagtgtgccacggccccaccacctcctgcagtacccacaccatcaccactgctttctcttccaacagtgatctgtattcttagtttcattattttcttttgattgatatgacactatataaaattttcatttgagaatttctcaattgtatctagttaaatagcacagtttggaaacttgtctgagactgactttatcaataatctaaccgacaaagatcatatccatgtgtatgtggttagacatttttatttcattgactaacccaggacagtttcagtgatgcaaattgtgtgccctctggttcagctgaaacagtcctggactttcaaaaaccttgaataagtctcccacagttgtataaattggacaatttaggaattttaaactttagatgatcatttggttccatttttatttcatttttatttttgttaatgcaaacaggacttaaatgaactttgatctctgttttaaagattattaaaaaacattgtgtatctatacatatggctcttgaggacttagctttcactacactacaggatatgatctccatgtagtccatataaacctgcagagtgattttccagagtgctcgatactgttaattacatctccattagggctgaaaagaatgacctacgtttctgtatacagctgtgttgcttttgatgttgtgttactgtacacagaagtgtgtgcactgaggctctgcgtgtggtccgtatggaaagcctggtagccctgcgagttaagtactgcttccattcattgtttacgctggaatttttctccccatggaatgtaagtaaaacttaagtgtttgtcatcaataaatggtaatacta

SEQ ID NO: 332906 - DNA, 3606 bp, Homo sapiens
gccgcagtgccagccggaacttgtggttcggaccgtgggtgggggtggggccggggccgggcctggaggcgggcgggggccgggggcgggcgcctgcccctcccccgtcacttcctgccgggctgcgggcgcctgagcggctcttcagcgtttgcgccggcggctgccgcgtctctctcggctcccgcttcctttgaccgcctccccccccggcccggcggcgcccgcctcctccacggccactccgcctcttccctcccttcgtcccttcttcctctcccttttttccttcttccttcccctcctcgccgccaccgcccaggaccgccggccgggggacgagctcggagcagcagccagagtttattaaccacttaacctctcagaactgaacaaagacaacattgttcctggaacgccctctttttaaaaaaggtagaactttagacttcatagcactgaattaacctgcactgaaagctgtttacctgcatttgttcacttttgttgaaagtgaccatgtctcaagttcaagtgcaagttcagaacccatctgctgctctctcagggagccaaatactgaacaagaaccagtctcttctctcacagcctttgatgagtattccttctactactagctctctgccctctgaaaatgcaggtagacccattcaaaactctgctttaccctctgcatctattacatccaccagtgcagctgcagaaagcataacccctactgtagaactaaatgcactgtgcatgaaacttggaaaaaaaccaatgtataagcctgttgacccttactctcggatgcagtccacctataactacaacatgagaggaggtgcttatcccccgaggtacttttacccatttccagttccacctttactttatcaagtggaactttctgtgggaggacagcaatttaatggcaaaggaaagacaagacaggctgcgaaacacgatgctgctgccaaagcgttgaggatcctgcagaatgagcccctgccagagaggctggaggtgaatggaagagaatccgaagaagaaaatctcaataaatctgaaataagtcaagtgtttgagattgcacttaaacggaacttgcctgtgaatttcgaggtggcccgggagagtggcccaccccacatgaagaactttgtgaccaaggtttcggttggggagtttgtgggggaaggtgaagggaaaagcaagaagatttcaaagaaaaatgccgccatagctgttcttgaggagctgaagaagttaccgcccctgcctgcagttgaacgagtaaagcctagaatcaaaaagaaaacaaaacccatagtcaagccacagacaagcccagaatatggccaggggatcaatccgattagccgactggcccagatccagcaggcaaaaaaggagaaggagccagagtacacgctcctcacagagcgaggcctcccgcgccgcagggagtttgtgatgcaggtgaaggttggaaaccacactgcagaaggaacgggcaccaacaagaaggtggccaagcgcaatgcagccgagaacatgctggagatccttggtttcaaagtcccgcaggcgcagcccaccaaacccgcactcaagtcagaggagaagacacccataaagaaaccaggggatggaagaaaagtaaccttttttgaacctggctctggggatgaaaatgggactagtaataaagaggatgagttcaggatgccttatctaagtcatcagcagctgcctgctggaattcttcccatggtgcccgaggtcgcccaggctgtaggagttagtcaaggacatcacaccaaagattttaccagggcagctccgaatcctgccaaggccacggtaactgccatgatagcccgagagttgttgtatgggggcacctcgcccacagccgagaccattttaaagaataacatctcttcaggccacgtaccccatggacctctcacgagaccctctgagcaactggactatctttccagagtccagggattccaggttgaatacaaagacttccccaaaaacaacaagaacgaatttgtatctcttatcaattgctcctctcagccacctctgatcagccatggtatcggcaaggatgtggagtcctgccatgatatggctgcgctgaacatcttaaagttgctgtctgagttggaccaacaaagtacagagatgccaagaacaggaaacggaccaatgtctgtgtgtgggaggtgctgaaccttttctggccatgaaccattataaaatcccaacatatatactgaaaatactgaaactgctttgaaaatttggaatttctgatacctccagtgggccgagagacacggtgggtaaaggatgtgggcagcagcagggaagacaacagaaacacaaggaggcggctgtggccgggctggactgtgctggggtttgttgtgatggccactcggtgacctggcggtccctacgcaatagcagctgcctgtggggaagaagggctgcccagccagctggttctcccgggacaccagcagatccacaccctgggcacctccgtgtttggtcttttttttcccctgtgtgaaagaagaaacggcacgaccccttctcaagctggctcactcagacacattgggacaaaccctggacagccatgccagagagaggcctttgaccggccccagagctaaaagcaccagagaaaatcaaatgcttcctactcagcgtgacccaacttttctagtgtgccacggccccaccacctcctgcagtacccacaccatcaccactgctttctcttccaacagtgatctgtattcttagtttcattattttcttttgattgatatgacactatataaaattttcatttgagaatttctcaattgtatctagttaaatagcacagtttggaaacttgtctgagactgactttatcaataatctaaccgacaaagatcatatccatgtgtatgtggttagacatttttatttcattgactaacccaggacagtttcagtgatgcaaattgtgtgccctctggttcagctgaaacagtcctggactttcaaaaaccttgaataagtctcccacagttgtataaattggacaatttaggaattttaaactttagatgatcatttggttccatttttatttcatttttatttttgttaatgcaaacaggacttaaatgaactttgatctctgttttaaagattattaaaaaacattgtgtatctatacatatggctcttgaggacttagctttcactacactacaggatatgatctccatgtagtccatataaacctgcagagtgattttccagagtgctcgatactgttaattacatctccattagggctgaaaagaatgacctacgtttctgtatacagctgtgttgcttttgatgttgtgttactgtacacagaagtgtgtgcactgaggctctgcgtgtggtccgtatggaaagcctggtagccctgcgagttaagtactgcttccattcattgtttacgctggaatttttctccccatggaatgtaagtaaaacttaagtgtttgtcatcaataaatggtaatacta

SEQ ID NO: 332907 - DNA, 307 bp, Homo sapiens
  misc_feature (23)..(23): n is a, c, g, or t
  misc_feature (36)..(36): n is a, c, g, or t
gcctactactactactaaattcncggcccgtcgacnagtgattttccagagtgctcgatactgttaattacatctccattagggctgaaaagaatgacctacgtttctgtatacagctgtgttgcttttgatgttgtgttactgtacacagaagtgtgtgcactgaggctctgcgtgtggtccgtatggaaagcctggtagccctgcgagttaagtactgcttccattcattgtttacgctggaatttttctccccatggaatgtaagtaaaacttaagtgtttgtcatcaataaatggtaatacta

SEQ ID NO: 332908 - DNA, 519 bp, Homo sapiens
tgtgagtttacttagtcctgtgctttagataccatctatgaatagatgacgccaatatatgtttctctgactatgacctctctgggtaattcctggcgcctgtcaataactgcttacttgatgtccccatatgaatgtcagactggcatttcaaacttaatgtgtccctccctcattttgattttcacccccaaacctgcagccctccagcccactcatacttgctgttccctacctagcctcagctctcttttcccccttaggttgaatacaaagacttccccaaaaacaacaagaacgaatttgtatctcttatcaattgctcctctcagccacctctgatcagccatggtatcggcaaggatgtggagtcctgccatgatatggtacgtcacaccttgggtgagggattggggtgttgtgtgtttatgtggagcctgccttggttcagcttgttactagcctgaggaagatgggagaaagattgtcccatagaccttgagagcaatgaatcgtttg

SEQ ID NO: 332909 - DNA, 429 bp, Homo sapiens
catagaacgaatttagcattgttttctattgtgagatagggttacgaatcaagcttcgttgaccactagcagcttgtgaacattcagataaaaaaggagttttctaagagtgttcaagattttctggtcttttgtcagggcaatgcaaaatacactatgtgggttaatactgcttcctgcttttaacactttccctctagaagctgaaagcacattgctgtaccatatctctgaggtagtaattagtagacaagttaacctactttgaggatgaggaaatggaagcataaggaaattattgaagttgtacaaagctcagtgaatggttttaaactcaccacactggatttgtataatgcttttcttttctttctttctgaaacggagtttcgcttctagcctgggcaacacagcgagactccatctcaa

SEQ ID NO: 332910 - DNA, 3723 bp, Homo sapiens
gccgcagtgccagccggaacttgtggttcggaccgtgggtgggggtggggccggggccgggcctggaggcgggcgggggccgggggcgggcgcctgcccctcccccgtcacttcctgccgggctgcgggcgcctgagcggctcttcagcgtttgcgccggcggctgccgcgtctctctcggctcccgcttcctttgaccgcctccccccccggcccggcggcgcccgcctcctccacggccactccgcctcttccctcccttcgtcccttcttcctctcccttttttccttcttccttcccctcctcgccgccaccgcccaggaccgccggccgggggacgagctcggagcagcagccagagtttattaaccacttaacctctcagaactgaacaaagacaacattgttcctggaacgccctctttttaaaaaagaaagcataacccctactgtagaactaaatgcactgtgcatgaaacttggaaaaaaaccaatgtataagcctgttgacccttactctcggatgcagtccacctataactacaacatgagaggaggtgcttatcccccgaggtacttttacccatttccagttccacctttactttatcaagtggaactttctgtgggaggacagcaatttaatggcaaaggaaagacaagacaggctgcgaaacacgatgctgctgccaaagcgttgaggatcctgcagaatgagcccctgccagagaggctggaggtgaatggaagagaatccgaagaagaaaatctcaataaatctgaaataagtcaagtgtttgagattgcacttaaacggaacttgcctgtgaatttcgaggtggcccgggagagtggcccaccccacatgaagaactttgtgaccaaggtttcggttggggagtttgtgggggaaggtgaagggaaaagcaagaagatttcaaagaaaaatgccgccatagctgttcttgaggagctgaagaagttaccgcccctgcctgcagttgaacgagtaaagcctagaatcaaaaagaaaacaaaacccatagtcaagccacagacaagcccagaatatggccaggggatcaatccgattagccgactggcccagatccagcaggcaaaaaaggagaaggagccagagtacacgctcctcacagagcgaggcctcccgcgccgcagggagtttgtgatgcaggtgaaggttggaaaccacactgcagaaggaacgggcaccaacaagaaggtggccaagcgcaatgcagccgagaacatgctggagatccttggtttcaaagtcccgcaggcgcagcccaccaaacccgcactcaagtcagaggagaagacacccataaagaaaccaggggatggaagaaaagtaaccttttttgaacctggctctggggatgaaaatgggactagtaataaagaggatgagttcaggatgccttatctaagtcatcagcagctgcctgctggaattcttcccatggtgcccgaggtcgcccaggctgtaggagttagtcaaggacatcacaccaaagattttaccagggcagctccgaatcctgccaaggccacggtaactgccatgatagcccgagagttgttgtatgggggcacctcgcccacagccgagaccattttaaagaataacatctcttcaggccacgtaccccatggacctctcacgagaccctctgagcaactggactatctttccagagtccagggattccaggttgaatacaaagacttccccaaaaacaacaagaacgaatttgtatctcttatcaattgctcctctcagccacctctgatcagccatggtatcggcaaggatgtggagtcctgccatgatatggctgcgctgaacatcttaaagttgctgtctgagttggaccaacaaagtacagagatgccaagaacaggaaacggaccaatgtctgtgtgtgggaggtgctgaaccttttctggccatgaaccattataaaatcccaacatatatactgaaaatactgaaactgctttgaaaatttggaatttctgatacctccagtgggccgagagacacggtgggtaaaggatgtgggcagcagcagggaagacaacagaaacacaaggaggcggctgtggccgggctggactgtgctggggtttgttgtgatggccactcggtgacctggcggtccctacgcaatagcagctgcctgtggggaagaagggctgcccagccagctggttctcccgggacaccagcagatccacaccctgggcacctccgtgtttggtcttttttttcccctgtgtgaaagaagaaacggcacgaccccttctcaagctggctcactcagacacattgggacaaaccctggacagccatgccagagagaggcctttgaccggccccagagctaaaagcaccagagaaaatcaaatgcttcctactcagcgtgacccaacttttctagtgtgccacggccccaccacctcctgcagtacccacaccatcaccactgctttctcttccaacagtgatctgtattcttagtttcattattttcttttgattgatatgacactatataaaattttcatttgagaatttctcaattgtatctagttaaatagcacagtttggaaacttgtctgagactgactttatcaataatctaaccgacaaagatcatatccatgtgtatgtggttagacatttttatttcattgactaacccaggacagtttcagtgatgcaaattgtgtgccctctggttcagctgaaacagtcctggactttcaaaaaccttgaataagtctcccacagttgtataaattggacaatttaggaattttaaactttagatgatcatttggttccatttttatttcatttttatttttgttaatgcaaacaggacttaaatgaactttgatctctgttttaaagattattaaaaaacattgtgtatctatacatatggctcttgaggacttagctttcactacactacaggatatgatctccatgtagtccatataaacctgcagagtgattttccagagtgctcgatactgttaattacatctccattagggctgaaaagaatgacctacgtttctgtatacagctgtgttgcttttgatgttgtgttactgtacacagaagtgtgtgcactgaggctctgcgtgtggtccgtatggaaagcctggtagccctgcgagttaagtactgcttccattcattgtttacgctggaatttttctccccatggaatgtaagtaaaacttaagtgtttgtcatcaataaatggtaatactaaatttttttgttaatttattctcaaatgccactactgctaggttggtcccctcccaacttgcccctatcctttttttatttttaagaaaaaactttgtaatgcttgtgattccatctgggcaaaagtctgaagatctgaaataactttatatcaaaccattgatcaataaacagctactaatgaaaaaaacaaacggcggcgcctagaagtctcctagggcccgacgatcacgaccccgcttctgtacaggtccctatgaggcgatatacacaagcccgccttacacccacggaaccagctacatatgagaaacacctgggacaatggacacccgaatgcccgcaatacagaattggacagttcggaagtgtatattcgacaagccgtaacccactagtcacgagc

SEQ ID NO: 332911 - DNA, 3505 bp, Homo sapiens
  misc_feature (3454)..(3454): n is a, c, g, or t
  misc_feature (3469)..(3469): n is a, c, g, or t
  misc_feature (3479)..(3479): n is a, c, g, or t
  misc_feature (3489)..(3489): n is a, c, g, or t
  misc_feature (3499)..(3500): n is a, c, g, or t
gccgcagtgccagccggaacttgtggttcggaccgtgggtgggggtggggccggggccgggcctggaggcgggcgggggccgggggcgggcgcctgcccctcccccgtcacttcctgccgggctgcgggcgcctgagcggctcttcagcgtttgcgccggcggctgccgcgtctctctcggctcccgcttcctttgaccgcctccccccccggcccggcggcgcccgcctcctccacggccactccgcctcttccctcccttcgtcccttcttcctctcccttttttccttcttccttcccctcctcgccgccaccgcccaggaccgccggccgggggacgagctcggagcagcagccagagtttattaaccacttaacctctcagaactgaacaaagacaacattgttcctggaacgccctctttttaaaaaagaaagcataacccctactgtagaactaaatgcactgtgcatgaaacttggaaaaaaaccaatgtataagcctgttgacccttactctcggatgcagtccacctataactacaacatgagaggaggtgcttatcccccgaggtacttttacccatttccagttccacctttactttatcaagtggaactttctgtgggaggacagcaatttaatggcaaaggaaagacaagacaggctgcgaaacacgatgctgctgccaaagcgttgaggatcctgcagaatgagcccctgccagagaggctggaggtgaatggaagagaatccgaagaagaaaatctcaataaatctgaaataagtcaagtgtttgagattgcacttaaacggaacttgcctgtgaatttcgaggtggcccgggagagtggcccaccccacatgaagaactttgtgaccaaggtttcggttggggagtttgtgggggaaggtgaagggaaaagcaagaagatttcaaagaaaaatgccgccatagctgttcttgaggagctgaagaagttaccgcccctgcctgcagttgaacgagtaaagcctagaatcaaaaagaaaacaaaacccatagtcaagccacagacaagcccagaatatggccaggggatcaatccgattagccgactggcccagatccagcaggcaaaaaaggagaaggagccagagtacacgctcctcacagagcgaggcctcccgcgccgcagggagtttgtgatgcaggtgaaggttggaaaccacactgcagaaggaacgggcaccaacaagaaggtggccaagcgcaatgcagccgagaacatgctggagatccttggtttcaaagtcccgcaggcgcagcccaccaaacccgcactcaagtcagaggagaagacacccataaagaaaccaggggatggaagaaaagtaaccttttttgaacctggctctggggatgaaaatgggactagtaataaagaggatgagttcaggatgccttatctaagtcatcagcagctgcctgctggaattcttcccatggtgcccgaggtcgcccaggctgtaggagttagtcaaggacatcacaccaaagattttaccagggcagctccgaatcctgccaaggccacggtaactgccatgatagcccgagagttgttgtatgggggcacctcgcccacagccgagaccattttaaagaataacatctcttcaggccacgtaccccatggacctctcacgagaccctctgagcaactggactatctttccagagtccagggattccaggttgaatacaaagacttccccaaaaacaacaagaacgaatttgtatctcttatcaattgctcctctcagccacctctgatcagccatggtatcggcaaggatgtggagtcctgccatgatatggctgcgctgaacatcttaaagttgctgtctgagttggaccaacaaagtacagagatgccaagaacaggaaacggaccaatgtctgtgtgtgggaggtgctgaaccttttctggccatgaaccattataaaatcccaacatatatactgaaaatactgaaactgctttgaaaatttggaatttctgatacctccagtgggccgagagacacggtgggtaaaggatgtgggcagcagcagggaagacaacagaaacacaaggaggcggctgtggccgggctggactgtgctggggtttgttgtgatggccactcggtgacctggcggtccctacgcaatagcagctgcctgtggggaagaagggctgcccagccagctggttctcccgggacaccagcagatccacaccctgggcacctccgtgtttggtcttttttttcccctgtgtgaaagaagaaacggcacgaccccttctcaagctggctcactcagacacattgggacaaaccctggacagccatgccagagagaggcctttgaccggccccagagctaaaagcaccagagaaaatcaaatgcttcctactcagcgtgacccaacttttctagtgtgccacggccccaccacctcctgcagtacccacaccatcaccactgctttctcttccaacagtgatctgtattcttagtttcattattttcttttgattgatatgacactatataaaattttcatttgagaatttctcaattgtatctagttaaatagcacagtttggaaacttgtctgagactgactttatcaataatctaaccgacaaagatcatatccatgtgtatgtggttagacatttttatttcattgactaacccaggacagtttcagtgatgcaaattgtgtgccctctggttcagctgaaacagtcctggactttcaaaaaccttgaataagtctcccacagttgtataaattggacaatttaggaattttaaactttagatgatcatttggttccatttttatttcatttttatttttgttaatgcaaacaggacttaaatgaactttgatctctgttttaaagattattaaaaaacattgtgtatctatacatatggctcttgaggacttagctttcactacactacaggatatgatctccatgtagtccatataaacctgcagagtgattttccagagtgctcgatactgttaattacatctccattagggctgaaaagaatgacctacgtttctgtatacagctgtgttgcttttgatgttgtgttactgtacacagaagtgtgtgcactgaggctctgcgtgtggtccgtatggaaagcctggtagccctgcgagttaagtactgcttccattcattgtttacgctggaatttttctccccatggaatgtaagtaaaacttaagtgtttgtcatcaataaatggtaatactaaatttttttgttaatttattctcaaatgccactactgctaggttggtcccctcccaacttgcccctatcctttttttatttttaagaaaaaactttgtaatgcttgtgattccatctgggcaaaaaggcctggaagnatccttggaaaaaanactttaaaanccaaacccanttgggccaannaacca

SEQ ID NO: 332912 - DNA, 2335 bp, Homo sapiens
ctggtctgtgttttgacttctttgtgcaggtgaaggttggaaaccacactgcagaaggaacgggcaccaacaagaaggtggccaagcgcaatgcagccgagaacatgctggagatccttggtttcaaagtcccgcaggcgcagcccaccaaacccgcactcaagtcagaggagaagacacccataaagaaaccaggggatggaagaaaagtaaccttttttgaacctggctctggggatgaaaatgggactagtaataaagaggatgagttcaggatgccttatctaagtcatcagcagctgcctgctggaattcttcccatggtgcccgaggtcgcccaggctgtaggagttagtcaaggacatcacaccaaagattttaccagggcagctccgaatcctgccaaggccacggtaactgccatgatagcccgagagttgttgtatgggggcacctcgcccacagccgagaccattttaaagaataacatctcttcaggccacgtaccccatggacctctcacgagaccctctgagcaactggactatctttccagagtccagggattccaggttgaatacaaagacttccccaaaaacaacaagaacgaatttgtatctcttatcaattgctcctctcagccacctctgatcagccatggtatcggcaaggatgtggagtcctgccatgatatggctgcgctgaacatcttaaagttgctgtctgagttggaccaacaaagtacagagatgccaagaacaggaaacggaccaatgtctgtgtgtgggaggtgctgaaccttttctggccatgaaccattataaaatcccaacatatatactgaaaatactgaaactgctttgaaaatttggaatttctgatacctccagtgggccgagagacacggtgggtaaaggatgtgggcagcagcagggaagacaacagaaacacaaggaggcggctgtggccgggctggactgtgctggggtttgttgtgatggccactcggtgacctggcggtccctacgcaatagcagctgcctgtggggaagaagggctgcccagccagctggttctcccgggacaccagcagatccacaccctgggcacctccgtgtttggtcttttttttcccctgtgtgaaagaagaaacggcacgaccccttctcaagctggctcactcagacacattgggacaaaccctggacagccatgccagagagaggcctttgaccggccccagagctaaaagcaccagagaaaatcaaatgcttcctactcagcgtgacccaacttttctagtgtgccacggccccaccacctcctgcagtacccacaccatcaccactgctttctcttccaacagtgatctgtattcttagtttcattattttcttttgattgatatgacactatataaaattttcatttgagaatttctcaattgtatctagttaaatagcacagtttggaaacttgtctgagactgactttatcaataatctaaccgacaaagatcatatccatgtgtatgtggttagacatttttatttcattgactaacccaggacagtttcagtgatgcaaattgtgtgccctctggttcagctgaaacagtcctggactttcaaaaaccttgaataagtctcccacagttgtataaattggacaatttaggaattttaaactttagatgatcatttggttccatttttatttcatttttatttttgttaatgcaaacaggacttaaatgaactttgatctctgttttaaagattattaaaaaacattgtgtatctatacatatggctcttgaggacttagctttcactacactacaggatatgatctccatgtagtccatataaacctgcagagtgattttccagagtgctcgatactgttaattacatctccattagggctgaaaagaatgacctacgtttctgtatacagctgtgttgcttttgatgttgtgttactgtacacagaagtgtgtgcactgaggctctgcgtgtggtccgtatggaaagcctggtagccctgcgagttaagtactgcttccattcattgtttacgctggaatttttctccccatggaatgtaagtaaaacttaagtgtttgtcatcaataaatggtaatactaaatttttttgttaatttattctcaaatgccactactgctaggttggtcccctcccaacttgcccctatcctttttttatttttaagaaaaaactttgtaatgcttgtgattccatctgggcaaaagtctgaagatctgaaataactttatatcaaaccattgatcaataaacagctactaatgaa

SEQ ID NO: 332913 - DNA, 3449 bp, Homo sapiens
gccgcagtgccagccggaacttgtggttcggaccgtgggtgggggtggggccggggccgggcctggaggcgggcgggggccgggggcgggcgcctgcccctcccccgtcacttcctgccgggctgcgggcgcctgagcggctcttcagcgtttgcgccggcggctgccgcgtctctctcggctcccgcttcctttgaccgcctccccccccggcccggcggcgcccgcctcctccacggccactccgcctcttccctcccttcgtcccttcttcctctcccttttttccttcttccttcccctcctcgccgccaccgcccaggaccgccggccgggggacgagctcggagcagcagccagagtttattaaccacttaacctctcagaactgaacaaagacaacattgttcctggaacgccctctttttaaaaaagaaagcataacccctactgtagaactaaatgcactgtgcatgaaacttggaaaaaaaccaatgtataagcctgttgacccttactctcggatgcagtccacctataactacaacatgagaggaggtgcttatcccccgaggtacttttacccatttccagttccacctttactttatcaagtggaactttctgtgggaggacagcaatttaatggcaaaggaaagacaagacaggctgcgaaacacgatgctgctgccaaagcgttgaggatcctgcagaatgagcccctgccagagaggctggaggtgaatggaagagaatccgaagaagaaaatctcaataaatctgaaataagtcaagtgtttgagattgcacttaaacggaacttgcctgtgaatttcgaggtggcccgggagagtggcccaccccacatgaagaactttgtgaccaaggtttcggttggggagtttgtgggggaaggtgaagggaaaagcaagaagatttcaaagaaaaatgccgccatagctgttcttgaggagctgaagaagttaccgcccctgcctgcagttgaacgagtaaagcctagaatcaaaaagaaaacaaaacccatagtcaagccacagacaagcccagaatatggccaggggatcaatccgattagccgactggcccagatccagcaggcaaaaaaggagaaggagccagagtacacgctcctcacagagcgaggcctcccgcgccgcagggagtttgtgatgcaggtgaaggttggaaaccacactgcagaaggaacgggcaccaacaagaaggtggccaagcgcaatgcagccgagaacatgctggagatccttggtttcaaagtcccgcaggcgcagcccaccaaacccgcactcaagtcagaggagaagacacccataaagaaaccaggggatggaagaaaagtaaccttttttgaacctggctctggggatgaaaatgggactagtaataaagaggatgagttcaggatgccttatctaagtcatcagcagctgcctgctggaattcttcccatggtgcccgaggtcgcccaggctgtaggagttagtcaaggacatcacaccaaagattttaccagggcagctccgaatcctgccaaggccacggtaactgccatgatagcccgagagttgttgtatgggggcacctcgcccacagccgagaccattttaaagaataacatctcttcaggccacgtaccccatggacctctcacgagaccctctgagcaactggactatctttccagagtccagggattccaggttgaatacaaagacttccccaaaaacaacaagaacgaatttgtatctcttatcaattgctcctctcagccacctctgatcagccatggtatcggcaaggatgtggagtcctgccatgatatggctgcgctgaacatcttaaagttgctgtctgagttggaccaacaaagtacagagatgccaagaacaggaaacggaccaatgtctgtgtgtgggaggtgctgaaccttttctggccatgaaccattataaaatcccaacatatatactgaaaatactgaaactgctttgaaaatttggaatttctgatacctccagtgggccgagagacacggtgggtaaaggatgtgggcagcagcagggaagacaacagaaacacaaggaggcggctgtggccgggctggactgtgctggggtttgttgtgatggccactcggtgacctggcggtccctacgcaatagcagctgcctgtggggaagaagggctgcccagccagctggttctcccgggacaccagcagatccacaccctgggcacctccgtgtttggtcttttttttcccctgtgtgaaagaagaaacggcacgaccccttctcaagctggctcactcagacacattgggacaaaccctggacagccatgccagagagaggcctttgaccggccccagagctaaaagcaccagagaaaatcaaatgcttcctactcagcgtgacccaacttttctagtgtgccacggccccaccacctcctgcagtacccacaccatcaccactgctttctcttccaacagtgatctgtattcttagtttcattattttcttttgattgatatgacactatataaaattttcatttgagaatttctcaattgtatctagttaaatagcacagtttggaaacttgtctgagactgactttatcaataatctaaccgacaaagatcatatccatgtgtatgtggttagacatttttatttcattgactaacccaggacagtttcagtgatgcaaattgtgtgccctctggttcagctgaaacagtcctggactttcaaaaaccttgaataagtctcccacagttgtataaattggacaatttaggaattttaaactttagatgatcatttggttccatttttatttcatttttatttttgttaatgcaaacaggacttaaatgaactttgatctctgttttaaagattattaatacaggatatgatctccatgtagtccatataaacctgcagagtgattttccagagtgctcgatactgttaattacatctccattagggctgaaaagaatgacctacgtttctgtatacagctgtgttgcttttgatgttgtgttactgtacacagaagtgtgtgcactgaggctctgcgtgtggtccgtatggaaagcctggtagccctgcgagttaagtactgcttccattcattgtttacgctggaatttttctccccatggaatgtaagtaaaacttaagtgtttgtcatcaataaatggtaatactaaatttttttgttaatttattctcaaatgccactactgctaggttggtcccctcccaacttgcccctatcctttttttatttttaagaaaaaactttgtaatgcttgtgattccatctgggcaaaagtctgaagatctgaaataactttatatcaaaccattgatcaataaacagctactaatgaa

SEQ ID NO: 332914 - DNA, 3320 bp, Homo sapiens
gccgcagtgccagccggaacttgtggttcggaccgtgggtgggggtggggccggggccgggcctggaggcgggcgggggccgggggcgggcgcctgcccctcccccgtcacttcctgccgggctgcgggcgcctgagcggctcttcagcgtttgcgccggcggctgccgcgtctctctcggctcccgcttcctttgaccgcctccccccccggcccggcggcgcccgcctcctccacggccactccgcctcttccctcccttcgtcccttcttcctctcccttttttccttcttccttcccctcctcgccgccaccgcccaggaccgccggccgggggacgagctcggagcagcagccagagtttattaaccacttaacctctcagaactgaacaaagacaacattgttcctggaacgccctctttttaaaaaagaaagcataacccctactgtagaactaaatgcactgtgcatgaaacttggaaaaaaaccaatgtataagcctgttgacccttactctcggatgcagtccacctataactacaacatgagaggaggtgcttatcccccgaggtacttttacccatttccagttccacctttactttatcaagtggaactttctgtgggaggacagcaatttaatggcaaaggaaagacaagacaggctgcgaaacacgatgctgctgccaaagcgttgaggatcctgcagaatgagcccctgccagagaggctggaggtgaatggaagagaatccgaagaagaaaatctcaataaatctgaaataagtcaagtgtttgagattgcacttaaacggaacttgcctgtgaatttcgaggtggcccgggagagtggcccaccccacatgaagaactttgtgaccaaggtttcggttggggagtttgtgggggaaggtgaagggaaaagcaagaagatttcaaagaaaaatgccgccatagctgttcttgaggagctgaagaagttaccgcccctgcctgcagttgaacgagtaaagcctagaatcaaaaagaaaacaaaacccatagtcaagccacagacaagcccagaatatggccaggggatcaatccgattagccgactggcccagatccagcaggcaaaaaaggagaaggagccagagtacacgctcctcacagagcgaggcctcccgcgccgcagggagtttgtgatgcaggtgaaggttggaaaccacactgcagaaggaacgggcaccaacaagaaggtggccaagcgcaatgcagccgagaacatgctggagatccttggtttcaaagtcccgcaggcgcagcccaccaaacccgcactcaagtcagaggagaagacacccataaagaaaccaggggatggaagaaaagtaaccttttttgaacctggctctggggatgaaaatgggactagtaataaagaggatgagttcaggatgccttatctaagtcatcagcagctgcctgctggaattcttcccatggtgcccgaggtcgcccaggctgtaggagttagtcaaggacatcacaccaaagattttaccagggcagctccgaatcctgccaaggccacggtaactgccatgatagcccgagagttgttgtatgggggcacctcgcccacagccgagaccattttaaagaataacatctcttcaggccacgtaccccatggacctctcacgagaccctctgagcaactggactatctttccagagtccagggattccaggttgaatacaaagacttccccaaaaacaacaagaacgaatttgtatctcttatcaattgctcctctcagccacctctgatcagccatggtatcggcaaggatgtggagtcctgccatgatatggctgcgctgaacatcttaaagttgctgtctgagttggaccaacaaagtacagagatgccaagaacaggaaacggaccaatgtctgtgtgtgggaggtgctgaaccttttctggccatgaaccattataaaatcccaacatatatactgaaaatactgaaactgctttgaaaatttggaatttctgatacctccagtgggccgagagacacggtgggtaaaggatgtgggcagcagcagggaagacaacagaaacacaaggaggcggctgtggccgggctggactgtgctggggtttgttgtgatggccactcgttgggacaaaccctggacagccatgccagagagaggcctttgaccggccccagagctaaaagcaccagagaaaatcaaatgcttcctactcagcgtgacccaacttttctagtgtgccacggccccaccacctcctgcagtacccacaccatcaccactgctttctcttccaacagtgatctgtattcttagtttcattattttcttttgattgatatgacactatataaaattttcatttgagaatttctcaattgtatctagttaaatagcacagtttggaaacttgtctgagactgactttatcaataatctaaccgacaaagatcatatccatgtgtatgtggttagacatttttatttcattgactaacccaggacagtttcagtgatgcaaattgtgtgccctctggttcagctgaaacagtcctggactttcaaaaaccttgaataagtctcccacagttgtataaattggacaatttaggaattttaaactttagatgatcatttggttccatttttatttcatttttatttttgttaatgcaaacaggacttaaatgaactttgatctctgttttaaagattattaaaaaacattgtgtatctatacatatggctcttgaggacttagctttcactacactacaggatatgatctccatgtagtccatataaacctgcagagtgattttccagagtgctcgatactgttaattacatctccattagggctgaaaagaatgacctacgtttctgtatacagctgtgttgcttttgatgttgtgttactgtacacagaagtgtgtgcactgaggctctgcgtgtggtccgtatggaaagcctggtagccctgcgagttaagtactgcttccattcattgtttacgctggaatttttctccccatggaatgtaagtaaaacttaagtgtttgtcatcaataaatggtaatactaaatttttttgttaatttattctcaaatgccactactgctaggttggtcccctcccaacttgcccctatcctttttttatttttaagaaaaaactttgtaatgcttgtgattccatctgggcaaaagtctgaagatctgaaataactttatatcaaaccattgatcaataaacagctactaatgaa

SEQ ID NO: 332915 - DNA, 1641 bp, Homo sapiens
tgtttgccaatttcttttcatttttaacagtactttaattctcttacatttcaaaactagtgtcattttcatttttcttccttaaaggtgtgggaggtgctgaaccttttctggccatgaaccattataaaatcccaacatatatactgaaaatactgaaactgctttgaaaatttggaatttctgatacctccagtgggccgagagacacggtgggtaaaggatgtgggcagcagcagggaagacaacagaaacacaaggaggcggctgtggccgggctggactgtgctggggtttgttgtgatggccactcggtgacctggcggtccctacgcaatagcagctgcctgtggggaagaagggctgcccagccagctggttctcccgggacaccagcagatccacaccctgggcacctccgtgtttggtcttttttttcccctgtgtgaaagaagaaacggcacgaccccttctcaagctggctcactcagacacattgggacaaaccctggacagccatgccagagagaggcctttgaccggccccagagctaaaagcaccagagaaaatcaaatgcttcctactcagcgtgacccaacttttctagtgtgccacggccccaccacctcctgcagtacccacaccatcaccactgctttctcttccaacagtgatctgtattcttagtttcattattttcttttgattgatatgacactatataaaattttcatttgagaatttctcaattgtatctagttaaatagcacagtttggaaacttgtctgagactgactttatcaataatctaaccgacaaagatcatatccatgtgtatgtggttagacatttttatttcattgactaacccaggacagtttcagtgatgcaaattgtgtgccctctggttcagctgaaacagtcctggactttcaaaaaccttgaataagtctcccacagttgtataaattggacaatttaggaattttaaactttagatgatcatttggttccatttttatttcatttttatttttgttaatgcaaacaggacttaaatgaactttgatctctgttttaaagattattaaaaaacattgtgtatctatacatatggctcttgaggacttagctttcactacactacaggatatgatctccatgtagtccatataaacctgcagagtgattttccagagtgctcgatactgttaattacatctccattagggctgaaaagaatgacctacgtttctgtatacagctgtgttgcttttgatgttgtgttactgtacacagaagtgtgtgcactgaggctctgcgtgtggtccgtatggaaagcctggtagccctgcgagttaagtactgcttccattcattgtttacgctggaatttttctccccatggaatgtaagtaaaacttaagtgtttgtcatcaataaatggtaatactaaatttttttgttaatttattctcaaatgccactactgctaggttggtcccctcccaacttgcccctatcctttttttatttttaagaaaaaactttgtaatgcttgtgattccatctgggcaaaagtctgaagatctgaaataactttatatcaaaccattgatcaataaacagctactaatgaa

SEQ ID NO: 332916 - DNA, 2529 bp, Homo sapiens
gccgcagtgccagccggaacttgtggttcggaccgtgggtgggggtggggccggggccgggcctggaggcgggcgggggccgggggcgggcgcctgcccctcccccgtcacttcctgccgggctgcgggcgcctgagcggctcttcagcgtttgcgccggcggctgccgcgtctctctcggctcccgcttcctttgaccgcctccccccccggcccggcggcgcccgcctcctccacggccactccgcctcttccctcccttcgtcccttcttcctctcccttttttccttcttccttcccctcctcgccgccaccgcccaggaccgccggccgggggacgagctcggagcagcagccagagtttattaaccacttaacctctcagaactgaacaaagacaacattgttcctggaacgccctctttttaaaaaagaaagcataacccctactgtagaactaaatgcactgtgcatgaaacttggaaaaaaaccaatgtataagcctgttgacccttactctcggatgcagtccacctataactacaacatgagaggaggtgcttatcccccgaggtacttttacccatttccagttccacctttactttatcaagtggaactttctgtgggaggacagcaatttaatggcaaaggaaagacaagacaggctgcgaaacacgatgctgctgccaaagcgttgaggatcctgcagaatgagcccctgccagagaggctggaggtgaatggaagagaatccgaagaagaaaatctcaataaatctgaaataagtcaagtgtttgagattgcacttaaacggaacttgcctgtgaatttcgaggtggcccgggagagtggcccaccccacatgaagaactttgtgaccaaggtttcggttggggagtttgtgggggaaggtgaagggaaaagcaagaagatttcaaagaaaaatgccgccatagctgttcttgaggagctgaagaagttaccgcccctgcctgcagttgaacgagtaaagcctagaatcaaaaagaaaacaaaacccatagtcaagccacagacaagcccagaatatggccaggggatcaatccgattagccgactggcccagatccagcaggcaaaaaaggagaaggagccagagtacacgctcctcacagagcgaggcctcccgcgccgcagggagtttgtgatgcaggtgaaggttggaaaccacactgcagaaggaacgggcaccaacaagaaggtggccaagcgcaatgcagccgagaacatgctggagatccttggtttcaaagtcccgcaggcgcagcccaccaaacccgcactcaagtcagaggagaagacacccataaagaaaccaggggatggaagaaaagtaaccttttttgaacctggctctggggatgaaaatgggactagtaataaagaggatgagttcaggatgccttatctaagtcatcagcagctgcctgctggaattcttcccatggtgcccgaggtcgcccaggctgtaggagttagtcaagccacaccatcaccactgctttctcttccaacagtgatctgtattcttagtttcattattttcttttgattgatatgacactatataaaattttcatttgagaatttctcaattgtatctagttaaatagcacagtttggaaacttgtctgagactgactttatcaataatctaaccgacaaagatcatatccatgtgtatgtggttagacatttttatttcattgactaacccaggacagtttcagtgatgcaaattgtgtgccctctggttcagctgaaacagtcctggactttcaaaaaccttgaataagtctcccacagttgtataaattggacaatttaggaattttaaactttagatgatcatttggttccatttttatttcatttttatttttgttaatgcaaacaggacttaaatgaactttgatctctgttttaaagattattaaaaaacattgtgtatctatacatatggctcttgaggacttagctttcactacactacaggatatgatctccatgtagtccatataaacctgcagagtgattttccagagtgctcgatactgttaattacatctccattagggctgaaaagaatgacctacgtttctgtatacagctgtgttgcttttgatgttgtgttactgtacacagaagtgtgtgcactgaggctctgcgtgtggtccgtatggaaagcctggtagccctgcgagttaagtactgcttccattcattgtttacgctggaatttttctccccatggaatgtaagtaaaacttaagtgtttgtcatcaataaatggtaatactaaatttttttgttaatttattctcaaatgccactactgctaggttggtcccctcccaacttgcccctatcctttttttatttttaagaaaaaactttgtaatgcttgtgattccatctgggcaaaagtctgaagatctgaaataactttatatcaaaccattgatcaataaacagctactaatgaa

SEQ ID NO: 332917 - DNA, 2433 bp, Homo sapiens
gccgcagtgccagccggaacttgtggttcggaccgtgggtgggggtggggccggggccgggcctggaggcgggcgggggccgggggcgggcgcctgcccctcccccgtcacttcctgccgggctgcgggcgcctgagcggctcttcagcgtttgcgccggcggctgccgcgtctctctcggctcccgcttcctttgaccgcctccccccccggcccggcggcgcccgcctcctccacggccactccgcctcttccctcccttcgtcccttcttcctctcccttttttccttcttccttcccctcctcgccgccaccgcccaggaccgccggccgggggacgagctcggagcagcagccagagtttattaaccacttaacctctcagaactgaacaaagacaacattgttcctggaacgccctctttttaaaaaagaaagcataacccctactgtagaactaaatgcactgtgcatgaaacttggaaaaaaaccaatgtataagcctgttgacccttactctcggatgcagtccacctataactacaacatgagaggaggtgcttatcccccgaggtacttttacccatttccagttccacctttactttatcaagtggaactttctgtgggaggacagcaatttaatggcaaaggaaagacaagacaggctgcgaaacacgatgctgctgccaaagcgttgaggatcctgcagaatgagcccctgccagagaggctggaggtgaatggaagagaatccgaagaagaaaatctcaataaatctgaaataagtcaagtgtttgagattgcacttaaacggaacttgcctgtgaatttcgaggtggcccgggagagtggcccaccccacatgaagaactttgtgaccaaggtttcggttggggagtttgtgggggaaggtgaagggaaaagcaagaagatttcaaagaaaaatgccgccatagctgttcttgaggagctgaagaagttaccgcccctgcctgcagttgaacgagtaaagcctagaatcaaaaagaaaacaaaacccatagtcaagccacagacaagcccagaatatggccaggggatcaatccgattagccgactggcccagatccagcaggcaaaaaaggagaaggagccagagtacacgctcctcacagagcgaggcctcccgcgccgcagggagtttgtgatgcaggtgaaggttggaaaccacactgcagaaggaacgggcaccaacaagaaggtggccaagcgcaatgcagccgagaacatgctggagatccttggtttcaaagtcccgcaggcgcagcccaccaaacccgcactcaagtcagaggagaagttgggacaaaccctggacagccatgccagagagaggcctttgaccggccccagagctaaaagcaccagagaaaatcaaatgcttcctactcagcgtgacccaacttttctagtgtgccacggccccaccacctcctgcagtacccacaccatcaccactgctttctcttccaacagtgatctgtattcttagtttcattattttcttttgattgatatgacactatataaattgtctgagactgactttatcaataatctaaccgacaaagatcatatccatgtgtatgtggttagacatttttatttcattgactaacccaggacagtttcagtgatgcaaattgtgtgccctctggttcagctgaaacagtcctggactttcaaaaaccttgaataagtctcccacagttgtataaattggacaatttaggaattttaaactttagatgatcatttggttccatttttatttcatttttatttttgttaatgcaaacaggacttaaatgaactttgatctctgttttaaagattattaaaaaacattgtgtatctatacatatggctcttgaggacttagctttcactacactacaggatatgatctccatgtagtccatataaacctgcagagtgattttccagagtgctcgatactgttaattacatctccattagggctgaaaagaatgacctacgtttctgtatacagctgtgttgcttttgatgttgtgttactgtacacagaagtgtgtgcactgaggctctgcgtgtggtccgtatggaaagcctggtagccctgcgagttaagtactgcttccattcattgtttacgctggaatttttctccccatggaatgtaagtaaaacttaagtgtttgtcatcaataaatggtaatactaaatttttttgttaatttattctcaaatgccactactgctaggttggtcccctcccaacttgcccctatcctttttttatttttaagaaaaaactttgtaatgcttgtgattccatctgggcaaaagtctgaagatctgaaataactttatatcaaaccattgatcaataaacagctactaatgaa

SEQ ID NO: 332918 - DNA, 1801 bp, Homo sapiens
gccgcagtgccagccggaacttgtggttcggaccgtgggtgggggtggggccggggccgggcctggaggcgggcgggggccgggggcgggcgcctgcccctcccccgtcacttcctgccgggctgcgggcgcctgagcggctcttcagcgtttgcgccggcggctgccgcgtctctctcggctcccgcttcctttgaccgcctccccccccggcccggcggcgcccgcctcctccacggccactccgcctcttccctcccttcgtcccttcttcctctcccttttttccttcttccttcccctcctcgccgccaccgcccaggaccgccggccgggggacgagctcggagcagcagccagagtttattaaccacttaacctctcagaactgaacaaagacaacattgttcctggaacgccctctttttaaaaaagaaagcataacccctactgtagaactaaatgcactgtgcatgaaacttggaaaaaaaccaatgtataagcctgttgacccttactctcggatgcagtccacctataactacaacatgagaggaggtgcttatcccccgaggtacttttacccatttccagttccacctttactttatcaagtggaactttctgtgggaggacagcaatttaatggcaaaggaaagacaagacaggctgcgaaacacgatgctgctgccaaagcgttgaggatcctgcagaatgagcccctgccagagaggctggaggtgaatggaagagaatccgaagaagaaaatctcaataaatctgaaataagtcaagtgtttgagattgcacttaaacggaacttgcctgtgaatttcgaggtggcccgggagagtggcccaccccacatgaagaactttgtgaccaaggtttcggttggggagtttgtgggggaaggtgaagggaaaagcaagaagatttcaaagaaaaatgccgccatagctgttcttgaggagctgaagaagttaccgcccctgcctgcagttgaacgagtaaagcctagaatcaaaaagaaaacaaaacccatagtcaagccacagacaagcccagaatatggccaggggatcaatccgattagccgactggcccagatccagcaggcaaaaaaggagaaggagccagagtacacgctcctcacagagcgaggcctcccgcgccgcagggagtttgtgatgcaggtgaaggttggaaaccacactgcagaaggaacgggcaccaacaagaaggtggccaagcgcaatgcagccgagaacatgctggagatccttggtttcaaagtcccgcaggcgcagcccaccaaacccgcactcaagtcagaggagaagacacccataaagaaaccaggggatggaagaaaagtaaccttttttgaacctggctctggggatgaaaatgggactagtaataaagaggatgagttcaggatgccttatctaagtcatcagcagctgcctgctggaattcttcccatggtgcccgaggtcgcccaggctgtaggagttagtcaaggacatcacaccaaagattttaccagggcagctccgaatcctgccaaggccacggtaactgccatgatagcccgagagttgttgtatgggggcacctcgcccacagccgagaccattttaaagaataacatctcttcaggccacgtaccccatggacctctcacgagaccctctgagcaactggactatctttccagagtccagggattccaggttgaaatacaaagacttcccaaaaaacaacaagaaggctaaatccaaaaaaagaaaaaaca

SEQ ID NO: 332919 - DNA, 1640 bp, Homo sapiens
gccgcagtgccagccggaacttgtggttcggaccgtgggtgggggtggggccggggccgggcctggaggcgggcgggggccgggggcgggcgcctgcccctcccccgtcacttcctgccgggctgcgggcgcctgagcggctcttcagcgtttgcgccggcggctgccgcgtctctctcggctcccgcttcctttgaccgcctccccccccggcccggcggcgcccgcctcctccacggccactccgcctcttccctcccttcgtcccttcttcctctcccttttttccttcttccttcccctcctcgccgccaccgcccaggaccgccggccgggggacgagctcggagcagcagccagagtttattaaccacttaacctctcagaactgaacaaagacaacattgttcctggaacgccctctttttaaaaaagaaagcataacccctactgtagaactaaatgcactgtgcatgaaacttggaaaaaaaccaatgtataagcctgttgacccttactctcggatgcagtccacctataactacaacatgagaggaggtgcttatcccccgaggtacttttacccatttccagttccacctttactttatcaagtggaactttctgtgggaggacagcaatttaatggcaaaggaaagacaagacaggctgcgaaacacgatgctgctgccaaagcgttgaggatcctgcagaatgagcccctgccagagaggctggaggtgaatggaagagaatccgaagaagaaaatctcaataaatctgaaataagtcaagtgtttgagattgcacttaaacggaacttgcctgtgaatttcgaggtggcccgggagagtggcccaccccacatgaagaactttgtgaccaaggtttcggttggggagtttgtgggggaaggtgaagggaaaagcaagaagatttcaaagaaaaatgccgccatagctgttcttgaggagctgaagaagttaccgcccctgcctgcagttgaacgagtaaagcctagaatcaaaaagaaaacaaaacccatagtcaagccacagacaagcccagaatatggccaggggatcaatccgattagccgactggcccagatccagcaggcaaaaaaggagaaggagccagagtacacgctcctcacagagcgaggcctcccgcgccgcagggagtttgtgatgcaggtgaaggttggaaaccacactgcagaaggaacgggcaccaacaagaaggtggccaagcgcaatgcagccgagaacatgctggagatccttggtttcaaagtcccgcaggcgcagcccaccaaacccgcactcaagtcagaggagaaggaaggtgagtgctgtgggctctctgattgcaagatggtctctcgcctcaccctagggaactggggcacctccaggggcaggcttcaaggcaaggctttatctgcctgacagttcaaggagtcctgctgaggagtgtctcatccatttggaccataatgtgctcagaggggcctcgcatgtccactggccccaggaggctctgggttagatcgttgattgtgtcagtatctttgtggtctggggacgctttgtggagggcagcttgctcctctctatttgtaggatgaggatgaaggg

SEQ ID NO: 332920 - DNA, 492 bp, Homo sapiens
  misc_feature (23)..(23): n is a, c, g, or t
  misc_feature (36)..(36): n is a, c, g, or t
gcctactactactactaaattcncggcccgtcgacnagtgattttccagagtgctcgatactgttaattacatctccattagggctgaaaagaatgacctacgtttctgtatacagctgtgttgcttttgatgttgtgttactgtacacagaagtgtgtgcactgaggctctgcgtgtggtccgtatggaaagcctggtagccctgcgagttaagtactgcttccattcattgtttacgctggaatttttctccccatggaatgtaagtaaaacttaagtgtttgtcatcaataaatggtaatactaaatttttttgttaatttattctcaaatgccactactgctaggttggtcccctcccaacttgcccctatcctttttttatttttaagaaaaaactttgtaatgcttgtgattccatctgggcaaaagtctgaagatctgaaataactttatatcaaaccattgatcaataaacagctactaatgaa

SEQ ID NO: 332921 - DNA, 751 bp, Homo sapiens
gtcttcagtttcagagaaaagacctaccctactaaattattattattttttattttccagagtttattaaccacttaacctctcagaactgaacaaagacaacattgttcctggaacgccctctttttaaaaaaggtacatataatttggctttataatttctggcctgttgataatcagtggtacttttgaattctttaatgagttgtgtggagaatgatttttacttctggctataatattagagaaacaaattttatgcagtttgaatttcatctttactcttgatttaattagaaagtaagtacaggaaaagttattggcaagaatgtaaagcctatgttctttaaatatagagacatgagaattgatgactgaagctgtcattaaacatgactggctcaataagcttcttggtcatagtatcttttgtagtttgctttttttaaaaaaaccctttgatttctcagattgtttatgttaaacatgattttcaaactcatagaacgaatttagcattgttttctattgtgagatagggttacgaatcaagcttcgttgaccactagcagcttgtgaacattcagataaaaaaggagttttctaagagtgttcaagattttctggtcttttgtcagggcaatgcaaaatacactatgtgggttaatactgcttcctgcttttaacactttccctctagaagctgaaagcacattgctgtaccatatctctgaggtagtaattagtagac

SEQ ID NO: 332922 - DNA, 1025 bp, Homo sapiens
gccgcagtgccagccggaacttgtggttcggaccgtgggtgggggtggggccggggccgggcctggaggcgggcgggggccgggggcgggcgcctgcccctcccccgtcacttcctgccgggctgcgggcgcctgagcggctcttcagcgtttgcgccggcggctgccgcgtctctctcggctcccgcttcctttgaccgcctccccccccggcccggcggcgcccgcctcctccacggccactccgcctcttccctcccttcgtcccttcttcctctcccttttttccttcttccttcccctcctcgccgccaccgcccaggaccgccggccgggggacgagctcggagcagcagccagagtttattaaccacttaacctctcagaactgaacaaagacaacattgttcctggaacgccctctttttaaaaaagaaagcataacccctactgtagaactaaatgcactgtgcatgaaacttggaaaaaaaccaatgtataagcctgttgacccttactctcggatgcagtccacctataactacaacatgagaggaggtgcttatcccccgaggtacttttacccatttccagttccacctttactttatcaagtggaactttctgtgggaggacagcaatttaatggcaaaggaaagacaagacaggctgcgaaacacgatgctgctgccaaagcgttgaggatcctgcagaatgagcccctgccagagaggctggaggtgaatggaagagaatccgaagaagaaaatctcaataaatctgaaataagtcaagtgtttgagattgcacttaaacggaacttgcctgtgaatttcgaggtggcccgggagagtggcccaccccacatgaagaactttgtgaccaaggtttcggttggggagtttgtgggggaaggtgaagggaaaagcaagaagatttcaaagaaaaatgccgccatagctgttcttgaggagctgaagaagttaccgcccctgcctgcagttgaacgagtaaagcctagaatc

SEQ ID NO: 332923 - DNA, 3440 bp, Homo sapiens
gccgcagtgccagccggaacttgtggttcggaccgtgggtgggggtggggccggggccgggcctggaggcgggcgggggccgggggcgggcgcctgcccctcccccgtcacttcctgccgggctgcgggcgcctgagcggctcttcagcgtttgcgccggcggctgccgcgtctctctcggctcccgcttcctttgaccgcctccccccccggcccggcggcgcccgcctcctccacggccactccgcctcttccctcccttcgtcccttcttcctctcccttttttccttcttccttcccctcctcgccgccaccgcccaggaccgccggccgggggacgagctcggagcagcagccaggtggagttttgctcttgtcgcccaggctggagtgcagtggcgtgatctcggctcactgcaacctccacctcccaggttcaagcgattttcccacttcagcctcccgataagctgagattacagagtttattaaccacttaacctctcagaactgaacaaagacaacattgttcctggaacgccctctttttaaaaaagaaagcataacccctactgtagaactaaatgcactgtgcatgaaacttggaaaaaaaccaatgtataagcctgttgacccttactctcggatgcagtccacctataactacaacatgagaggaggtgcttatcccccgaggtacttttacccatttccagttccacctttactttatcaagtggaactttctgtgggaggacagcaatttaatggcaaaggaaagacaagacaggctgcgaaacacgatgctgctgccaaagcgttgaggatcctgcagaatgagcccctgccagagaggctggaggtgaatggaagagaatccgaagaagaaaatctcaataaatctgaaataagtcaagtgtttgagattgcacttaaacggaacttgcctgtgaatttcgaggtggcccgggagagtggcccaccccacatgaagaactttgtgaccaaggtttcggttggggagtttgtgggggaaggtgaagggaaaagcaagaagatttcaaagaaaaatgccgccatagctgttcttgaggagctgaagaagttaccgcccctgcctgcagttgaacgagtaaagcctagaatcaaaaagaaaacaaaacccatagtcaagccacagacaagcccagaatatggccaggggatcaatccgattagccgactggcccagatccagcaggcaaaaaaggagaaggagccagagtacacgctcctcacagagcgaggcctcccgcgccgcagggagtttgtgatgcaggtgaaggttggaaaccacactgcagaaggaacgggcaccaacaagaaggtggccaagcgcaatgcagccgagaacatgctggagatccttggtttcaaagtcccgcaggcgcagcccaccaaacccgcactcaagtcagaggagaagacacccataaagaaaccaggggatggaagaaaagtaaccttttttgaacctggctctggggatgaaaatgggactagtaataaagaggatgagttcaggatgccttatctaagtcatcagcagctgcctgctggaattcttcccatggtgcccgaggtcgcccaggctgtaggagttagtcaaggacatcacaccaaagattttaccagggcagctccgaatcctgccaaggccacggtaactgccatgatagcccgagagttgttgtatgggggcacctcgcccacagccgagaccattttaaagaataacatctcttcaggccacgtaccccatggacctctcacgagaccctctgagcaactggactatctttccagagtccagggattccaggttgaatacaaagacttccccaaaaacaacaagaacgaatttgtatctcttatcaattgctcctctcagccacctctgatcagccatggtatcggcaaggatgtggagtcctgccatgatatggctgcgctgaacatcttaaagttgctgtctgagttggaccaacaaagtacagagatgccaagaacaggaaacggaccaatgtctgtgtgtgggaggtgctgaaccttttctggccatgaaccattataaaatcccaacatatatactgaaaatactgaaactgctttgaaaatttggaatttctgatacctccagtgggccgagagacacggtgggtaaaggatgtgggcagcagcagggaagacaacagaaacacaaggaggcggctgtggccgggctggactgtgctggggtttgttgtgatggccactcggtgacctggcggtccctacgcaatagcagctgcctgtggggaagaagggctgcccagccagctggttctcccgggacaccagcagatccacaccctgggcacctccgtgtttggtcttttttttcccctgtgtgaaagaagaaacggcacgaccccttctcaagctggctcactcagacacattgggacaaaccctggacagccatgccagagagaggcctttgaccggccccagagctaaaagcaccagagaaaatcaaatgcttcctactcagcgtgacccaacttttctagtgtgccacggccccaccacctcctgcagtacccacaccatcaccactgctttctcttccaacagtgatctgtattcttagtttcattattttcttttgattgatatgacactatataaaattttcatttgagaatttctcaattgtatctagttaaatagcacagtttggaaacttgtctgagactgactttatcaataatctaaccgacaaagatcatatccatgtgtatgtggttagacatttttatttcattgactaacccaggacagtttcagtgatgcaaattgtgtgccctctggttcagctgaaacagtcctggactttcaaaaaccttgaataagtctcccacagttgtataaattggacaatttaggaattttaaactttagatgatcatttggttccatttttatttcatttttatttttgttaatgcaaacaggacttaaatgaactttgatctctgttttaaagattattaaaaaacattgtgtatctatacatatggctcttgaggacttagctttcactacactacaggatatgatctccatgtagtccatataaacctgcagagtgattttccagagtgctcgatactgttaattacatctccattagggctgaaaagaatgacctacgtttctgtatacagctgtgttgcttttgatgttgtgttactgtacacagaagtgtgtgcactgaggctctgcgtgtggtccgtatggaaagcctggtagccctgcgagttaagtactgcttccattcattgtttacgctggaatttttctccccatggaatgtaagtaaaacttaagtgtttgtcatcaataaatggtaatacta

SEQ ID NO: 332924 - DNA, 3242 bp, Homo sapiens
gccgcagtgccagccggaacttgtggttcggaccgtgggtgggggtggggccggggccgggcctggaggcgggcgggggccgggggcgggcgcctgcccctcccccgtcacttcctgccgggctgcgggcgcctgagcggctcttcagcgtttgcgccggcggctgccgcgtctctctcggctcccgcttcctttgaccgcctccccccccggcccggcggcgcccgcctcctccacggccactccgcctcttccctcccttcgtcccttcttcctctcccttttttccttcttccttcccctcctcgccgccaccgcccaggaccgccggccgggggacgagctcggagcagcagccagaaagcataacccctactgtagaactaaatgcactgtgcatgaaacttggaaaaaaaccaatgtataagcctgttgacccttactctcggatgcagtccacctataactacaacatgagaggaggtgcttatcccccgaggtacttttacccatttccagttccacctttactttatcaagtggaactttctgtgggaggacagcaatttaatggcaaaggaaagacaagacaggctgcgaaacacgatgctgctgccaaagcgttgaggatcctgcagaatgagcccctgccagagaggctggaggtgaatggaagagaatccgaagaagaaaatctcaataaatctgaaataagtcaagtgtttgagattgcacttaaacggaacttgcctgtgaatttcgaggtggcccgggagagtggcccaccccacatgaagaactttgtgaccaaggtttcggttggggagtttgtgggggaaggtgaagggaaaagcaagaagatttcaaagaaaaatgccgccatagctgttcttgaggagctgaagaagttaccgcccctgcctgcagttgaacgagtaaagcctagaatcaaaaagaaaacaaaacccatagtcaagccacagacaagcccagaatatggccaggggatcaatccgattagccgactggcccagatccagcaggcaaaaaaggagaaggagccagagtacacgctcctcacagagcgaggcctcccgcgccgcagggagtttgtgatgcaggtgaaggttggaaaccacactgcagaaggaacgggcaccaacaagaaggtggccaagcgcaatgcagccgagaacatgctggagatccttggtttcaaagtcccgcaggcgcagcccaccaaacccgcactcaagtcagaggagaagacacccataaagaaaccaggggatggaagaaaagtaaccttttttgaacctggctctggggatgaaaatgggactagtaataaagaggatgagttcaggatgccttatctaagtcatcagcagctgcctgctggaattcttcccatggtgcccgaggtcgcccaggctgtaggagttagtcaaggacatcacaccaaagattttaccagggcagctccgaatcctgccaaggccacggtaactgccatgatagcccgagagttgttgtatgggggcacctcgcccacagccgagaccattttaaagaataacatctcttcaggccacgtaccccatggacctctcacgagaccctctgagcaactggactatctttccagagtccagggattccaggttgaatacaaagacttccccaaaaacaacaagaacgaatttgtatctcttatcaattgctcctctcagccacctctgatcagccatggtatcggcaaggatgtggagtcctgccatgatatggctgcgctgaacatcttaaagttgctgtctgagttggaccaacaaagtacagagatgccaagaacaggaaacggaccaatgtctgtgtgtgggaggtgctgaaccttttctggccatgaaccattataaaatcccaacatatatactgaaaatactgaaactgctttgaaaatttggaatttctgatacctccagtgggccgagagacacggtgggtaaaggatgtgggcagcagcagggaagacaacagaaacacaaggaggcggctgtggccgggctggactgtgctggggtttgttgtgatggccactcggtgacctggcggtccctacgcaatagcagctgcctgtggggaagaagggctgcccagccagctggttctcccgggacaccagcagatccacaccctgggcacctccgtgtttggtcttttttttcccctgtgtgaaagaagaaacggcacgaccccttctcaagctggctcactcagacacattgggacaaaccctggacagccatgccagagagaggcctttgaccggccccagagctaaaagcaccagagaaaatcaaatgcttcctactcagcgtgacccaacttttctagtgtgccacggccccaccacctcctgcagtacccacaccatcaccactgctttctcttccaacagtgatctgtattcttagtttcattattttcttttgattgatatgacactatataaaattttcatttgagaatttctcaattgtatctagttaaatagcacagtttggaaacttgtctgagactgactttatcaataatctaaccgacaaagatcatatccatgtgtatgtggttagacatttttatttcattgactaacccaggacagtttcagtgatgcaaattgtgtgccctctggttcagctgaaacagtcctggactttcaaaaaccttgaataagtctcccacagttgtataaattggacaatttaggaattttaaactttagatgatcatttggttccatttttatttcatttttatttttgttaatgcaaacaggacttaaatgaactttgatctctgttttaaagattattaaaaaacattgtgtatctatacatatggctcttgaggacttagctttcactacactacaggatatgatctccatgtagtccatataaacctgcagagtgattttccagagtgctcgatactgttaattacatctccattagggctgaaaagaatgacctacgtttctgtatacagctgtgttgcttttgatgttgtgttactgtacacagaagtgtgtgcactgaggctctgcgtgtggtccgtatggaaagcctggtagccctgcgagttaagtactgcttccattcattgtttacgctggaatttttctccccatggaatgtaagtaaaacttaagtgtttgtcatcaataaatggtaatacta

SEQ ID NO: 332925 - DNA, 1166 bp, Homo sapiens
gccgcagtgccagccggaacttgtggttcggaccgtgggtgggggtggggccggggccgggcctggaggcgggcgggggccgggggcgggcgcctgcccctcccccgtcacttcctgccgggctgcgggcgcctgagcggctcttcagcgtttgcgccggcggctgccgcgtctctctcggctcccgcttcctttgaccgcctccccccccggcccggcggcgcccgcctcctccacggccactccgcctcttccctcccttcgtcccttcttcctctcccttttttccttcttccttcccctcctcgccgccaccgcccaggaccgccggccgggggacgagctcggagcagcagccaggtggagttttgctcttgtcgcccaggctggagtgcagtggcgtgatctcggctcactgcaacctccacctcccaggttcaagcgattttcccacttcagcctcccgataagctgagattacagagtttattaaccacttaacctctcagaactgaacaaagacaacattgttcctggaacgccctctttttaaaaaagaaagcataacccctactgtagaactaaatgcactgtgcatgaaacttggaaaaaaaccaatgtataagcctgttgacccttactctcggatgcagtccacctataactacaacatgagaggaggtgcttatcccccgaggtacttttacccatttccagttccacctttactttatcaagtggaactttctgtgggaggacagcaatttaatggcaaaggaaagacaagacaggctgcgaaacacgatgctgctgccaaagcgttgaggatcctgcagaatgagcccctgccagagaggctggaggtgaatggaagagaatccgaagaagaaaatctcaataaatctgaaataagtcaagtgtttgagattgcacttaaacggaacttgcctgtgaatttcgagtctttccctctgaaacaggtggcccgggagagtggcccaccccacatgaagaactttgtgaccaaggtttcggttggggagtttgtgggggaaggtgaagggaaaagcaagaagatttcaaagaaaaatgccgccatagctgttcttgaggagctgaagaagttaccgcccctgcctgcagttgaacgagtaaagcctagaatc

SEQ ID NO: 332926 - DNA, 3502 bp, Homo sapiens
gccgcagtgccagccggaacttgtggttcggaccgtgggtgggggtggggccggggccgggcctggaggcgggcgggggccgggggcgggcgcctgcccctcccccgtcacttcctgccgggctgcgggcgcctgagcggctcttcagcgtttgcgccggcggctgccgcgtctctctcggctcccgcttcctttgaccgcctccccccccggcccggcggcgcccgcctcctccacggccactccgcctcttccctcccttcgtcccttcttcctctcccttttttccttcttccttcccctcctcgccgccaccgcccaggaccgccggccgggggacgagctcggagcagcagccagagtttattaaccacttaacctctcagaactgaacaaagacaacattgttcctggaacgccctctttttaaaaaagaaagcataacccctactgtagaactaaatgcactgtgcatgaaacttggaaaaaaaccaatgtataagcctgttgacccttactctcggatgcagtccacctataactacaacatgagaggaggtgcttatcccccgaggtacttttacccatttccagttccacctttactttatcaagtggaactttctgtgggaggacagcaatttaatggcaaaggaaagacaagacaggctgcgaaacacgatgctgctgccaaagcgttgaggatcctgcagaatgagcccctgccagagaggctggaggtgaatggaagagaatccgaagaagaaaatctcaataaatctgaaataagtcaagtgtttgagattgcacttaaacggaacttgcctgtgaatttcgaggtggcccgggagagtggcccaccccacatgaagaactttgtgaccaaggtttcggttggggagtttgtgggggaaggtgaagggaaaagcaagaagatttcaaagaaaaatgccgccatagctgttcttgaggagctgaagaagttaccgcccctgcctgcagttgaacgagtaaagcctagaatcaaaaagaaaacaaaacccatagtcaagccacagacaagcccagaatatggccaggggatcaatccgattagccgactggcccagatccagcaggcaaaaaaggagaaggagccagagtacacgctcctcacagagcgaggcctcccgcgccgcagggagtttgtgatgcaggtgaaggttggaaaccacactgcagaaggaacgggcaccaacaagaaggtggccaagcgcaatgcagccgagaacatgctggagatccttggtttcaaagtcccgcaggcgcagcccaccaaacccgcactcaagtcagaggagaagacacccataaagaaaccaggggatggaagaaaagtaaccttttttgaacctggctctggggatgaaaatgggactagtaataaagaggatgagttcaggatgccttatctaagtcatcagcagctgcctgctggaattcttcccatggtgcccgaggtcgcccaggctgtaggagttagtcaaggacatcacaccaaagattttaccagggcagctccgaatcctgccaaggccacggtaactgccatgatagcccgagagttgttgtatgggggcacctcgcccacagccgagaccattttaaagaataacatctcttcaggccacgtaccccatggacctctcacgagaccctctgagcaactggactatctttccagagtccagggattccaggttgaatacaaagacttccccaaaaacaacaagaacgaatttgtatctcttatcaattgctcctctcagccacctctgatcagccatggtatcggcaaggatgtggagtcctgccatgatatggctgcgctgaacatcttaaagttgctgtctgagttggaccaacaaagtacagagatgccaagaacaggaaacggaccaatgtctgtgtgtgggaggtgctgaaccttttctggccatgaaccattataaaatcccaacatatatactgaaaatactgaaactgctttgaaaatttggaatttctgatacctccagtgggccgagagacacggtgggtaaaggatgtgggcagcagcagggaagacaacagaaacacaaggaggcggctgtggccgggctggactgtgctggggtttgttgtgatggccactcggtgacctggcggtccctacgcaatagcagctgcctgtggggaagaagggctgcccagccagctggttctcccgggacaccagcagatccacaccctgggcacctccgtgtttggtcttttttttcccctgtgtgaaagaagaaacggcacgaccccttctcaagctggctcactcagacacattgggacaaaccctggacagccatgccagagagaggcctttgaccggccccagagctaaaagcaccagagaaaatcaaatgcttcctactcagcgtgacccaacttttctagtgtgccacggccccaccacctcctgcagtacccacaccatcaccactgctttctcttccaacagtgatctgtattcttagtttcattattttcttttgattgatatgacactatataaaattttcatttgagaatttctcaattgtatctagttaaatagcacagtttggaaacttgtctgagactgactttatcaataatctaaccgacaaagatcatatccatgtgtatgtggttagacatttttatttcattgactaacccaggacagtttcagtgatgcaaattgtgtgccctctggttcagctgaaacagtcctggactttcaaaaaccttgaataagtctcccacagttgtataaattggacaatttaggaattttaaactttagatgatcatttggttccatttttatttcatttttatttttgttaatgcaaacaggacttaaatgaactttgatctctgttttaaagattattaaaaaacattgtgtatctatacatatggctcttgaggacttagctttcactacactacaggatatgatctccatgtagtccatataaacctgcagagtgattttccagagtgctcgatactgttaattacatctccattagggctgaaaagaatgacctacgtttctgtatacagctgtgttgcttttgatgttgtgttactgtacacagaagtgtgtgcactgaggctctgcgtgtggtccgtatggaaagcctggtagccctgcgagttaagtactgcttccattcattgtttacgctggaatttttctccccatggaatgtaagtaaaacttaagtgtttgtcatcaataaatggtaatactaaatttttttgttaatttattctcaaatgccactactgctaggttggtcccctcccaacttgcccctatcctttttttatttttaagaaaaaactttgtaatgcttgtgattccatctgggcaaaagtctgaagatctgaaataactttatatcaaaccattgatcaataaacagctactaatgaa

SEQ ID NO: 332927 - DNA, 3643 bp, Homo sapiens
gccgcagtgccagccggaacttgtggttcggaccgtgggtgggggtggggccggggccgggcctggaggcgggcgggggccgggggcgggcgcctgcccctcccccgtcacttcctgccgggctgcgggcgcctgagcggctcttcagcgtttgcgccggcggctgccgcgtctctctcggctcccgcttcctttgaccgcctccccccccggcccggcggcgcccgcctcctccacggccactccgcctcttccctcccttcgtcccttcttcctctcccttttttccttcttccttcccctcctcgccgccaccgcccaggaccgccggccgggggacgagctcggagcagcagccaggtggagttttgctcttgtcgcccaggctggagtgcagtggcgtgatctcggctcactgcaacctccacctcccaggttcaagcgattttcccacttcagcctcccgataagctgagattacagagtttattaaccacttaacctctcagaactgaacaaagacaacattgttcctggaacgccctctttttaaaaaagaaagcataacccctactgtagaactaaatgcactgtgcatgaaacttggaaaaaaaccaatgtataagcctgttgacccttactctcggatgcagtccacctataactacaacatgagaggaggtgcttatcccccgaggtacttttacccatttccagttccacctttactttatcaagtggaactttctgtgggaggacagcaatttaatggcaaaggaaagacaagacaggctgcgaaacacgatgctgctgccaaagcgttgaggatcctgcagaatgagcccctgccagagaggctggaggtgaatggaagagaatccgaagaagaaaatctcaataaatctgaaataagtcaagtgtttgagattgcacttaaacggaacttgcctgtgaatttcgagtctttccctctgaaacaggtggcccgggagagtggcccaccccacatgaagaactttgtgaccaaggtttcggttggggagtttgtgggggaaggtgaagggaaaagcaagaagatttcaaagaaaaatgccgccatagctgttcttgaggagctgaagaagttaccgcccctgcctgcagttgaacgagtaaagcctagaatcaaaaagaaaacaaaacccatagtcaagccacagacaagcccagaatatggccaggggatcaatccgattagccgactggcccagatccagcaggcaaaaaaggagaaggagccagagtacacgctcctcacagagcgaggcctcccgcgccgcagggagtttgtgatgcaggtgaaggttggaaaccacactgcagaaggaacgggcaccaacaagaaggtggccaagcgcaatgcagccgagaacatgctggagatccttggtttcaaagtcccgcaggcgcagcccaccaaacccgcactcaagtcagaggagaagacacccataaagaaaccaggggatggaagaaaagtaaccttttttgaacctggctctggggatgaaaatgggactagtaataaagaggatgagttcaggatgccttatctaagtcatcagcagctgcctgctggaattcttcccatggtgcccgaggtcgcccaggctgtaggagttagtcaaggacatcacaccaaagattttaccagggcagctccgaatcctgccaaggccacggtaactgccatgatagcccgagagttgttgtatgggggcacctcgcccacagccgagaccattttaaagaataacatctcttcaggccacgtaccccatggacctctcacgagaccctctgagcaactggactatctttccagagtccagggattccaggttgaatacaaagacttccccaaaaacaacaagaacgaatttgtatctcttatcaattgctcctctcagccacctctgatcagccatggtatcggcaaggatgtggagtcctgccatgatatggctgcgctgaacatcttaaagttgctgtctgagttggaccaacaaagtacagagatgccaagaacaggaaacggaccaatgtctgtgtgtgggaggtgctgaaccttttctggccatgaaccattataaaatcccaacatatatactgaaaatactgaaactgctttgaaaatttggaatttctgatacctccagtgggccgagagacacggtgggtaaaggatgtgggcagcagcagggaagacaacagaaacacaaggaggcggctgtggccgggctggactgtgctggggtttgttgtgatggccactcggtgacctggcggtccctacgcaatagcagctgcctgtggggaagaagggctgcccagccagctggttctcccgggacaccagcagatccacaccctgggcacctccgtgtttggtcttttttttcccctgtgtgaaagaagaaacggcacgaccccttctcaagctggctcactcagacacattgggacaaaccctggacagccatgccagagagaggcctttgaccggccccagagctaaaagcaccagagaaaatcaaatgcttcctactcagcgtgacccaacttttctagtgtgccacggccccaccacctcctgcagtacccacaccatcaccactgctttctcttccaacagtgatctgtattcttagtttcattattttcttttgattgatatgacactatataaaattttcatttgagaatttctcaattgtatctagttaaatagcacagtttggaaacttgtctgagactgactttatcaataatctaaccgacaaagatcatatccatgtgtatgtggttagacatttttatttcattgactaacccaggacagtttcagtgatgcaaattgtgtgccctctggttcagctgaaacagtcctggactttcaaaaaccttgaataagtctcccacagttgtataaattggacaatttaggaattttaaactttagatgatcatttggttccatttttatttcatttttatttttgttaatgcaaacaggacttaaatgaactttgatctctgttttaaagattattaaaaaacattgtgtatctatacatatggctcttgaggacttagctttcactacactacaggatatgatctccatgtagtccatataaacctgcagagtgattttccagagtgctcgatactgttaattacatctccattagggctgaaaagaatgacctacgtttctgtatacagctgtgttgcttttgatgttgtgttactgtacacagaagtgtgtgcactgaggctctgcgtgtggtccgtatggaaagcctggtagccctgcgagttaagtactgcttccattcattgtttacgctggaatttttctccccatggaatgtaagtaaaacttaagtgtttgtcatcaataaatggtaatactaaatttttttgttaatttattctcaaatgccactactgctaggttggtcccctcccaacttgcccctatcctttttttatttttaagaaaaaactttgtaatgcttgtgattccatctgggcaaaagtctgaagatctgaaataactttatatcaaaccattgatcaataaacagctactaatgaa

SEQ ID NO: 332928 - DNA, 2617 bp, Homo sapiens
gggctgcaggattcggcacgaggttttatattgataattgttgtgatgaaattgatggcccctaagatagaggagacacctgctaggtgtaaggagaagatggttaggtctacggaggctccagggtgggagtagttccctgctaagggagggtagactgttcaacctgttcctgctccggcctccactatagcagatgcgagcaggagtaggagagagggaggtaagagtcagaagcttatgttgattatgcggggaaacgccatatcgggggcaccgattattaggggaactagtcagttgccaaagcctccgattatgatgggtattactatgaagaagattattacaaatgcatgggctgtgacgataacgttgtagatgtggtcgttacctagaaggttgcctggctggcccagctcggctcgaataaggaggcttagagctgtgcctaggactccagctcatgcgccgaataataggtatagtgatccaatgtctctgcggttcgcagagaatctcgtgccgaattcggtaataaagaggatgagttcaggatgccttatctaagtcatcagcagctgcctgctggaattcttcccatggtgcccgaggtcgcccaggctgtaggagttagtcaaggacatcacaccaaagattttaccagggcagctccgaatcctgccaaggccacggtaactgccatgatagcccgagagttgttgtatgggggcacctcgcccacagccgagaccattttaaagaataacatctcttcaggccacgtaccccatggacctctcacgagaccctctgagcaactggactatctttccagagtccagggattccaggttgaatacaaagacttccccaaaaacaacaagaacgaatttgtatctcttatcaattgctcctctcagccacctctgatcagccatggtatcggcaaggatgtggagtcctgccatgatatggctgcgctgaacatcttaaagttgctgtctgagttggaccaacaaagtacagagatgccaagaacaggaaacggaccaatgtctgtgtgtgggaggtgctgaaccttttctggccatgaaccattataaaatcccaacatatatactgaaaatactgaaactgctttgaaaatttggaatttctgatacctccagtgggccgagagacacggtgggtaaaggatgtgggcagcagcagggaagacaacagaaacacaaggaggcggctgtggccgggctggactgtgctggggtttgttgtgatggccactcggtgacctggcggtccctacgcaatagcagctgcctgtggggaagaagggctgcccagccagctggttctcccgggacaccagcagatccacaccctgggcacctccgtgtttggtcttttttttcccctgtgtgaaagaagaaacggcacgaccccttctcaagctggctcactcagacacattgggacaaaccctggacagccatgccagagagaggcctttgaccggccccagagctaaaagcaccagagaaaatcaaatgcttcctactcagcgtgacccaacttttctagtgtgccacggccccaccacctcctgcagtacccacaccatcaccactgctttctcttccaacagtgatctgtattcttagtttcattattttcttttgattgatatgacactatataaaattttcatttgagaatttctcaattgtatctagttaaatagcacagtttggaaacttgtctgagactgactttatcaataatctaaccgacaaagatcatatccatgtgtatgtggttagacatttttatttcattgactaacccaggacagtttcagtgatgcaaattgtgtgccctctggttcagctgaaacagtcctggactttcaaaaaccttgaataagtctcccacagttgtataaattggacaatttaggaattttaaactttagatgatcatttggttccatttttatttcatttttatttttgttaatgcaaacaggacttaaatgaactttgatctctgttttaaagattattaaaaaacattgtgtatctatacatatggctcttgaggacttagctttcactacactacaggatatgatctccatgtagtccatataaacctgcagagtgattttccagagtgctcgatactgttaattacatctccattagggctgaaaagaatgacctacgtttctgtatacagctgtgttgcttttgatgttgtgttactgtacacagaagtgtgtgcactgaggctctgcgtgtggtccgtatggaaagcctggtagccctgcgagttaagtactgcttccattcattgtttacgctggaatttttctccccatggaatgtaagtaaaacttaagtgtttgtcatcaataaatggtaatactaaatttttttgttaatttattctcaaatgccactactgctaggttggtcccctcccaacttgcccctatcctttttttatttttaagaaaaaactttgtaatgcttgtgattccatctgggcaaaagtctgaagatctgaaataactttatatcaaaccattgatcaataaacagctactaatgaa

SEQ ID NO: 332929 - DNA, 2851 bp, Homo sapiens
gccgcagtgccagccggaacttgtggttcggaccgtgggtgggggtggggccggggccgggcctggaggcgggcgggggccgggggcgggcgcctgcccctcccccgtcacttcctgccgggctgcgggcgcctgagcggctcttcagcgtttgcgccggcggctgccgcgtctctctcggctcccgcttcctttgaccgcctccccccccggcccggcggcgcccgcctcctccacggccactccgcctcttccctcccttcgtcccttcttcctctcccttttttccttcttccttcccctcctcgccgccaccgcccaggaccgccggccgggggacgagctcggagcagcagccagagtttattaaccacttaacctctcagaactgaacaaagacaacattgttcctggaacgccctctttttaaaaaagaaagcataacccctactgtagaactaaatgcactgtgcatgaaacttggaaaaaaaccaatgtataagcctgttgacccttactctcggatgcagtccacctataactacaacatgagaggaggtgcttatcccccgaggtacttttacccatttccagttccacctttactttatcaagtggaactttctgtgggaggacagcaatttaatggcaaaggaaagacaagacaggctgcgaaacacgatgctgctgccaaagcgttgaggatcctgcagaatgagcccctgccagagaggctggaggtgaatggaagagaatccgaagaagaaaatctcaataaatctgaaataagtcaagtgtttgagattgcacttaaacggaacttgcctgtgaatttcgaggtggcccgggagagtggcccaccccacatgaagaactttgtgaccaaggtttcggttggggagtttgtgggggaaggtgaagggaaaagcaagaagatttcaaagaaaaatgccgccatagctgttcttgaggagctgaagaagttaccgcccctgcctgcagttgaacgagtaaagcctagaatcaaaaagaaaacaaaacccatagtcaagccacagacaagcccagaatatggccaggggatcaatccgattagccgactggcccagatccagcaggcaaaaaaggagaaggagccagagtacacgctcctcacagagcgaggcctcccgcgccgcagggagtttgtgatgcaggtgaaggttggaaaccacactgcagaaggaacgggcaccaacaagaaggtggccaagcgcaatgcagccgagaacatgctggagatccttggtttcaaagtcccgcaggcgcagcccaccaaacccgcactcaagtcagaggagaagacacccataaagaaaccaggggatggaagaaaagtaaccttttttgaacctggctctggggatgaaaatgggactagtaataaagaggatgagttcaggatgccttatctaagtcatcagcagctgcctgctggaattcttcccatggtgcccgaggtcgcccaggctgtaggagttagtcaaggacatcacaccaaagattttaccagggcagctccgaatcctgccaaggccacggtaactgccatgatagcccgagagttgttgtatgggggcacctcgcccacagccgagaccattttaaagaataacatctcttcaggccacgtaccccatggacctctcacgagaccctctgagcaattgggacaaaccctggacagccatgccagagagaggcctttgaccggccccagagctaaaagcaccagagaaaatcaaatgcttcctactcagcgtgacccaacttttctagtgtgccacggccccaccacctcctgcagtacccacaccatcaccactgctttctcttccaacagtgatctgtattcttagtttcattattttcttttgattgatatgacactatataaaattttcatttgagaatttctcaattgtatctagttaaatagcacagtttggaaacttgtctgagactgactttatcaataatctaaccgacaaagatcatatccatgtgtatgtggttagacatttttatttcattgactaacccaggacagtttcagtgatgcaaattgtgtgccctctggttcagctgaaacagtcctggactttcaaaaaccttgaataagtctcccacagttgtataaattggacaatttaggaattttaaactttagatgatcatttggttccatttttatttcatttttatttttgttaatgcaaacaggacttaaatgaactttgatctctgttttaaagattattaaaaaacattgtgtatctatacatatggctcttgaggacttagctttcactacactacaggatatgatctccatgtagtccatataaacctgcagagtgattttccagagtgctcgatactgttaattacatctccattagggctgaaaagaatgacctacgtttctgtatacagctgtgttgcttttgatgttgtgttactgtacacagaagtgtgtgcactgaggctctgcgtgtggtccgtatggaaagcctggtagccctgcgagttaagtactgcttccattcattgtttacgctggaatttttctccccatggaatgtaagtaaaacttaagtgtttgtcatcaataaatggtaatactaaatttttttgttaatttattctcaaatgccactactgctaggttggtcccctcccaacttgcccctatcctttttttatttttaagaaaaaactttgtaatgcttgtgattccatctgggcaaaagtctgaagatctgaaataactttatatcaaaccattgatcaataaacagctactaatgaa

SEQ ID NO: 332930 - DNA, 2152 bp, Homo sapiens
  misc_feature (1857)..(1857): n is a, c, g, or t
  misc_feature (1884)..(1884): n is a, c, g, or t
  misc_feature (1906)..(1906): n is a, c, g, or t
  misc_feature (1912)..(1912): n is a, c, g, or t
gccgcagtgccagccggaacttgtggttcggaccgtgggtgggggtggggccggggccgggcctggaggcgggcgggggccgggggcgggcgcctgcccctcccccgtcacttcctgccgggctgcgggcgcctgagcggctcttcagcgtttgcgccggcggctgccgcgtctctctcggctcccgcttcctttgaccgcctccccccccggcccggcggcgcccgcctcctccacggccactccgcctcttccctcccttcgtcccttcttcctctcccttttttccttcttccttcccctcctcgccgccaccgcccaggaccgccggccgggggacgagctcggagcagcagccagagtttattaaccacttaacctctcagaactgaacaaagacaacattgttcctggaacgccctctttttaaaaaagaaagcataacccctactgtagaactaaatgcactgtgcatgaaacttggaaaaaaaccaatgtataagcctgttgacccttactctcggatgcagtccacctataactacaacatgagaggaggtgcttatcccccgaggtacttttacccatttccagttccacctttactttatcaagtggaactttctgtgggaggacagcaatttaatggcaaaggaaagacaagacaggctgcgaaacacgatgctgctgccaaagcgttgaggatcctgcagaatgagcccctgccagagaggctggaggtgaatggaagagaatccgaagaagaaaatctcaataaatctgaaataagtcaagtgtttgagattgcacttaaacggaacttgcctgtgaatttcgaggtggcccgggagagtggcccaccccacatgaagaactttgtgaccaaggtttcggttggggagtttgtgggggaaggtgaagggaaaagcaagaagatttcaaagaaaaatgccgccatagctgttcttgaggagctgaagaagttaccgcccctgcctgcagttgaacgagtaaagcctagaatcaaaaagaaaacaaaacccatagtcaagccacagacaagcccagaatatggccaggggatcaatccgattagccgactggcccagatccagcaggcaaaaaaggagaaggagccagagtacacgctcctcacagagcgaggcctcccgcgccgcagggagtttgtgatgcaggtgaaggttggaaaccacactgcagaaggaacgggcaccaacaagaaggtggccaagcgcaatgcagccgagaacatgctggagatccttggtttcaaagtcccgcaggcgcagcccaccaaacccgcactcaagtcagaggagaagacacccataaagaaaccaggggatggaagaaaagtaaccttttttgaacctggctctggggatgaaaatgggactagtaataaagaggatgagttcaggatgccttatctaagtcatcagcagctgcctgctggaattcttcccatggtgcccgaggtcgcccaggctgtaggagttagtcaaggacatcacaccaaagattttaccagggcagctccgaatcctgccaaggccacggtaactgccatgatagcccgagagttgttgtatgggggcacctcgcccacagccgagaccattttaaagaataacatctcttcaggccacgtaccccatggacctctcacgagaccctctgagcaactggactatctttccagagtccagggattccaggttgaatacaaagacttccccaaaaacaacaagaacgaatttgtatctcttatcaattgctcctctcagcctctgtcaccttcaatgcacattgctcagtgaaagaagcccatttgcnaaggctacatagcgtatgattccaacnatatgacattctgggaaaggcnaaaccntggagatggtaaaaggatcagtggttgctggggttgaagagagggatgaataggaagagcacagggtattttagggcagtggaagcactctgtatgatactgtgatggggacacatgtcttcttttttgtgttgagacagaatctcactctgttgcccaggctggagtgcagtggcgcgatcttggctcactgcaacctccgcctcccaggttcagtactctccattcagcctctggtac

SEQ ID NO: 332931 - DNA, 1469 bp, Homo sapiens
gccgcagtgccagccggaacttgtggttcggaccgtgggtgggggtggggccggggccgggcctggaggcgggcgggggccgggggcgggcgcctgcccctcccccgtcacttcctgccgggctgcgggcgcctgagcggctcttcagcgtttgcgccggcggctgccgcgtctctctcggctcccgcttcctttgaccgcctccccccccggcccggcggcgcccgcctcctccacggccactccgcctcttccctcccttcgtcccttcttcctctcccttttttccttcttccttcccctcctcgccgccaccgcccaggaccgccggccgggggacgagctcggagcagcagccagagtttattaaccacttaacctctcagaactgaacaaagacaacattgttcctggaacgccctctttttaaaaaagaaagcataacccctactgtagaactaaatgcactgtgcatgaaacttggaaaaaaaccaatgtataagcctgttgacccttactctcggatgcagtccacctataactacaacatgagaggaggtgcttatcccccgaggtacttttacccatttccagttccacctttactttatcaagtggaactttctgtgggaggacagcaatttaatggcaaaggaaagacaagacaggctgcgaaacacgatgctgctgccaaagcgttgaggatcctgcagaatgagcccctgccagagaggctggaggtgaatggaagagaatccgaagaagaaaatctcaataaatctgaaataagtcaagtgtttgagattgcacttaaacggaacttgcctgtgaatttcgaggtggcccgggagagtggcccaccccacatgaagaactttgtgaccaaggtttcggttggggagtttgtgggggaaggtgaagggaaaagcaagaagatttcaaagaaaaatgccgccatagctgttcttgaggagctgaagaagttaccgcccctgcctgcagttgaacgagtaaagcctagaatcaaaaagaaaacaaaacccatagtcaagccacagacaagcccagaatatggccaggggatcaatccgattagccgactggcccagatccagcaggcaaaaaaggagaaggagccagagtacacgctcctcacagagcgaggcctcccgcgccgcagggagtttgtgatgcaggtgaaggttggaaaccacactgcagaaggaacgggcaccaacaagaaggtggccaagcgcaatgcagccgagaacatgctggagatccttggtttcaaagtcccgcaggcgcagcccaccaaacccgcactcaagtcagaggagaagacccaaagacaccccccgaaaaaaaaaataaaaagaagaaaacataaaaataaaacacaaataaacacccaacataacaacaaaaaaaagggggggggcgcccaaaaaagttccccggggggggca

SEQ ID NO: 332932 - DNA, 790 bp, Homo sapiens
gccgcagtgccagccggaacttgtggttcggaccgtgggtgggggtggggccggggccgggcctggaggcgggcgggggccgggggcgggcgcctgcccctcccccgtcacttcctgccgggctgcgggcgcctgagcggctcttcagcgtttgcgccggcggctgccgcgtctctctcggctcccgcttcctttgaccgcctccccccccggcccggcggcgcccgcctcctccacggccactccgcctcttccctcccttcgtcccttcttcctctcccttttttccttcttccttcccctcctcgccgccaccgcccaggaccgccggccgggggacgagctcggagcagcagccagagtttattaaccacttaacctctcagaactgaacaaagacaacattgttcctggaacgccctctttttaaaaaaggtagaactttagacttcatagcactgaattaacctgcactgaaagctgtttacctgcatttgttcacttttgttgaaagtgaccatgtctcaagttcaagtgcaagttcagaacccatctgctgctctctcagggagccaaatactgaacaagaaccagtctcttctctcacagcctttgatgagtattccttctactactagctctctgccctctgaaaatgcaggtagacccattcaaaactctgctttaccctctgcatctattacatccaccagtgcagctgcagagtttattaaccacttaacctctcagaactgaacaaagacacattgttcctggaacgccctctttt

SEQ ID NO: 332933 - DNA, 7043 bp, Homo sapiens
ccccgaagttgttccgcgctgggcgggcgagcggctgtgggagagcgggcggcgggccggcgggcggaccgggccggtgctggagaagtttgcgctgcggttcgtgagcgcagggtgcgggccccgccggccgctgcgcgcccgctgccatggctttccgcaggaggacgaaaagttacccgctcttcagccaggagttcgtcatccacaaccatgcggacatcggcttctgcctggtgctctgcgtcctcatcgggcttatgttcgaggtcacagccaagactgcctttctatttattttacctcagtataacattagcgtgcctacagcagacagtgagaccgtgcactaccactatggccctaaggacctggtcacaatcttgttctacatcttcatcaccatcatcttgcatgctgtggttcaggagtacattttagataaaatcagcaaacggcttcatctctccaaagtcaaacacagcaagttcaatgaatctggacagctggtcgtctttcatttcacctcggtgatttggtgcttctacgtggtggtgacggaaggatacttaacaaacccaagaagcctctgggaagactacccgcatgtgcacctccccttccaggtgaagtttttctacctatgccagctggcctactggctgcacgcacttcctgagctatacttccagaaggtacggaaggaggaaattccccgccagctccagtatatttgcctgtacctggtgcatatagctggagcatacctcttaaacctgagccgcctgggcctgatcttgctgctgctgcagtactcaactgagttcctcttccacacggctagactcttctactttgcagatgaaaacaacgagaaactgttcagtgcctgggctgctgtttttggggttacccgcctcttcatcctcacccttgccgtgctggccattggctttggactggctcgcatggaaaaccaggcatttgatcccgagaaagggaacttcaacactttgttttgcaggctctgcgtgctgctgctggtgtgtgccgcccaggcctggctcatgtggcgcttcatccactcccagctgcggcactggcgggaatactggaatgagcagagtgcaaagcggagagtcccagccacacccagactaccagccaggctcatcaagagggaatctggttaccatgaaaatggagtggtgaaggcagagaacggaacctccccacggactaagaaactcaagtctccctaaggccaaagtgctaagaacaggaatcctcttggtgggggccgagcagggggcaaggagcccaggccccctccctgcctcctccttcctgcctgtgatgctccgtctcaaacagccgaaacctgtcttgcaatggggggagggggcgtttcgctttccttcttcttggcttcctcttattcttccacaaaccattctcaataaagccaaaaatctttctctttctccccctcaggccacctcctgtcctcactcctgtcctgtgctggcttttctggaacgccaggcgcccatggctggcacctttctgcttgctctgtttcttgccttatggctgctgcttttcctttttacttcctattttcaccttatcttgcaatttttctgtctgatttttacaatgggaggggagctaagattgcagtcctgtccttcggtcccccagggcctgccggtcagaagcctggggctggtaggcccttggtggtcctcatgtggatgggcaagaagagagcggccatctcggatcataatctccttggtgctgattaactgacgagatatatgattccagttctgcatgtaccatcttgaggcacagcagccactgctcgttgtaaatgccaaggcatttggctttgggacgtgacaactcaatccagaaggatggtgtgaactcggttgggtcccgtgactcgagctcctaccagtggctggccgcggattggaagccagcctgctgtcgctctgtggggggggacatgtcttcccactgcttagagcgagagcagagcaaactgcgcagcaggcacctccagaaaggtaatggtggcagaacccacagtggagtcgacctaggcctttctccagcagtcccagtcgccattgctttttcagccattcacaagcattcaaaaccaaaccaaacagcagttcatatacctgcctgagataggctggtcctcacctccagagccagccagccccgtcaggggccaaacttactaccttgacttcatctctagctgcagaaacactaagtctcaagggcttcagccccatgctggtcccttggtgttcagggagggtcacttggaccgctgttcatctggccgcccttgttgagtgttctttggaattgtcgttttttgagcacaactacagcattttagactgcatgaaaccatgactgactgagagtcactctctgggtagatgataggcgcctttctggccccttccctcacagattctttcccctcccctccacctgaagagaaggcctccaagtccttttggtgccttgtgaggacttttagaaggggcgttcagctttaaaaagccggtcctaattacggccggacgcagtagcttacgcctgttatcccagcactttgggaggtcgaggtgggcagatcacctgaggttaggagttcaagaccagcctggccaacatggtgaaaccccatctctactaaaaatacaaaaaattaggtgtagtggcaggcacctgtaatcccagctactcgggaggctgaggcaggagaatcgcttgaacctagaaggtggaggttgcagtgagcggagattgtaccatggcactccagcctggacaacaagagcgaaattctgtctaaaaaaacaaaagtcccaattaagaacctccgaactctgttttgaggcaaaggggagtagttcttggtaggtgcaggaatagtagtgtcatttggaatactggtcatctttctgacatcacagtagaaaccaaaccttggatttagattcaaaaggggggaaatgggtcttttcatcaaggcaactccccttctccaagtcacttacatcatagataaattttagcttcccagtaactgagggatttgtttcctaacgccattggaggccttcatccctctctacgataaggttgcagaaatgggaagagctacccgtggttgcttttgattacccttaggaagtgagacagtgtttttgaaaatatgtatttctcccatttctccctctccttccctgacacttctctgggctgcacagcagaaacgttggtaaaagggcagtttggtttcaacacagcagacctgatatgggatcccttagccactttagtcaaacagccctgacagagtctataattgagttcaggccccccaccttgcctaataactgcaaatcgcatgttcagccagcagcctcctaagcccaccttcctcccccattagagaacacccatcctaggtgctctccaggctgtgtcattggcagggcttcacatgcaggaggcctctctcaggtgagtccaggttaaactgttgagttgtggcttcaacagatatgtatggcatgctgggatgtgccaggtgcctgcgttgtgccagttgctggagaggtagtgtgagcagagcagctgaaatcttgccatcaagcaaccctcattctcatgcctgtaggtttccattgctctgtcccaggacacttgcgtgccagagacgccacaacttcatgtccctgtctcttgcaagctccccgtgctgccagtacttcatgccttggatgtggtcccaccagcccagtggccggggtcagcttaggctctgcttcccagtggacgggtgtgctaagggtttattttatgtaaaaaaaaaaaaaaaacaaaaaaaaaccctgagaccatgagtggggctggcatcttgccagcctgggcttcagggatgtttggggggggtggttagagggtagttgtagggtactttgtcacccccctccccctgccaccctccctggcacgtttatttcacagcagagccaagtctgtggcaggttgacacagactgtgttgccagagctgaaataattccacttcatcctatgagcgtgttgggctagcttgttctaattttggccactttggctgttttcttcagttttatgcattctctcctgccccaaagtgccaagccatttgtgaaggctctgccagacacctccaagcttgagagctcagcaccatgcaccaagagcaggagaaaagacgtaaacctaccccagcaactgtggcctctcgacagccctggctaactaacttacatttgtggggaagccaacagacacagcaggaggagagggaggtggcgctggtggaccaaggatctgtgctacccgctcccctccttggaggtgcagtgatgatgggagttatttttaccatccgggcgctgatagctgcactattaataaattgcatgtgttccttttgaaggtaggggatggttctgggtgagaggggagcaggctgagccggcgggggatctgctgtcctcccttttgagtcagttctaatcccatgtgtgtctgggccaccagaccgaaatggttgctgagaaacttgtctgttcatgtcccaaggcataacttcccaacatttaagaaaccccaatagacacctctgccctggccacgttcacagatccttctcttgaccggaaaccctgggaccctaagaacccctgaagcttggggtgggtgtgtgcttctggggtctcttttgggacctcctttgtcagtaccccttcttttttctaagcagctaataagaggttgggtgaaagagtgcatctcctcccaggattccacaacaaaattcttatcttccatggatgctttaattggaagtgggttgccgacccccttgtgcctagaaaaggcctttgcttgggtttcctttgtatgcttcagccttcctagttggtttttctaggcctggtgtgagaggtagggaagtctgcacataactaattcttttgcttaagggcctatggcacaagtgcacaaacttcaattcttgatgttctaagctctctcctctaacagagggagtgctgaaagcttttgagtcaagacaatggagtgctcttcctccctcactctgccttccgagcttatggttccttttctcaggagaggattttcaggattattggaggattaggtcattgtcagatgactggaaaacctaaataggatctctctccagctcaaggttgtcccagtgaggaagactttaccaacttctcactctaccccactactcacatgagtgttagctccaccttgcaaaggctgaagaccagttctccccagtgaaagctgcctcattcttttatggagttccctggagtggcagagctataaagacgagcattgggatttgcagtctccatgtagcctttcgtgcttggcaacccctgtaggctttttgtcccaagcagattgcgtgcgtgcgcctgtgtgtgagaataagtgccttactttgctgtgtggttttcaacttgtactccgtggccagcccccagttgccagggctcgacggcagccaaggacaccatacctcagtatagttatatataaaagggacacggattgtgacagtttcaccccatttgtttctaaccccgctgcccaggattagggtctgtggtgtgttctgttttgtttttggtttctcccttgtgtcagttctcttctggcccagctgggtggctgtggaagtctgtgaggtggcccaaccacaagcatacctattaagagaagcccagagcttccagcccccacttcgaaactctcctctggccccacatagcaaactccttctccgttattttccccacccccagttttttttaaaaggcccacttgccgtaacctcttttggtctattttgcttcccattcagcccaaagtttatatgataaaggtgtttacttttacttcccagtctccaagtgctaacacataaacacatacatgtctgactgttgcagaactgttcgagctcctaattcagtgttaccttgttttagtcgcagcaaccctctcccctaccccttgcccgcccacgtttttctcactcttccgggttgtgcaataactctcccagccagtggtcctttccacagcctttctgtcccttaaaacacctgcaactgggggagaaatgggacccatgggagggggagtcgtcatcccttacacaagaaatagccactttccttttgttgtcattcttgtgatcctgggtgggtttctgtggcactcttttagaacatgtagcatcatcttagaggtctatttttaaaaaatgtgttgaagaggaaaaaaccattctcacgatggggcttaagtcattgtccaggaataagattggcgtggtgcccatgacatcaccgtcactctgcctaaaagcactctagagctacttgttcacgtggagaggaaggatattttgcgaagcaacagccgcaggtggagagccctgttcacctgatagggtctagctgtgacagtaaatataataccgctgtttccttgggtacagatttgagtgttcatgtgatgagactgtaaacctcatttttcggttcctctgtttaaaaaaacatctgaaggatgaactaaggctgctggtgccctgagcaactgataatgcaaatgtggacaaagtgtctgttttctactctagcctgttcatatggaccaaatttcaacaaggaactcaaggaaaatttgtacctgccgtatttatgctttcatgtaaaaaagggttggggggaggggtgtctttttgcttttggtgaactttttttcaaaatcatttttccactgtttctgtctggttttaaaacaaattacagttttgtatggattttttaaatgtacattttggaacaaatgatcaaatattttctgaaataacaataaaaggcagaa

SEQ ID NO: 332934 - DNA, 441 bp, Homo sapiens
cagatttccttgcccttttatgtccatgcatctgtccacacactcatataattatcaggcatttgttgacatcctctgtgtgcctagcactatgctaagacttggcaatacaaagatggtaatggaagattctttatcttcagtggttcattctcattctgaagagacagttatagacataagtaaggacagttgagagtgatgaacaccataacacagtatgtatcatctgctctgcaacccagaagaagaccctcaacagagacagccaggaagacttccagtggatgtcggcctttgaaccatggctttgcagcttgaaggcctcccaaagctgggctcttacctcacagtgtccaatgcaaacactgctagagctcgtagccctggaattcccttccctttggtttataatgacatggagagtaggtctctcttggt

SEQ ID NO: 332935 - DNA, 5445 bp, Homo sapiens
cacaaggaaagaatagggcacaggtatattgaaatctttaagagcagtagagctgaagttagaactcattatgatccaccacgaaagcttatggccatgcagcggccaggtccttatgacaggcctggggctggtaggcccttggtggtcctcatgtggatgggcaagaagagagcggccatctcggatcataatctccttggtgctgattaactgacgagatatatgattccagttctgcatgtaccatcttgaggcacagcagccactgctcgttgtaaatgccaaggcatttggctttgggacgtgacaactcaatccagaaggatggtgtgaactcggttgggtcccgtgactcgagctcctaccagtggctggccgcggattggaagccagcctgctgtcgctctgtggggggggacatgtcttcccactgcttagagcgagagcagagcaaactgcgcagcaggcacctccagaaaggtaatggtggcagaacccacagtggagtcgacctaggcctttctccagcagtcccagtcgccattgctttttcagccattcacaagcattcaaaaccaaaccaaacagcagttcatatacctgcctgagataggctggtcctcacctccagagccagccagccccgtcaggggccaaacttactaccttgacttcatctctagctgcagaaacactaagtctcaagggcttcagccccatgctggtcccttggtgttcagggagggtcacttggaccgctgttcatctggccgcccttgttgagtgttctttggaattgtcgttttttgagcacaactacagcattttagactgcatgaaaccatgactgactgagagtcactctctgggtagatgataggcgcctttctggccccttccctcacagattctttcccctcccctccacctgaagagaaggcctccaagtccttttggtgccttgtgaggacttttagaaggggcgttcagctttaaaaagccggtcctaattacggccggacgcagtagcttacgcctgttatcccagcactttgggaggtcgaggtgggcagatcacctgaggttaggagttcaagaccagcctggccaacatggtgaaaccccatctctactaaaaatacaaaaaattaggtgtagtggcaggcacctgtaatcccagctactcgggaggctgaggcaggagaatcgcttgaacctagaaggtggaggttgcagtgagcggagattgtaccatggcactccagcctggacaacaagagcgaaattctgtctaaaaaaacaaaagtcccaattaagaacctccgaactctgttttgaggcaaaggggagtagttcttggtaggtgcaggaatagtagtgtcatttggaatactggtcatctttctgacatcacagtagaaaccaaaccttggatttagattcaaaaggggggaaatgggtcttttcatcaaggcaactccccttctccaagtcacttacatcatagataaattttagcttcccagtaactgagggatttgtttcctaacgccattggaggccttcatccctctctacgataaggttgcagaaatgggaagagctacccgtggttgcttttgattacccttaggaagtgagacagtgtttttgaaaatatgtatttctcccatttctccctctccttccctgacacttctctgggctgcacagcagaaacgttggtaaaagggcagtttggtttcaacacagcagacctgatatgggatcccttagccactttagtcaaacagccctgacagagtctataattgagttcaggccccccaccttgcctaataactgcaaatcgcatgttcagccagcagcctcctaagcccaccttcctcccccattagagaacacccatcctaggtgctctccaggctgtgtcattggcagggcttcacatgcaggaggcctctctcaggtgagtccaggttaaactgttgagttgtggcttcaacagatatgtatggcatgctgggatgtgccaggtgcctgcgttgtgccagttgctggagaggtagtgtgagcagagcagctgaaatcttgccatcaagcaaccctcattctcatgcctgtaggtttccattgctctgtcccaggacacttgcgtgccagagacgccacaacttcatgtccctgtctcttgcaagctccccgtgctgccagtacttcatgccttggatgtggtcccaccagcccagtggccggggtcagcttaggctctgcttcccagtggacgggtgtgctaagggtttattttatgtaaaaaaaaaaaaaaaacaaaaaaaaaccctgagaccatgagtggggctggcatcttgccagcctgggcttcagggatgtttggggggggtggttagagggtagttgtagggtactttgtcacccccctccccctgccaccctccctggcacgtttatttcacagcagagccaagtctgtggcaggttgacacagactgtgttgccagagctgaaataattccacttcatcctatgagcgtgttgggctagcttgttctaattttggccactttggctgttttcttcagttttatgcattctctcctgccccaaagtgccaagccatttgtgaaggctctgccagacacctccaagcttgagagctcagcaccatgcaccaagagcaggagaaaagacgtaaacctaccccagcaactgtggcctctcgacagccctggctaactaacttacatttgtggggaagccaacagacacagcaggaggagagggaggtggcgctggtggaccaaggatctgtgctacccgctcccctccttggaggtgcagtgatgatgggagttatttttaccatccgggcgctgatagctgcactattaataaattgcatgtgttccttttgaaggtaggggatggttctgggtgagaggggagcaggctgagccggcgggggatctgctgtcctcccttttgagtcagttctaatcccatgtgtgtctgggccaccagaccgaaatggttgctgagaaacttgtctgttcatgtcccaaggcataacttcccaacatttaagaaaccccaatagacacctctgccctggccacgttcacagatccttctcttgaccggaaaccctgggaccctaagaacccctgaagcttggggtgggtgtgtgcttctggggtctcttttgggacctcctttgtcagtaccccttcttttttctaagcagctaataagaggttgggtgaaagagtgcatctcctcccaggattccacaacaaaattcttatcttccatggatgctttaattggaagtgggttgccgacccccttgtgcctagaaaaggcctttgcttgggtttcctttgtatgcttcagccttcctagttggtttttctaggcctggtgtgagaggtagggaagtctgcacataactaattcttttgcttaagggcctatggcacaagtgcacaaacttcaattcttgatgttctaagctctctcctctaacagagggagtgctgaaagcttttgagtcaagacaatggagtgctcttcctccctcactctgccttccgagcttatggttccttttctcaggagaggattttcaggattattggaggattaggtcattgtcagatgactggaaaacctaaataggatctctctccagctcaaggttgtcccagtgaggaagactttaccaacttctcactctaccccactactcacatgagtgttagctccaccttgcaaaggctgaagaccagttctccccagtgaaagctgcctcattcttttatggagttccctggagtggcagagctataaagacgagcattgggatttgcagtctccatgtagcctttcgtgcttggcaacccctgtaggctttttgtcccaagcagattgcgtgcgtgcgcctgtgtgtgagaataagtgccttactttgctgtgtggttttcaacttgtactccgtggccagcccccagttgccagggctcgacggcagccaaggacaccatacctcagtatagttatatataaaagggacacggattgtgacagtttcaccccatttgtttctaaccccgctgcccaggattagggtctgtggtgtgttctgttttgtttttggtttctcccttgtgtcagttctcttctggcccagctgggtggctgtggaagtctgtgaggtggcccaaccacaagcatacctattaagagaagcccagagcttccagcccccacttcgaaactctcctctggccccacatagcaaactccttctccgttattttccccacccccagttttttttaaaaggcccacttgccgtaacctcttttggtctattttgcttcccattcagcccaaagtttatatgataaaggtgtttacttttacttcccagtctccaagtgctaacacataaacacatacatgtctgactgttgcagaactgttcgagctcctaattcagtgttaccttgttttagtcgcagcaaccctctcccctaccccttgcccgcccacgtttttctcactcttccgggttgtgcaataactctcccagccagtggtcctttccacagcctttctgtcccttaaaacacctgcaactgggggagaaatgggacccatgggagggggagtcgtcatcccttacacaagaaatagccactttccttttgttgtcattcttgtgatcctgggtgggtttctgtggcactcttttagaacatgtagcatcatcttagaggtctatttttaaaaaatgtgttgaagaggaaaaaaccattctcacgatggggcttaagtcattgtccaggaataagattggcgtggtgcccatgacatcaccgtcactctgcctaaaagcactctagagctacttgttcacgtggagaggaaggatattttgcgaagcaacagccgcaggtggagagccctgttcacctgatagggtctagctgtgacagtaaatataataccgctgtttccttgggtacagatttgagtgttcatgtgatgagactgtaaacctcatttttcggttcctctgtttaaaaaaacatctgaaggatgaactaaggctgctggtgccctgagcaactgataatgcaaatgtggacaaagtgtctgttttctactctagcctgttcatatggaccaaatttcaacaaggaactcaaggaaaatttgtacctgccgtatttatgctttcatgtaaaaaagggttggggggaggggtgtctttttgcttttggtgaactttttttcaaaatcatttttccactgtttctgtctggttttaaaacaaattacagttttgtatggattttttaaatgtacattttggaacaaatgatcaaatattttctgaaataacaataaaaggcagaa

SEQ ID NO: 332936 - DNA, 4320 bp, Homo sapiens
aatacctggggccatctccctcaggaggccaccctttgcctttcccgagatctttgttttttgtcttttttctgagatggagatttgctcttgttgcccagggtggagttgcagtgagcggagattgtaccatggcactccagcctggacaacaagagcgaaattctgtctaaaaaaacaaaagtcccaattaagaacctccgaactctgttttgaggcaaaggggagtagttcttggtaggtgcaggaatagtagtgtcatttggaatactggtcatctttctgacatcacagtagaaaccaaaccttggatttagattcaaaaggggggaaatgggtcttttcatcaaggcaactccccttctccaagtcacttacatcatagataaattttagcttcccagtaactgagggatttgtttcctaacgccattggaggccttcatccctctctacgataaggttgcagaaatgggaagagctacccgtggttgcttttgattacccttaggaagtgagacagtgtttttgaaaatatgtatttctcccatttctccctctccttccctgacacttctctgggctgcacagcagaaacgttggtaaaagggcagtttggtttcaacacagcagacctgatatgggatcccttagccactttagtcaaacagccctgacagagtctataattgagttcaggccccccaccttgcctaataactgcaaatcgcatgttcagccagcagcctcctaagcccaccttcctcccccattagagaacacccatcctaggtgctctccaggctgtgtcattggcagggcttcacatgcaggaggcctctctcaggtgagtccaggttaaactgttgagttgtggcttcaacagatatgtatggcatgctgggatgtgccaggtgcctgcgttgtgccagttgctggagaggtagtgtgagcagagcagctgaaatcttgccatcaagcaaccctcattctcatgcctgtaggtttccattgctctgtcccaggacacttgcgtgccagagacgccacaacttcatgtccctgtctcttgcaagctccccgtgctgccagtacttcatgccttggatgtggtcccaccagcccagtggccggggtcagcttaggctctgcttcccagtggacgggtgtgctaagggtttattttatgtaaaaaaaaaaaaaaaacaaaaaaaaaccctgagaccatgagtggggctggcatcttgccagcctgggcttcagggatgtttggggggggtggttagagggtagttgtagggtactttgtcacccccctccccctgccaccctccctggcacgtttatttcacagcagagccaagtctgtggcaggttgacacagactgtgttgccagagctgaaataattccacttcatcctatgagcgtgttgggctagcttgttctaattttggccactttggctgttttcttcagttttatgcattctctcctgccccaaagtgccaagccatttgtgaaggctctgccagacacctccaagcttgagagctcagcaccatgcaccaagagcaggagaaaagacgtaaacctaccccagcaactgtggcctctcgacagccctggctaactaacttacatttgtggggaagccaacagacacagcaggaggagagggaggtggcgctggtggaccaaggatctgtgctacccgctcccctccttggaggtgcagtgatgatgggagttatttttaccatccgggcgctgatagctgcactattaataaattgcatgtgttccttttgaaggtaggggatggttctgggtgagaggggagcaggctgagccggcgggggatctgctgtcctcccttttgagtcagttctaatcccatgtgtgtctgggccaccagaccgaaatggttgctgagaaacttgtctgttcatgtcccaaggcataacttcccaacatttaagaaaccccaatagacacctctgccctggccacgttcacagatccttctcttgaccggaaaccctgggaccctaagaacccctgaagcttggggtgggtgtgtgcttctggggtctcttttgggacctcctttgtcagtaccccttcttttttctaagcagctaataagaggttgggtgaaagagtgcatctcctcccaggattccacaacaaaattcttatcttccatggatgctttaattggaagtgggttgccgacccccttgtgcctagaaaaggcctttgcttgggtttcctttgtatgcttcagccttcctagttggtttttctaggcctggtgtgagaggtagggaagtctgcacataactaattcttttgcttaagggcctatggcacaagtgcacaaacttcaattcttgatgttctaagctctctcctctaacagagggagtgctgaaagcttttgagtcaagacaatggagtgctcttcctccctcactctgccttccgagcttatggttccttttctcaggagaggattttcaggattattggaggattaggtcattgtcagatgactggaaaacctaaataggatctctctccagctcaaggttgtcccagtgaggaagactttaccaacttctcactctaccccactactcacatgagtgttagctccaccttgcaaaggctgaagaccagttctccccagtgaaagctgcctcattcttttatggagttccctggagtggcagagctataaagacgagcattgggatttgcagtctccatgtagcctttcgtgcttggcaacccctgtaggctttttgtcccaagcagattgcgtgcgtgcgcctgtgtgtgagaataagtgccttactttgctgtgtggttttcaacttgtactccgtggccagcccccagttgccagggctcgacggcagccaaggacaccatacctcagtatagttatatataaaagggacacggattgtgacagtttcaccccatttgtttctaaccccgctgcccaggattagggtctgtggtgtgttctgttttgtttttggtttctcccttgtgtcagttctcttctggcccagctgggtggctgtggaagtctgtgaggtggcccaaccacaagcatacctattaagagaagcccagagcttccagcccccacttcgaaactctcctctggccccacatagcaaactccttctccgttattttccccacccccagttttttttaaaaggcccacttgccgtaacctcttttggtctattttgcttcccattcagcccaaagtttatatgataaaggtgtttacttttacttcccagtctccaagtgctaacacataaacacatacatgtctgactgttgcagaactgttcgagctcctaattcagtgttaccttgttttagtcgcagcaaccctctcccctaccccttgcccgcccacgtttttctcactcttccgggttgtgcaataactctcccagccagtggtcctttccacagcctttctgtcccttaaaacacctgcaactgggggagaaatgggacccatgggagggggagtcgtcatcccttacacaagaaatagccactttccttttgttgtcattcttgtgatcctgggtgggtttctgtggcactcttttagaacatgtagcatcatcttagaggtctatttttaaaaaatgtgttgaagaggaaaaaaccattctcacgatggggcttaagtcattgtccaggaataagattggcgtggtgcccatgacatcaccgtcactctgcctaaaagcactctagagctacttgttcacgtggagaggaaggatattttgcgaagcaacagccgcaggtggagagccctgttcacctgatagggtctagctgtgacagtaaatataataccgctgtttccttgggtacagatttgagtgttcatgtgatgagactgtaaacctcatttttcggttcctctgtttaaaaaaacatctgaaggatgaactaaggctgctggtgccctgagcaactgataatgcaaatgtggacaaagtgtctgttttctactctagcctgttcatatggaccaaatttcaacaaggaactcaaggaaaatttgtacctgccgtatttatgctttcatgtaaaaaagggttggggggaggggtgtctttttgcttttggtgaactttttttcaaaatcatttttccactgtttctgtctggttttaaaacaaattacagttttgtatggattttttaaatgtacattttggaacaaatgatcaaatattttctgaaataacaataaaaggcagaa

SEQ ID NO: 332937 - DNA, 6992 bp, Homo sapiens
ccccgaagttgttccgcgctgggcgggcgagcggctgtgggagagcgggcggcgggccggcgggcggaccgggccggtgctggagaagtttgcgctgcggttcgtgagcgcagggtgcgggccccgccggccgctgcgcgcccgctgccatggctttccgcaggaggacgaaaagttacccgctcttcagccaggagttcgtcatccacaaccatgcggacatcggcttctgcctggtgctctgcgtcctcatcgggcttatgttcgaggtcacagccaagactgcctttctatttattttacctcagtataacattagcgtgcctacagcagacagtgagaccgtgcactaccactatggccctaaggacctggtcacaatcttgttctacatcttcatcaccatcatcttgcatgctgtggttcaggagtacattttagataaaatcagcaaacggcttcatctctccaaagtcaaacacagcaagttcaatgaatctggacagctggtcgtctttcatttcacctcggtgatttggtgcttctacgtggtggtgacggaaggatacttaacaaacccaagaagcctctgggaagactacccgcatgtgcacctccccttccaggtgaagtttttctacctatgccagctggcctactggctgcacgcacttcctgagctatacttccagaaggtacggaaggaggaaattccccgccagctccagtatatttgcctgtacctggtgcatatagctggagcatacctcttaaacctgagccgcctgggcctgatcttgctgctgctgcagtactcaactgagttcctcttccacacggctagactcttctactttgcagatgaaaacaacgagaaactgttcagtgcctgggctgctgtttttggggttacccgcctcttcatcctcacccttgccgtgctggccattggctttggactggctcgcatggaaaaccaggcatttgatcccgagaaagggaacttcaacactttgttttgcaggctctgcgtgctgctgctggtgtgtgccgcccaggcctggctcatgtggcgcttcatccactcccagctgcggcactggcgggaatactggaatgagcagagtgcaaagcggagagtcccagccacacccagactaccagccaggctcatcaagagggaatctggttaccatgaaaatggagtggtgaaggcagagaacggaacctccccacggactaagaaactcaagtctccctaaggccaaagtgctaagaacaggaatcctcttggtgggggccgagcagggggcaaggagcccaggccccctccctgcctcctccttcctgcctgtgatgctccgtctcaaacagccgaaacctgtcttgcaatggggggagggggcgtttcgctttccttcttcttggcttcctcttattcttccacaaaccattctcaataaagccaaaaatctttctctttctccccctcaggccacctcctgtcctcactcctgtcctgtgctggcttttctggaacgccaggcgcccatggctggcacctttctgcttgctctgtttcttgccttatggctgctgcttttcctttttacttcctattttcaccttatcttgcaatttttctgtctgatttttacaatgggaggggagctaagattgcagtcctgtccttcggtcccccagggcctgccggtcagaagcctggggctggtaggcccttggtggtcctcatgtggatgggcaagaagagagcggccatctcggatcataatctccttggtgctgattaactgacgagatatatgattccagttctgcatgtaccatcttgaggcacagcagccactgctcgttgtaaatgccaaggcatttggctttgggacgtgacaactcaatccagaaggatggtgtgaactcggttgggtcccgtgactcgagctcctaccagtggctggccgcggattggaagccagcctgctgtcgctctgtggggggggacatgtcttcccactgcttagagcgagagcagagcaaactgcgcagcaggcacctccagaaaggtaatggtggcagaacccacagtggagtcgacctaggcctttctccagcagtcccagtcgccattgctttttcagccattcacaagcattcaaaaccaaaccaaacagcagttcatatacctgcctgagataggctggtcctcacctccagagccagccagccccgtcaggggccaaacttactaccttgacttcatctctagctgcagaaacactaagtctcaagggcttcagccccatgctggtcccttggtgttcagggagggtcacttggaccgctgttcatctggccgcccttgttgagtgttctttggaattgtcgttttttgagcacaactacagcattttagactgcatgaaaccatgactgactgagagtcactctctgggtagatgataggcgcctttctggccccttccctcacagattctttcccctcccctccacctgaagagaaggcctccaagtccttttggtgccttgtgaggacttttagaaggggcgttcagctttaaaaagccggtcctaattacggccggacgcagtagcttacgcctgttatcccagcactttgggaggtcgaggtgggcagatcacctgaggttaggagttcaagaccagcctggccaacatggtgaaaccccatctctactaaaaatacaaaaaattaggtgtagtggcaggcacctgtaatcccagctactcgggaggctgaggcaggagaatcgcttgaacctagaaggtggaggttgcagtgagcggagattgtaccatggcactccagcctggacaacaagagcgaaattctgtctaaaaaaacaaaagtcccaattaagaacctccgaactctgttttgaggcaaaggggagtagttcttggtaggtgcaggaatagtagtgtcatttggaatactggtcatctttctgacatcacagtagaaaccaaaccttggatttagattcaaaaggggggaaatgggtcttttcatcaaggcaactccccttctccaagtcacttacatcatagataaattttagcttcccagtaactgagggatttgtttcctaacgccattggaggccttcatccctctctacgataaggttgcagaaatgggaagagctacccgtggttgcttttgattacccttaggaagtgagacagtgtttttgaaaatatgtatttctcccatttctccctctccttccctgacacttctctgggctgcacagcagaaacgttggtaaaagggcagtttggtttcaacacagcagacctgatatgggatcccttagccactttagtcaaacagccctgacagagtctataattgagttcaggccccccaccttgcctaataactgcaaatcgcatgttcagccagcagcctcctaagcccaccttcctcccccattagagaacacccatcctaggtgctctccaggctgtgtcattggcagggcttcacatgcaggaggcctctctcaggtgagtccaggttaaactgttgagttgtggcttcaacagatatgtatggcatgctgggatgtgccaggtgcctgcgttgtgccagttgctggagaggtagtgtgagcagagcagctgaaatcttgccatcaagcaaccctcattctcatgcctgtaggtttccattgctctgtcccaggacacttgcgtgccagagacgccacaacttcatgtggtcccaccagcccagtggccggggtcagcttaggctctgcttcccagtggacgggtgtgctaagggtttattttatgtaaaaaaaaaaaaaaaacaaaaaaaaaccctgagaccatgagtggggctggcatcttgccagcctgggcttcagggatgtttggggggggtggttagagggtagttgtagggtactttgtcacccccctccccctgccaccctccctggcacgtttatttcacagcagagccaagtctgtggcaggttgacacagactgtgttgccagagctgaaataattccacttcatcctatgagcgtgttgggctagcttgttctaattttggccactttggctgttttcttcagttttatgcattctctcctgccccaaagtgccaagccatttgtgaaggctctgccagacacctccaagcttgagagctcagcaccatgcaccaagagcaggagaaaagacgtaaacctaccccagcaactgtggcctctcgacagccctggctaactaacttacatttgtggggaagccaacagacacagcaggaggagagggaggtggcgctggtggaccaaggatctgtgctacccgctcccctccttggaggtgcagtgatgatgggagttatttttaccatccgggcgctgatagctgcactattaataaattgcatgtgttccttttgaaggtaggggatggttctgggtgagaggggagcaggctgagccggcgggggatctgctgtcctcccttttgagtcagttctaatcccatgtgtgtctgggccaccagaccgaaatggttgctgagaaacttgtctgttcatgtcccaaggcataacttcccaacatttaagaaaccccaatagacacctctgccctggccacgttcacagatccttctcttgaccggaaaccctgggaccctaagaacccctgaagcttggggtgggtgtgtgcttctggggtctcttttgggacctcctttgtcagtaccccttcttttttctaagcagctaataagaggttgggtgaaagagtgcatctcctcccaggattccacaacaaaattcttatcttccatggatgctttaattggaagtgggttgccgacccccttgtgcctagaaaaggcctttgcttgggtttcctttgtatgcttcagccttcctagttggtttttctaggcctggtgtgagaggtagggaagtctgcacataactaattcttttgcttaagggcctatggcacaagtgcacaaacttcaattcttgatgttctaagctctctcctctaacagagggagtgctgaaagcttttgagtcaagacaatggagtgctcttcctccctcactctgccttccgagcttatggttccttttctcaggagaggattttcaggattattggaggattaggtcattgtcagatgactggaaaacctaaataggatctctctccagctcaaggttgtcccagtgaggaagactttaccaacttctcactctaccccactactcacatgagtgttagctccaccttgcaaaggctgaagaccagttctccccagtgaaagctgcctcattcttttatggagttccctggagtggcagagctataaagacgagcattgggatttgcagtctccatgtagcctttcgtgcttggcaacccctgtaggctttttgtcccaagcagattgcgtgcgtgcgcctgtgtgtgagaataagtgccttactttgctgtgtggttttcaacttgtactccgtggccagcccccagttgccagggctcgacggcagccaaggacaccatacctcagtatagttatatataaaagggacacggattgtgacagtttcaccccatttgtttctaaccccgctgcccaggattagggtctgtggtgtgttctgttttgtttttggtttctcccttgtgtcagttctcttctggcccagctgggtggctgtggaagtctgtgaggtggcccaaccacaagcatacctattaagagaagcccagagcttccagcccccacttcgaaactctcctctggccccacatagcaaactccttctccgttattttccccacccccagttttttttaaaaggcccacttgccgtaacctcttttggtctattttgcttcccattcagcccaaagtttatatgataaaggtgtttacttttacttcccagtctccaagtgctaacacataaacacatacatgtctgactgttgcagaactgttcgagctcctaattcagtgttaccttgttttagtcgcagcaaccctctcccctaccccttgcccgcccacgtttttctcactcttccgggttgtgcaataactctcccagccagtggtcctttccacagcctttctgtcccttaaaacacctgcaactgggggagaaatgggacccatgggagggggagtcgtcatcccttacacaagaaatagccactttccttttgttgtcattcttgtgatcctgggtgggtttctgtggcactcttttagaacatgtagcatcatcttagaggtctatttttaaaaaatgtgttgaagaggaaaaaaccattctcacgatggggcttaagtcattgtccaggaataagattggcgtggtgcccatgacatcaccgtcactctgcctaaaagcactctagagctacttgttcacgtggagaggaaggatattttgcgaagcaacagccgcaggtggagagccctgttcacctgatagggtctagctgtgacagtaaatataataccgctgtttccttgggtacagatttgagtgttcatgtgatgagactgtaaacctcatttttcggttcctctgtttaaaaaaacatctgaaggatgaactaaggctgctggtgccctgagcaactgataatgcaaatgtggacaaagtgtctgttttctactctagcctgttcatatggaccaaatttcaacaaggaactcaaggaaaatttgtacctgccgtatttatgctttcatgtaaaaaagggttggggggaggggtgtctttttgcttttggtgaactttttttcaaaatcatttttccactgtttctgtctggttttaaaacaaattacagttttgtatggattttttaaatgtacattttggaacaaatgatcaaatattttctgaaataacaataaaaggcagaa

SEQ ID NO: 332938 - DNA, 440 bp, Homo sapiens
ttcatttcacctcggtgatttggtgcttctacgtggtggtgacggtgagccattctcaggactgctgaagcgggagagctcaaaccaaggggcaattccagctctgggattgctaatcaaatgactgcaaaggaccccttgctctttttctttttctgttaaggggaacaagtttcttagaaccttcttagcttcttagaactgaagctatgtttgcatcctcatggtattacagagagatgccattttatagctggagagagtcatcttggccaacagtcaccacttgttataatcattatgcaatactgcagtaatgataccatgtatctacataatactgtattgttttacaaggctcttctacaaacactgtcccataagatacatttgatgttcattctgatacccatgttacagattgaagagttccaagctca

SEQ ID NO: 332939 - DNA, 415 bp, Homo sapiens
cctagcactatgctaagacttggcaatacaaagatggtaatggaagattctttatcttcagtggttcattctcattctgaagagacagttatagacataagtaaggacagttgagagtgatgaacaccataacacagtatgtatcatctgctctgcaacccagaagaagaccctcaacagagacagccaggaagacttccagtggatgtcggcctttgaaccatggctttgcagcttgaaggcctcccaaagctgggctcttacctcacagtgtccaatgcaaacactgctagagctcgtagccctggaattcccttccctttggtttataatgacatggagagtaggtctctcttggttgttctagaggcagaaagaattgctataatattagttctcgaagagcctcttttat

SEQ ID NO: 332940 - DNA, 474 bp, Homo sapiens
cttctgaattatttccaagagccctcttctccagtccctgtctcttatttctcaatccaaacctcaccctctgacactagacccaaggctgctggaatttgggaatggacctgaatgcccttgaatttcagcagcctggtgcagtgggactgtgggactcgtgggacatgggactgtgtgttaaagcagcccagaggagcctggccctctctcatccccctgcacttttcccccttccctgaatcttcagttagggaattagcaaatttaccatctgcttctcttgtttccaggaggaaattccccgccagctccagtatatttgcctgtacctggtgcatatagctggagcatacctcttaaagtgagtgagaccatggagccagccagatttccttgcccttttatgtccatgcatctgtccacacactcatataattatcaggcatttgttgacatcctctgtgtgcctag

SEQ ID NO: 332941 - DNA, 4729 bp, Homo sapiens
  misc_feature (4705)..(4705): n is a, c, g, or t
  misc_feature (4714)..(4714): n is a, c, g, or t
ccccgaagttgttccgcgctgggcgggcgagcggctgtgggagagcgggcggcgggccggcgggcggaccgggccggtgctggagaagtttgcgctgcggttcgtgagcgcagggtgcgggccccgccggccgctgcgcgcccgctgccatggctttccgcaggaggacgaaaagttacccgctcttcagccaggagttcgtcatccacaaccatgcggacatcggcttctgcctggtgctctgcgtcctcatcgggcttatgttcgaggtcacagccaagactgcctttctatttattttacctcagtataacattagcgtgcctacagcagacagtgagaccgtgcactaccactatggccctaaggacctggtcacaatcttgttctacatcttcatcaccatcatcttgcatgctgtggttcaggagtacattttagataaaatcagcaaacggcttcatctctccaaagtcaaacacagcaagttcaatgaatctggacagctggtcgtctttcatttcacctcggtgatttggtgcttctacgtggtggtgacggaaggatacttaacaaacccaagaagcctctgggaagactacccgcatgtgcacctccccttccaggtgaagtttttctacctatgccagctggcctactggctgcacgcacttcctgagctatacttccagaaggtacggaaggaggaaattccccgccagctccagtatatttgcctgtacctggtgcatatagctggagcatacctcttaaacctgagccgcctgggcctgatcttgctgctgctgcagtactcaactgagttcctcttccacacggctagactcttctactttgcagatgaaaacaacgagaaactgttcagtgcctgggctgctgtttttggggttacccgcctcttcatcctcacccttgccgtgctggccattggctttggactggctcgcatggaaaaccaggcatttgatcccgagaaagggaacttcaacactttgttttgcaggctctgcgtgctgctgctggtgtgtgccgcccaggcctggctcatgtggcgcttcatccactcccagctgcggcactggcgggaatactggaatgagcagagtgcaaagcggagagtcccagccacacccagactaccagccaggctcatcaagagggaatctggttaccatgaaaatggagtggtgaaggcagagaacggaacctccccacggactaagaaactcaagtctccctaaggccaaagtgctaagaacaggaatcctcttggtgggggccgagcagggggcaaggagcccaggccccctccctgcctcctccttcctgcctgtgatgctccgtctcaaacagccgaaacctgtcttgcaatggggggagggggcgtttcgctttccttcttcttggcttcctcttattcttccacaaaccattctcaataaagccaaaaatctttctctttctccccctcaggccacctcctgtcctcactcctgtcctgtgctggcttttctggaacgccaggcgcccatggctggcacctttctgcttgctctgtttcttgccttatggctgctgcttttcctttttacttcctattttcaccttatcttgcaatttttctgtctgatttttacaatgggaggggagctaagattgcagtcctgtccttcggtcccccagggcctgccggtcagaagcctggggctggtaggcccttggtggtcctcatgtggatgggcaagaagagagcggccatctcggatcataatctccttggtgctgattaactgacgagatatatgattccagttctgcatgtaccatcttgaggcacagcagccactgctcgttgtaaatgccaaggcatttggctttgggacgtgacaactcaatccagaaggatggtgtgaactcggttgggtcccgtgactcgagctcctaccagtggctggccgcggattggaagccagcctgctgtcgctctgtggggggggacatgtcttcccactgcttagagcgagagcagagcaaactgcgcagcaggcacctccagaaaggtaatggtggcagaacccacagtggagtcgacctaggcctttctccagcagtcccagtcgccattgctttttcagccattcacaagcattcaaaaccaaaccaaacagcagttcatatacctgcctgagataggctggtcctcacctccagagccagccagccccgtcaggggccaaacttactaccttgacttcatctctagctgcagaaacactaagtctcaagggcttcagccccatgctggtcccttggtgttcagggagggtcacttggaccgctgttcatctggccgcccttgttgagtgttctttggaattgtcgttttttgagcacaactacagcattttagactgcatgaaaccatgactgactgagagtcactctctgggtagatgataggcgcctttctggccccttccctcacagattctttcccctcccctccacctgaagagaaggcctccaagtccttttggtgccttgtgaggacttttagaaggggcgttcagctttaaaaagccggtcctaattacggccggacgcagtagcttacgcctgttatcccagcactttgggaggtcgaggtgggcagatcacctgaggttaggagttcaagaccagcctggccaacatggtgaaaccccatctctactaaaaatacaaaaaattaggtgtagtggcaggcacctgtaatcccagctactcgggaggctgaggcaggagaatcgcttgaacctagaaggtggaggttgcagtgagcggagattgtaccatggcactccagcctggacaacaagagcgaaattctgtctaaaaaaacaaaagtcccaattaagaacctccgaactctgttttgaggcaaaggggagtagttcttggtaggtgcaggaatagtagtgtcatttggaatactggtcatctttctgacatcacagtagaaaccaaaccttggatttagattcaaaaggggggaaatgggtcttttcatcaaggcaactccccttctccaagtcacttacatcatagataaattttagcttcccagtaactgagggatttgtttcctaacgccattggaggccttcatccctctctacgataaggttgcagaaatgggaagagctacccgtggttgcttttgattacccttaggaagtgagacagtgtttttgaaaatatgtatttctcccatttctccctctccttccctgacacttctctgggctgcacagcagaaacgttggtaaaagggcagtttggtttcaacacagcagacctgatatgggatcccttagccactttagtcaaacagccctgacagagtctataattgagttcaggccccccaccttgcctaataactgcaaatcgcatgttcagccagcagcctcctaagcccaccttcctcccccattagagaacacccatcctaggtgctctccaggctgtgtcattggcagggcttcacatgcaggaggcctctctcaggtgagtccaggttaaactgttgagttgtggcttcaacagatatgtatggcatgctgggatgtgccaggtgcctgcgttgtgccagttgctggagaggtagtgtgagcagagcagctgaaatcttgccatcaagcaaccctcattctcatgcctgtaggtttccattgctctgtcccaggacacttgcgtgccagagacgccacaacttcatgtccctgtctcttgcaagctccccgtgctgccagtacttcatgccttggatgtggtcccaccagcccagtggccggggtcagcttaggctctgcttcccagtggacgggtgtgctaagggtttattttatgtaaaaaaaaaaaaaaaacaaaaaaaaaccctgagaccatgagtggggctggcatcttgccagcctgggcttcagggatgtttggggggggtggttagagggtagttgtagggtactttgtcacccccctccccctgccaccctccctggcacgtttatttcacagcagagccaagtctgtggcaggttgacacagactgtgttgccagagctgaaataattccacttcatcctatgagcgtgttgggctagcttgttctaattttggccactttggctgttttcttcagttttatgcattctctcctgccccaaagtgccaagccatttgtgaaggctctgccagacacctccaagcttgagagctcagcaccatgcaccaagagcaggagaaaagacgtaaacctaccccagcaactgtggcctctcgacagccctggctaactaacttacatttgtggggaagccaacagacacagcaggaggagagggaggtggcgctggtggaccaaggatctgtgctacccgctcccctccttggaggtgcagtgatgatgggagttatttttaccatccgggcgctgatagctgcactattaataaattgcatgtgttccttttgaaggtaggggatggttctgggtgagaggggagcaggctgagccggcgggggatctgctgtcctcccttttgagtcagttctaatcccatgtgtgtctgggccaccagaccgaaatggttgctgagaaacttgtctgttcatgtcccaaggcataacttcccaacaatataanctcgtcccnattccatgcaaccca

SEQ ID NO: 332942 - DNA, 1931 bp, Homo sapiens
agcggctctttggcttccgggcgcacgctactctgtcgccgccgtcagaccggaattgccggtgccgccgccaccgctgtctgtgcgcccacctctgctgctaccatggggatcttagagaagatctcggagatcgagaaggagatcgctcggacacagaagaacaaggccactgagtatcatctgggcctgctgaaagctaagctcgccaagtatcgggcccagctcctggaaccgtccaaatcggcctcgtccaaaggagagggctttgatgtcatgaagtcgggtgatgcccgtgtggcgctgattggatttccctctgtgggtaagtccacattcttgagtctgatgacctccacggccagcgaggcagcgtcctatgagttcaccactctgacgtgtattcctggggtcattgaatacaaaggtgccaacatccagctcctggaccttcctggaatcattgaaggcgcagcccaaggaaaaggccgtggccggcaggtgatcgctgtggcgcgcacggctgacgtcatcatcatgatgctggatgccaccaagggagaggtgcagaggtctctgctggagaaggagctggagtctgtgggcatccgcctcaacaagcacaagcctaacatctacttcaagcccaagaaaggtggtggcatctcctttaactcgacagtcacgctgacccagtgctcggaaaagctggtgcagctcatcctgcacgaatacaagatcttcaatgcagaagtgcttttccgagaagactgctccccggacgagttcatcgatgtgatcgtgggcaaccgggtgtacatgccctgcctgtatgtttataacaaaatcgaccagatctccatggaagaggtggaccgcctggcccgaaaacccaacagtgtggtcatcagctgcggcatgaagctgaacctggactatctgctggagatgctttgggagtacttggccctgacctgcatctacaccaagaagagaggacagaggccagacttcacagacgccatcattctccggaaaggggcctcagtggagcacgtgtgccaccgcatccaccggtcactcgccagccagttcaagtacgccctggtgtggggcaccagcaccaagtacagtccgcagcgggtgggcctgacccacaccatggagcatgaggacgtcatccagatcgtgaagaagtaacggcgcctgccgggcctcccgcccacctgcctcgtctccctggggaggtggtcccactgggacacacaaacacccaaacagaaaaatacaaatacacgtaccccaggaaggggtccctcaagtctctgctatttacagaagtttcttcagtaggcagacgaagagtgtgttggggcaaaggggctcggttggaggcatttcccataagactgagccctctcatgggggttttgagtttgtagtgctgagcctgcatctgtgcctcccagccccctgcactgagggagcaagttgcccacatgcccgccagccagggcctaaagcagatggcatgctcagtgccaggctggtagctgggcctgtttgggtccctggaggctgtggctgctgtcatggcacctcactccctcagctcttgccagcttctctgacacttgggttgggggcccttccaggaggaaacccccttgggtgccccacacagggctctccatgatgggaaccagtggttagtggcttcaaaggcccagctgacaccctccacagcctaaggggtgtcctaaagtgcctccccctgtattccccctcccagggcagcccctgcccagcacaaaaccccaggaccctggctctgcacgcctggggcagggacttttgagtttaggatctgtattttctaagtccccagttctcctggctctcctttctgaaataaaggattgaaaacggtt

SEQ ID NO: 332943 - DNA, 915 bp, Homo sapiens
agcggctctttggcttccgggcgcacgctactctgtcgccgccgtcagaccggaattgccggtgccgccgccaccgctgtctgtgcgcccacctctgctgctaccatggggatcttagagaagatctcggagatcgagaaggagatcgctcggacacagaagaacaaggccactgagtatcatctgggcctgctgaaagctaagctcgccaagtatcgggcccagctcctggaaccgtccaaatcggcctcgtccaaaggagagggctttgatgtcatgaagtcgggtgatgcccgtgtggcgctgattggatttccctctgtgggtaagtccacattcttgagtctgatgacctccacggccagcgaggcagcgtcctatgagttcaccactctgacgtgtattcctggggtcattgaatacaaaggtgccaacatccagctcctggaccttcctggaatcattgaaggcgcagcccaaggaaaaggccgtggccggcaggtgatcgctgtggcgcgcacggctgacgtcatcatcatgatgctggatgccaccaagggagaggtgcagaggtccgcagggtggggcatggggcaggctcacatgtctggggagggccaatgtgtccctgagctcgtactaggcggcctgtgggtgtttggctctctcacacgtgagagtagtggtaggacttgtcacagactaaacccaacaccacccagcctatggcgtcttctcctcaaggcttgtgtccagccagcacagaggtatcttgggactgggggccgaggggcttggcctggccctgcttcctgttcagaggcacaggtgcctcatcactgccagaacctgccaggagccagccccaggcacagaagcattgttcatccacatcctggcagaggggtacaccag

SEQ ID NO: 332944 - DNA, 543 bp, Homo sapiens
gaggttatccgctccaatagtgagaagtggagaccccagcctctgaattcacaggggcccctgcctgactggccgcctccctctttgcagctgcggcatgaagctgaacctggactatctgctggagatgctttgggagtacttggccctgacctgcatctacaccaagaagagaggacagaggccagacttcacagacgccatcattctccggaaaggggcctcagtggagcacgtgtgccaccgcatccaccggtcactcgccagccagttcaagtacgccctggtgtggacagggctctccatgatgggaaccagtggttagtggcttcaaaggcccagctgacaccctccacagcctaaggggtgtcctaaagtgcctccccctgtattccccctcccagggcagcccctgcccagcacaaaaccccaggaccctggctctgcacgcctggggcagggacttttgagtttaggatctgtattttctaagtccccagttctcctggctctcctttctgaaataaaggattgaaaacggtt

SEQ ID NO: 332945 - DNA, 672 bp, Homo sapiens
ggtgggcgtaggacagccgttattatcctgttactccttttatgatggtggtgtcggattttcttctgaaataagtctccgtcagtaaaacatgtggattaaagaaaaatgccaagcttgtgctagtatgtggcagaggctgtggtaggtctgtaaaggacaggagtccagggcgccgtgggctgggtagcagtcacatgggtccacatatgtaactgcatccctcacacccatccaggaaaaggccgtggccggcaggtgatcgctgtggcgcgcacggctgacgtcatcatcatgatgctggatgccaccaagggagaggtgcagaggtccgcagggtggggcatggggcaggctcacatgtctggggagggccaatgtgtccctgagctcgtactaggcggcctgtgggtgtttggctctctcacacgtgagagtagtggtaggacttgtcacagactaaacccaacaccacccagcctatggcgtcttctcctcaaggcttgtgtccagccagcacagaggtatcttgggactgggggccgaggggcttggcctggccctgcttcctgttcagaggcacaggtgcctcatcactgccagaacctgccaggagccagccccaggcacagaagcattgttcatccacatcctggcagaggggtacaccag

SEQ ID NO: 332946 - DNA, 1841 bp, Homo sapiens
agcggctctttggcttccgggcgcacgctactctgtcgccgccgtcagaccggaattgccggtgccgccgccaccgctgtctgtgcgcccacctctgctgctaccatggggatcttagagaagatctcggagatcgagaaggagatcgctcggacacagaagaacaaggccactgagtatcatctgggcctgctgaaagctaagctcgccaagtatcgggcccagctcctggaaccgtccaaatcggcctcgtccaaaggagagggctttgatgtcatgaagtcgggtgatgcccgtgtggcgctgattggatttccctctgtgggtaagtccacattcttgagtctgatgacctccacggccagcgaggcagcgtcctatgagttcaccactctgacgtgtattcctggggtcattgaatacaaaggtgccaacatccagctcctggaccttctggatgccaccaagggagaggtgcagaggtctctgctggagaaggagctggagtctgtgggcatccgcctcaacaagcacaagcctaacatctacttcaagcccaagaaaggtggtggcatctcctttaactcgacagtcacgctgacccagtgctcggaaaagctggtgcagctcatcctgcacgaatacaagatcttcaatgcagaagtgcttttccgagaagactgctccccggacgagttcatcgatgtgatcgtgggcaaccgggtgtacatgccctgcctgtatgtttataacaaaatcgaccagatctccatggaagaggtggaccgcctggcccgaaaacccaacagtgtggtcatcagctgcggcatgaagctgaacctggactatctgctggagatgctttgggagtacttggccctgacctgcatctacaccaagaagagaggacagaggccagacttcacagacgccatcattctccggaaaggggcctcagtggagcacgtgtgccaccgcatccaccggtcactcgccagccagttcaagtacgccctggtgtggggcaccagcaccaagtacagtccgcagcgggtgggcctgacccacaccatggagcatgaggacgtcatccagatcgtgaagaagtaacggcgcctgccgggcctcccgcccacctgcctcgtctccctggggaggtggtcccactgggacacacaaacacccaaacagaaaaatacaaatacacgtaccccaggaaggggtccctcaagtctctgctatttacagaagtttcttcagtaggcagacgaagagtgtgttggggcaaaggggctcggttggaggcatttcccataagactgagccctctcatgggggttttgagtttgtagtgctgagcctgcatctgtgcctcccagccccctgcactgagggagcaagttgcccacatgcccgccagccagggcctaaagcagatggcatgctcagtgccaggctggtagctgggcctgtttgggtccctggaggctgtggctgctgtcatggcacctcactccctcagctcttgccagcttctctgacacttgggttgggggcccttccaggaggaaacccccttgggtgccccacacagggctctccatgatgggaaccagtggttagtggcttcaaaggcccagctgacaccctccacagcctaaggggtgtcctaaagtgcctccccctgtattccccctcccagggcagcccctgcccagcacaaaaccccaggaccctggctctgcacgcctggggcagggacttttgagtttaggatctgtattttctaagtccccagttctcctggctctcctttctgaaataaaggattgaaaacggtt

SEQ ID NO: 332947 - DNA, 1320 bp, Homo sapiens
agcggctctttggcttccgggcgcacgctactctgtcgccgccgtcagaccggaattgccggtgccgccgccaccgctgtctgtgcgcccacctctgctgctaccatggggatcttagagaagatctcggagatcgagaaggagatcgctcggacacagaagaacaaggccactgagtatcatctgggcctgctgaaagctaagctcgccaagtatcgggcccagctcctggaaccgtccaaatcggcctcgtccaaaggagagggctttgatgtcatgaagtcgggtgatgcccgtgtggcgctgattggatttccctctgtgggtaagtccacattcttgagtctgatgacctccacggccagcgaggcagcgtcctatgagttcaccactctgacgtgtattcctggggtcattgaatacaaaggtgccaacatccagctcctggaccttcctggaatcattgaaggcgcagcccaaggaaaaggccgtggccggcaggtgatcgctgtggcgcgcacggctgacgtcatcatcatgatgctggatgccaccaagggagaggtgcagaggtctctgctggagaaggagctggagtctgtgggcatccgcctcaacaagcacaagcctaacatctacttcaagcccaagaaaggtggtggcatctcctttaactcgacagtcacgctgacccagtgctcggaaaagctggtgcagctcatcctgcacgaatacaagatcttcaatgcagaagtgcttttccgagaagactgctccccggacgagttcatcgatgtgatcgtgggcaaccgggtgtacatgccctgcctgtatgtttataacaaaatcgaccagatctccatggaagaggtggaccgcctggcccgaaaacccaacagtgtggtcatcagctgcggcatgaagctgaacctggactatctgctggagatgctttgggagtacttggccctgacctgcatctacaccaagaagagaggacagaggccagacttcacagacgccatcattctccggaaaggggcctcagtggagcacgtgtgccaccgcatccaccggtcactcgccagccagttcaagtacgccctggtgtggggcaccagcaccaagtacagtccgcagcgggtgggcctgacccacaccatggagcatgaggacgtcatccagatcgtgaagaagtaacggcgcctgccgggcctcccgcccacctgcctcgtctccctggggaggtggtcccactgggacacacaaacacccaaacagaaaaatacaaatacacgtaccccaggaaggggtccctca

SEQ ID NO: 332948 - DNA, 1350 bp, Homo sapiens
agcggctctttggcttccgggcgcacgctactctgtcgccgccgtcagaccggaattgccggtgccgccgccaccgctgtctgtgcgcccacctctgctgctaccatggggatcttagagaagatctcggagatcgagaaggagatcgctcggacacagaagaacaaggccactgagtatcatctgggcctgctgaaagctaagctcgccaagtatcgggcccagctcctggaaccgtccaaatcggcctcgtccaaaggagagggctttgatgtcatgaagtcgggtgatgcccgtgtggcgctgattggatttccctctgtgggtaagctgcggcatgaagctgaacctggactatctgctggagatgctttgggagtacttggccctgacctgcatctacaccaagaagagaggacagaggccagacttcacagacgccatcattctccggaaaggggcctcagtggagcacgtgtgccaccgcatccaccggtcactcgccagccagttcaagtacgccctggtgtggggcaccagcaccaagtacagtccgcagcgggtgggcctgacccacaccatggagcatgaggacgtcatccagatcgtgaagaagtaacggcgcctgccgggcctcccgcccacctgcctcgtctccctggggaggtggtcccactgggacacacaaacacccaaacagaaaaatacaaatacacgtaccccaggaaggggtccctcaagtctctgctatttacagaagtttcttcagtaggcagacgaagagtgtgttggggcaaaggggctcggttggaggcatttcccataagactgagccctctcatgggggttttgagtttgtagtgctgagcctgcatctgtgcctcccagccccctgcactgagggagcaagttgcccacatgcccgccagccagggcctaaagcagatggcatgctcagtgccaggctggtagctgggcctgtttgggtccctggaggctgtggctgctgtcatggcacctcactccctcagctcttgccagcttctctgacacttgggttgggggcccttccaggaggaaacccccttgggtgccccacacagggctctccatgatgggaaccagtggttagtggcttcaaaggcccagctgacaccctccacagcctaaggggtgtcctaaagtgcctccccctgtattccccctcccagggcagcccctgcccagcacaaaaccccaggaccctggctctgcacgcctggggcagggacttttgagtttaggatctgtattttctaagtccccagttctcctggctctcctttctgaaataaaggattgaaaacggtt

SEQ ID NO: 332949 - DNA, 1110 bp, Homo sapiens
gaggttatccgctccaatagtgagaagtggagaccccagcctctgaattcacaggggcccctgcctgactggccgcctccctctttgcagctgcggcatgaagctgaacctggactatctgctggagatgctttgggagtacttggccctgacctgcatctacaccaagaagagaggacagaggccagacttcacagacgccatcattctccggaaaggggcctcagtggagcacgtgtgccaccgcatccaccggtcactcgccagccagttcaagtacgccctggtgtggggcaccagcaccaagtacagtccgcagcgggtgggcctgacccacaccatggagcatgaggacgtcatccagatcgtgaagaagtaacggcgcctgccgggcctcccgcccacctgcctcgtctccctggggaggtggtcccactgggacacacaaacacccaaacagaaaaatacaaatacacgtaccccaggaaggggtccctcaagtctctgctatttacagaagtttcttcagtaggcagacgaagagtgtgttggggcaaaggggctcggttggaggcatttcccataagactgagccctctcatgggggttttgagtttgtagtgctgagcctgcatctgtgcctcccagccccctgcactgagggagcaagttgcccacatgcccgccagccagggcctaaagcagatggcatgctcagtgccaggctggtagctgggcctgtttgggtccctggaggctgtggctgctgtcatggcacctcactccctcagctcttgccagcttctctgacacttgggttgggggcccttccaggaggaaacccccttgggtgccccacacagggctctccatgatgggaaccagtggttagtggcttcaaaggcccagctgacaccctccacagcctaaggggtgtcctaaagtgcctccccctgtattccccctcccagggcagcccctgcccagcacaaaaccccaggaccctggctctgcacgcctggggcagggacttttgagtttaggatctgtattttctaagtccccagttctcctggctctcctttctgaaataaaggattgaaaacggtt

SEQ ID NO: 332950 - DNA, 610 bp, Homo sapiens
gagtggtcacatccacatcttcccagttccccactccctccctgcgacacctctcctgtcagctgtctctgcctcagcccaggaggttgacatctccttgcacacctccttacaccctccctgggtgcacagcatgtctgggtactggttccacgagtgccgtgggactgccacctgcttaaagttctctggggccaagagggcctggaggattgtgtggggttaggagaggctcctgatgtatatggggaaccccatcagaatccagatccctgcctctacctgagacagtcctgaggcctccaaggaacagatgggcctctggtgtctgacccatccaggacagggccagaggtgagccctctggctgggaggtctcttcacagccacctaggtcaccaagccgagggtgagagggtctcctcctgctgcctgcacctgcaggcccccagcccctggggcctctcccagaaggccagggacaaggctcctcagtgcaatgatctccttttctcctagttccacattcttgagtctgatgacctccacggccagcgaggcagcgtcctatgagttcaccactctgacgtgtattcctggggtcattgaa

SEQ ID NO: 332951 - DNA, 307 bp, Homo sapiens
ggcccttccaggaggaaacccccttgggtgccccacacagggctctccatgatgggaaccagtggttagtggcttcaaaggcccagctgacaccctccacagcctaaggggtgtcctaaagtgcctccccctgtattccccctcccagggcagcccctgcccagcacaaaaccccaggaccctggctctgcacgcctggggcagggacttttgagtttaggatctgtattttctaagtccccagttctcctggctctcctttctgaaataaaggattgaaaacggttcctgttcagactgagaacac

SEQ ID NO: 332952 - DNA, 953 bp, Homo sapiens
ttctccccatcctgccctgcagagaggccagacttcacagacgccatcattctccggaaaggggcctcagtggagcacgtgtgccaccgcatccaccggtcactcgccagccagttcaagtacgccctggtgtggggcaccagcaccaagtacagtccgcagcgggtgggcctgacccacaccatggagcatgaggacgtcatccagatcgtgaagaagtaacggcgcctgccgggcctcccgcccacctgcctcgtctccctggggaggtggtcccactgggacacacaaacacccaaacagaaaaatacaaatacacgtaccccaggaaggggtccctcaagtctctgctatttacagaagtttcttcagtaggcagacgaagagtgtgttggggcaaaggggctcggttggaggcatttcccataagactgagccctctcatgggggttttgagtttgtagtgctgagcctgcatctgtgcctcccagccccctgcactgagggagcaagttgcccacatgcccgccagccagggcctaaagcagatggcatgctcagtgccaggctggtagctgggcctgtttgggtccctggaggctgtggctgctgtcatggcacctcactccctcagctcttgccagcttctctgacacttgggttgggggcccttccaggaggaaacccccttgggtgccccacacagggctctccatgatgggaaccagtggttagtggcttcaaaggcccagctgacaccctccacagcctaaggggtgtcctaaagtgcctccccctgtattccccctcccagggcagcccctgcccagcacaaaaccccaggaccctggctctgcacgcctggggcagggacttttgagtttaggatctgtattttctaagtccccagttctcctggctctcctttctgaaataaaggattgaaaacggtt

SEQ ID NO: 332953 - DNA, 617 bp, Homo sapiens
  misc_feature (617)..(617): n is a, c, g, or t
agcggctctttggcttccgggcgcacgctactctgtcgccgccgtcagaccggaattgccggtgccgccgccaccgctgtctgtgcgcccacctctgctgctaccatggggatcttagagaagatctcggagatcgagaaggagatcgctcggacacagaagaacaaggccactgagtatcatctgggcctgctgaaagctaagctcgccaagtatcgggcccagctcctggaaccgtccaaatcggcctcgtccaaaggagagggctttgatgtcatgaagtcgggtgatgcccgtgtggcgctgattggatttccctctgtgggtaagtccacattcttgagtctgatgacctccacggccagcgaggcagcgtcctatgagttcaccactctgacgtgtattcctggggtcattgaatacaaaggtgccaacatccagctcctggaccttcctggaatcattgaaggcgcagcccaaggaaaaggccgtggccggcaggtgatcgctgtggcgcgcacggctgacgtcatcatcatgatgctggatgccaccaagggagaggtgcagaggacaaggagtctgattttctttgtggacatccgcctcataactan

SEQ ID NO: 332954 - DNA, 1839 bp, Homo sapiens
  misc_feature (212)..(212): n is a, c, g, or t
  misc_feature (223)..(223): n is a, c, g, or t
  misc_feature (308)..(308): n is a, c, g, or t
  misc_feature (391)..(391): n is a, c, g, or t
acaggcgagacgtgagacctcggatttatttgtcgctggcacttgctatccacggtctctctgggatacggacgagtgtgcggtgggcacttcagggtaaggatagcctccggggattggccgtttggggctcgatagcgttctgtcgcgtgtgcgctacttccacgattgtggcctctgtctgcgctgcaccgtggccgcgcagtgcaganagtccgtatgntaatcttgaccaacatcgtgtgacggtgtgataccatggagggtccatggaagtacgcaaggtggcgccaatcaatacgcatccntccgtggggacctgatgcttgcgcacagtcgatggcaacgacgcaactcgcagggtgaatgaggactcggctggacggtgaangggctgatcggctggttggccgcggcacctgggttagcgtcagtcatcatagatgctaggattgccaccaaagggacacggtgcagacggtctctgctggagaaggagctggagtctgtgggcatccgcctcaacaagcacaagcctaacatctacttcaagcccaagaaaggtggtggcatctcctttaactcgacagtcacgctgacccagtgctcggaaaagctggtgcagctcatcctgcacgaatacaagatcttcaatgcagaagtgcttttccgagaagactgctccccggacgagttcatcgatgtgatcgtgggcaaccgggtgtacatgccctgcctgtatgtttataacaaaatcgaccagatctccatggaagaggtggaccgcctggcccgaaaacccaacagtgtggtcatcagctgcggcatgaagctgaacctggactatctgctggagatgctttgggagtacttggccctgacctgcatctacaccaagaagagaggacagaggccagacttcacagacgccatcattctccggaaaggggcctcagtggagcacgtgtgccaccgcatccaccggtcactcgccagccagttcaagtacgccctggtgtggggcaccagcaccaagtacagtccgcagcgggtgggcctgacccacaccatggagcatgaggacgtcatccagatcgtgaagaagtaacggcgcctgccgggcctcccgcccacctgcctcgtctccctggggaggtggtcccactgggacacacaaacacccaaacagaaaaatacaaatacacgtaccccaggaaggggtccctcaagtctctgctatttacagaagtttcttcagtaggcagacgaagagtgtgttggggcaaaggggctcggttggaggcatttcccataagactgagccctctcatgggggttttgagtttgtagtgctgagcctgcatctgtgcctcccagccccctgcactgagggagcaagttgcccacatgcccgccagccagggcctaaagcagatggcatgctcagtgccaggctggtagctgggcctgtttgggtccctggaggctgtggctgctgtcatggcacctcactccctcagctcttgccagcttctctgacacttgggttgggggcccttccaggaggaaacccccttgggtgccccacacagggctctccatgatgggaaccagtggttagtggcttcaaaggcccagctgacaccctccacagcctaaggggtgtcctaaagtgcctccccctgtattccccctcccagggcagcccctgcccagcacaaaaccccaggaccctggctctgcacgcctggggcagggacttttgagtttaggatctgtattttctaagtccccagttctcctggctctcctttctgaaataaaggattgaaaacggtt

SEQ ID NO: 332955 - DNA, 1828 bp, Homo sapiens
tgctacttaaggcgtcgtggcctcccctgccccgccttagctcccgcgctagagagaaacatgtatcgttttcgatcacagctcttcacggggatttctgctgccgccaccgcccactcttacccccgccgcttctcgactctgttgttagccgaagactcgcctctcagccgcccgccgcacagacgcacgagtaaaaagtgcagctccatcggctgatcctcgctaagctccgactctgggcggcaccgggcgtcccacgatgccgaagaacaagaagcggaacactccccaccgcggtagcagtgctggcggcggcgggtcaggagcagccgcagcgacggcggcgacagcaggtggccagcatcgaaatgttcagccttttagtgatgaagatgcatcaattgaaacaatgagccattgcagtggttatagcgatccttccagttttgctgaagatggaccagaagtccttgatgaggaaggaactcaagaagacctagagtacaagttgaagggattaattgacctaaccctggataagagtgcgaagacaaggcaagcagctcttgaaggtattaaaaatgcactggcttcaaaaatgctgtatgaatttattctggaaaggagaatgactttaactgatagcattgaacgctgcctgaaaaaaggtaagagtgatgagcaacgtgcagctgcagcgttagcatctgttctttgtattcagctgggccctggaattgaaagtgaagagattttgaaaactcttggaccaatcctaaagaaaatcatttgtgatgggtcagctagtatgcaggctaggcaaacttgtgcaacttgctttggtgtttgctgttttattgccacagatgacattactgaactatactcaactctggaatgtttggaaaatatcttcactaaatcctatctcaaagagaaagacactactgttatttgcagcactcctaatacagtgcttcatatcagctctcttcttgcatggacactactgctgaccatatgcccaatcaatgaagtgaagaaaaagcttgagatgcatttccataagcttccaagcctcctctcttgtgatgatgtaaacatgagaatagctgctggtgaatctttggcacttctctttgaattggccagaggaatagagagtgactttttttatgaagacatggagtccttgacgcagatgcttagggccttggcaacagatggaaataaacaccgggccaaagtggacaagagaaagcagcggtcagttttcagagatgtcctgagggcagtggaggaacgggattttccaacagaaaccattaaatttggtcctgaacgcatgtatattgattgctgggtaaaaaaacacacctatgacacctttaaggaggttcttggatcagggatgcagtaccacttgcagtcaaatgaattccttcgaaatgtatttgaacttggacccccagtgatgcttgatgctgcaacgcttaaaacgatgaagatttctcgtttcgaaaggcatttatataactctgcagccttcaaagctcgaaccaaagctagaagcaaatgtcgagataagagagcagatgttggagaattcttctagattttcagaacttgaagactattttctaatttctatttttttttctatttcaatgtatttaaactctagacacagtttttatcctggattaacttagataacttttgtagcagtggttatattgcttataatttaatgtacaatactattgaaactggtgagttctgattattaaatattctctgtaaatcagtaaacatgtataaagta

SEQ ID NO: 332956 - DNA, 686 bp, Homo sapiens
atagtaatgactaactattttttaggcatttccataagcttccaagcctcctctcttgtgatgatgtaaacatgagaatagctgctggtgaatctttggcacttctctttgaattggccagaggaatagagagtgtaagtatctaactggcagaggaaaaagcttgtgtcacaaggcccattgttccatcattaccttgcaattgagaattgggcaataactttggaacatggccagcttgagaacccagtgatttatttccctacttcttggcagtggtggtgtaatactttagagagcagaaaccagtaggggttggtacagcagtgtttgactgtggttcattatacttaatttttgctatctatagaactgaagtttagggatcctcatggagagagttttgtctaatataatctttatgaaactgcttgaatttctcagatacccaatacatcaagctaatgaaggcatgtgatgcttcataattaatatcaaacaaatgaataaccaaagatggaaataaacactgctcattaagactgggacatgtgctttgcagttacccattcacttgtccactcacagatgttagttaccatggcttggctctcgaagggatttgagtttgtgatagtttgatcagtcgacccaatttgctttgtacctgtttttggtttagcact

SEQ ID NO: 332957 - DNA, 392 bp, Homo sapiens
taatacaatgtaagtgctatgtaaatagttgttatactttattgtttagggaatagtggaaagaaagaatagtctatacatgttcagtatagttgcaatttttttctgaatattttcagtccatggttggttgaatccgtgatgcagaaccaaccagatatggaggattgactatatatgtaaaagattgagattaaccttgaattgtggagggacagaggtttgtctgttaccaacaggaaagaggataataggtaaggatgctgatgactttatagagggttggtgggaaacagttctttcttggtgccttaatgttttctgaattaaagaagattgaaataagataactctactgttatttatttatttatttttgagctgctgttacg

SEQ ID NO: 332958 - DNA, 2512 bp, Homo sapiens
agcgggttaaaaccagactgcactccttctggctcctggttcattcaaggtctacatagttaaaggttgttccagagggatgtgtgtaattcctcccagtatttgatgttcctttattacttattttcacttgagccaacagcctgaactggtcaggctttgggctgatgccagctgctttatctggtagcactgttacataaaattaacatttattggtgatcactaggtgccaacattatgcgaagaactttacgtggacatcccatttaattctcagaagccgatcacaagctcttcacggggatttctgctgccgccaccgcccactcttacccccgccgcttctcgactctgttgttagccgaagactcgcctctcagccgcccgccgcacagacgcacgagtaaaaagtgcagctccatcggctgatcctcgctaagctccgactctgggcggcaccgggcgtcccacgatgccgaagaacaagaagcggaacactccccaccgcggtagcagtgctggcggcggcgggtcaggagcagccgcagcgacggcggcgacagcaggtggccagcatcgaaatgttcagccttttagtgatgaagatgcatcaattgaaacaatgagccattgcagtggttatagcgatccttccagttttgctgaagatggaccagaagtccttgatgaggaaggaactcaagaagacctagagtacaagttgaagggattaattgacctaaccctggataagagtgcgaagacaaggcaagcagctcttgaaggtattaaaaatgcactggcttcaaaaatgctgtatgaatttattctggaaaggagaatgactttaactgatagcattgaacgctgcctgaaaaaaggtaagagtgatgagcaacgtgcagctgcagcgttagcatctgttctttgtattcagctgggccctggaattgaaagtgaagagattttgaaaactcttggaccaatcctaaagaaaatcatttgtgatgggtcagctagtatgcaggctaggcaaacttgtgcaacttgctttggtgtttgctgttttattgccacagatgacattactgaactatactcaactctggaatgtttggaaaatatcttcactaaatcctatctcaaagagaaagacactactgttatttgcagcactcctaatacagtgcttcatatcagctctcttcttgcatggacactactgctgaccatatgcccaatcaatgaagtgaagaaaaagcttgagatgcatttccataagcttccaagcctcctctcttgtgatgatgtaaacatgagaatagctgctggtgaatctttggcacttctctttgaattggccagaggaatagagagtgactttttttatgaagacatggagtccttgacgcagatgcttagggccttggcaacagatggaaataaacaccgggccaaagtggacaagagaaagcagcggtcagttttcagagatgtcctgagggcagtggaggaacgggattttccaacagaaaccattaaatttggtcctgaacgcatgtatattgattgctgggtaaaaaaacacacctatgacacctttaaggaggttcttggatcagggatgcagtaccacttgcagtcaaatgaattccttcgaaatgtatttgaacttggacccccagtgatgcttgatgctgcaacgcttaaaacgatgaagatttctcgtttcgaaaggcatttatataactctgcagccttcaaagctcgaaccaaagctagaagcaaatgtcgagataagagagcagatgttggagaattcttctagattttcagaacttgaagactattttctaatttctatttttttttctatttcaatgtatttaaactctagacacagtttttatcctggattaacttagataacttttgtagcagtggttatattgcttataatttaatgtacaatactattgaaactggtgagttctgattattaaatattctctgtaaatcagtaaacatgtataaagtatttgtaatgtttggtcataatttatttatgaagacagcaaaagactgatttcatgatggggaaaacaattagccaaagtttaatttcttacactgtggttgtcaagaatactgatttactataatgatatatacatgcaagatatttaacttaatatcttagacaagagttctgggtacaattttgggatctagttcccctggaaaagctgctgtatttttaatttttaatggaatgtagcttttaaaatcctgtcactggcatcaacaaaaggaattataccatgagaccttatagctgtacttaaaagccattcagttcagctattgggagttcatgatgaattagcatatgccagaaaggttgctaaccttaacatctgagagcagtaacactgattttatctgctgtatgagactttgtgcattttactttgaaataaagatttttttccacactgaaaaaaaaaaa

SEQ ID NO: 332959 - DNA, 1991 bp, Homo sapiens
attgtaatgtgttttaaaggctttttgatagagggtaggcttctttaaagctttctatctttgaattacagttgaagtttaatgatctagtaagcacctgtaaagcatacagaaaggaaacaaggggatagttcaccctttcagaatgctttactgacatagactcataaaaatgattcaataatttaaattatagattatggagctgcaattgtttcagaaattatgtaattcttttgcatgcttttgattttatggatcaataaaagaagactgaagaggaacagaatcactttgttaaagtcatgctgtgaatttagtagcagagcttgagctgaaacgcacttcctttgatcttagttcaatattctttctctcctcacctcttttatgtataatgtttgggacctaatatattatgctgctgagaacattttcacgttgaattataaaagcaggaagatgtagaattaataagaaataaaatcattaatgtctatatatatatattttttttttagtgtgcaacttgctttggtgtttgctgttttattgccacagatgacattactgaactatactcaactctggaatgtttggaaaatatcttcactaaatcctatctcaaagagaaagacactactgttatttgcagcactcctaatacagtgcttcatatcagctctcttcttgcatggacactactgctgaccatatgcccaatcaatgaagtgaagaaaaagcttgagatgcatttccataagcttccaagcctcctctcttgtgatgatgtaaacatgagaatagctgctggtgaatctttggcacttctctttgaattggccagaggaatagagagtgactttttttatgaagacatggagtccttgacgcagatgcttagggccttggcaacagatggaaataaacaccgggccaaagtggacaagagaaagcagcggtcagttttcagagatgtcctgagggcagtggaggaacgggattttccaacagaaaccattaaatttggtcctgaacgcatgtatattgattgctgggtaaaaaaacacacctatgacacctttaaggaggttcttggatcagggatgcagtaccacttgcagtcaaatgaattccttcgaaatgtatttgaacttggacccccagtgatgcttgatgctgcaacgcttaaaacgatgaagatttctcgtttcgaaaggcatttatataactctgcagccttcaaagctcgaaccaaagctagaagcaaatgtcgagataagagagcagatgttggagaattcttctagattttcagaacttgaagactattttctaatttctatttttttttctatttcaatgtatttaaactctagacacagtttttatcctggattaacttagataacttttgtagcagtggttatattgcttataatttaatgtacaatactattgaaactggtgagttctgattattaaatattctctgtaaatcagtaaacatgtataaagtatttgtaatgtttggtcataatttatttatgaagacagcaaaagactgatttcatgatggggaaaacaattagccaaagtttaatttcttacactgtggttgtcaagaatactgatttactataatgatatatacatgcaagatatttaacttaatatcttagacaagagttctgggtacaattttgggatctagttcccctggaaaagctgctgtatttttaatttttaatggaatgtagcttttaaaatcctgtcactggcatcaacaaaaggaattataccatgagaccttatagctgtacttaaaagccattcagttcagctattgggagttcatgatgaattagcatatgccagaaaggttgctaaccttaacatctgagagcagtaacactgattttatctgctgtatgagactttgtgcattttactttgaaataaagatttttttccacactgaaaaaaaaaaa

SEQ ID NO: 332960 - DNA, 2069 bp, Homo sapiens
  misc_feature (1954)..(1955): n is a, c, g, or t
  misc_feature (1958)..(1959): n is a, c, g, or t
  misc_feature (1963)..(1963): n is a, c, g, or t
  misc_feature (1979)..(1979): n is a, c, g, or t
  misc_feature (1997)..(1997): n is a, c, g, or t
  misc_feature (1999)..(1999): n is a, c, g, or t
tgctacttaaggcgtcgtggcctcccctgccccgccttagctcccgcgctagagagaaacatgtatcgttttcgatcacagctcttcacggggatttctgctgccgccaccgcccactcttacccccgccgcttctcgactctgttgttagccgaagactcgcctctcagccgcccgccgcacagacgcacgagtaaaaagtgcagctccatcggctgatcctcgctaagctccgactctgggcggcaccgggcgtcccacgatgccgaagaacaagaagcggaacactccccaccgcggtagcagtgctggcggcggcgggtcaggagcagccgcagcgacggcggcgacagcaggtggccagcatcgaaatgttcagccttttagtgatgaagatgcatcaattgaaacaatgagccattgcagtggttatagcgatccttccagttttgctgaagatggaccagaagtccttgatgaggaaggaactcaagaagacctagagtacaagttgaagggattaattgacctaaccctggataagagtgcgaagacaaggcaagcagctcttgaaggtattaaaaatgcactggcttcaaaaatgctgtatgaatttattctggaaaggagaatgactttaactgatagcattgaacgctgcctgaaaaaaggtaagagtgatgagcaacgtgcagctgcagcgttagcatctgttctttgtattcagctgggccctggaattgaaagtgaagagattttgaaaactcttggaccaatcctaaagaaaatcatttgtgatgggtcagctagtatgcaggctaggcaaacttgtgcaacttgctttggtgtttgctgttttattgccacagatgacattactgaactatactcaactctggaatgtttggaaaatatcttcactaaatcctatctcaaagagaaagacactactgttatttgcagcactcctaatacagtgcttcatatcagctctcttcttgcatggacactactgctgaccatatgcccaatcaatgaagtgaagaaaaagcttgagatgcatttccataagcttccaagcctcctctcttgtgatgatgtaaacatgagaatagctgctggtgaatctttggcacttctctttgaattggccagaggaatagagagtgactttttttatgaagacatggagtccttgacgcagatgcttagggccttggcaacagatggaaataaacaccgggccaaagtggacaagagaaagcagcggtcagttttcagagatgtcctgagggcagtggaggaacgggattttccaacagaaaccattaaatttggtcctgaacgcatgtatattgattgctgggtaaaaaaacacacctatgacacctttaaggaggttcttggatcagggatgcagtaccacttgcagtcaaatgaattccttcgaaatgtatttgaacttggacccccagtgatgcttgatgctgcaacgcttaaaacgatgaagatttctcgtttcgaaaggcatttatataactctgcagccttcaaagctcgaaccaaagctagaagcaaatgtcgagataagagagcagatgttggagaattcttctagattttcagaacttgaagactattttctaatttctatttttttttctatttcaatgtatttaaactctagacacagtttttatcctggattaacttagataacttttgtagcagtggttatattgcttataatttaatgtacaatactattgaaactggtgagttctgattattaaatattctctgtaaatcagtaaacatgtataaagtatttgtaatgtttggtcataatttatttatgaagacagcaaaagactgatttcatgatggggaaaacaattagccaaagtttaatttcttacactgtggttgtcaagaatactgatttactatatgnnttnntggnagaattattattttgnacagttgggcattgggtnantccggaaaacgtcggtaataaggagagcaaccgcgggccaaggaaaagcgacactgtgtaacaacggggc

SEQ ID NO: 332961 - DNA, 1435 bp, Homo sapiens
ctttgaaatcccagtaatgtcttatatatggtgggaacacaagaaatatttgttggatgcatttacttggaagggaaatgttaattgttttgctgtagtacatcatcttgtagtcagcatttctgggttcgatttttgcatgaaaacatgtgtttatgtgtgcctagtccctaaataccatgaagatttacattgccttatgcaactggatattttccaaatgtagactgttctttgttagctctatatgaggtcagaaaagaaaaataataataaaggaaacaaaattgcttttcttgtccaggactttttttatgaagacatggagtccttgacgcagatgcttagggccttggcaacagatggaaataaacaccgggccaaagtggacaagagaaagcagcggtcagttttcagagatgtcctgagggcagtggaggaacgggattttccaacagaaaccattaaatttggtcctgaacgcatgtatattgattgctgggtaaaaaaacacacctatgacacctttaaggaggttcttggatcagggatgcagtaccacttgcagtcaaatgaattccttcgaaatgtatttgaacttggacccccagtgatgcttgatgctgcaacgcttaaaacgatgaagatttctcgtttcgaaaggcatttatataactctgcagccttcaaagctcgaaccaaagctagaagcaaatgtcgagataagagagcagatgttggagaattcttctagattttcagaacttgaagactattttctaatttctatttttttttctatttcaatgtatttaaactctagacacagtttttatcctggattaacttagataacttttgtagcagtggttatattgcttataatttaatgtacaatactattgaaactggtgagttctgattattaaatattctctgtaaatcagtaaacatgtataaagtatttgtaatgtttggtcataatttatttatgaagacagcaaaagactgatttcatgatggggaaaacaattagccaaagtttaatttcttacactgtggttgtcaagaatactgatttactataatgatatatacatgcaagatatttaacttaatatcttagacaagagttctgggtacaattttgggatctagttcccctggaaaagctgctgtatttttaatttttaatggaatgtagcttttaaaatcctgtcactggcatcaacaaaaggaattataccatgagaccttatagctgtacttaaaagccattcagttcagctattgggagttcatgatgaattagcatatgccagaaaggttgctaaccttaacatctgagagcagtaacactgattttatctgctgtatgagactttgtgcattttactttgaaataaagatttttttccacactgaaaaaaaaaaa

SEQ ID NO: 332962 - DNA, 1250 bp, Homo sapiens
taatacaatgtaagtgctatgtaaatagttgttatactttattgtttagggaatagtggaaagaaagaatagtctatacatgttcagtatagttgcaatttttttctgaatattttcagtccatggttggttgaatccgtgatgcagaaccaaccagatatggaggattgactatatatgtaaaagattgagattaaccttgaattgtggagggacagaggtttgtctgttaccaacaggaaagaggataataggaacgggattttccaacagaaaccattaaatttggtcctgaacgcatgtatattgattgctgggtaaaaaaacacacctatgacacctttaaggaggttcttggatcagggatgcagtaccacttgcagtcaaatgaattccttcgaaatgtatttgaacttggacccccagtgatgcttgatgctgcaacgcttaaaacgatgaagatttctcgtttcgaaaggcatttatataactctgcagccttcaaagctcgaaccaaagctagaagcaaatgtcgagataagagagcagatgttggagaattcttctagattttcagaacttgaagactattttctaatttctatttttttttctatttcaatgtatttaaactctagacacagtttttatcctggattaacttagataacttttgtagcagtggttatattgcttataatttaatgtacaatactattgaaactggtgagttctgattattaaatattctctgtaaatcagtaaacatgtataaagtatttgtaatgtttggtcataatttatttatgaagacagcaaaagactgatttcatgatggggaaaacaattagccaaagtttaatttcttacactgtggttgtcaagaatactgatttactataatgatatatacatgcaagatatttaacttaatatcttagacaagagttctgggtacaattttgggatctagttcccctggaaaagctgctgtatttttaatttttaatggaatgtagcttttaaaatcctgtcactggcatcaacaaaaggaattataccatgagaccttatagctgtacttaaaagccattcagttcagctattgggagttcatgatgaattagcatatgccagaaaggttgctaaccttaacatctgagagcagtaacactgattttatctgctgtatgagactttgtgcattttactttgaaataaagatttttttccacactgaaaaaaaaaaa

SEQ ID NO: 332963 - DNA, 1318 bp, Homo sapiens
tgctacttaaggcgtcgtggcctcccctgccccgccttagctcccgcgctagagagaaacatgtatcgttttcgatcacagctcttcacggggatttctgctgccgccaccgcccactcttacccccgccgcttctcgactctgttgttagccgaagactcgcctctcagccgcccgccgcacagacgcacgagtaaaaagtgcagctccatcggctgatcctcgctaagctccgactctgggcggcaccgggcgtcccacgatgccgaagaacaagaagcggaacactccccaccgcggtagcagtgctggcggcggcgggtcaggagcagccgcagcgacggcggcgacagcaggtggccagcatcgaaatgttcagccttttagtgatgaagatgcatcaattgaaacaatgagccattgcagtggttatagcgatccttccagttttgctgaagatggaccagaagtccttgatgaggaaggaactcaagaagacctagagtacaagttgaagggattaattgacctaaccctggataagagtgcgaagacaaggcaagcagctcttgaaggtattaaaaatgcactggcttcaaaaatgctgtatgaatttattctggaaaggagaatgactttaactgatagcattgaacgctgcctgaaaaaaggtaagagtgatgagcaacgtgcagctgcagcgttagcatctgttctttgtattcagctgggccctggaattgaaagtgaagagattttgaaaactcttggaccaatcctaaagaaaatcatttgtgatgggtcagctagtatgcaggctaggcaaactgtaagtataagatatttacatttatagatctcgtctattcacgttgacacttcagacgtggtgcgcctgtactgtaccagctactcaagaggctgaggcaagagagaggatcttgtaagtccaggagtttgaggcagcggtgagctataatcatgccactgaactgtagcctgggagacaaagctacacactgtattttaacaacaacaacaaaaaagataattctatatttatggatttgggtagacataggaaactgaaattctgatttgtgaaagtcttctaattttggggtttgagaaagctttcattctctaattgttggatgtttacctcttgcaacacttgactttagattttgggttttgggggttttattttttgtttttggtgcggtaataagtgatacaagtgatcatatggagatgttttactgtgtcacagaaaacagaagacactgaagtgcacgtggatctctagagcgccgca

SEQ ID NO: 332964 - DNA, 505 bp, Homo sapiens
tcaacaatgtggtttttgccttaattgttactgaaactcagttgtgccttcaagtttatcaaaactagaccaattctacacccttacatacaggatagcaacagtttgtccacatctcaggtatggcagtatcagtttaagccatattgttcatttatctcagcatgtatatgactgtttagaaattgtgtttacataagatccctctgagccattttagtgcctgtggtaattttggttcttccattggttaggaacgggattttccaacagaaaccattaaatttggtcctgaacgcatgtatattgattgctgggtaaaaaaacacacctatgacacctttaaggaggttcttggatcagggatgcagtaccacttgcaggtaagtgtcatcctttctacatatttgcttttaaagtagggagcagtcttgaatatagctcacttaattggcttttgaaattaattaggtatccagagtgcttccacatgttagaaaacagt

SEQ ID NO: 332965 - DNA, 743 bp, Homo sapiens
ggctcactgcaacctctgcctctcgggttcaaacgattctcctgcctcagcctcccgagtagctgggactacaggcatgtgccaccatgcctggctaattttttgtatttttagtagagacgggatttcaccgtgttagccaggatggtctcaatctcctgacctcgtgattcgcccacctcggcctcccagagtgctgggattacaggtgtgagccaccttgcatggcccctgttaactctttgtttttctccttcattctttgtgtgtgttttataaacatttaaatgtttatagggtcaaattagttcatttcttttctttgtgacttttaccctttttctgttttgtaagaatatcttaagtcttactgatgcacgtttttcctttttttcattttagcatttatataactctgcagccttcaaagctcgaaccaaagctagaagcaaatgtcgagataagagagcagatgttggagaattcttctagattttcagaacttgaagactattttctaatttctatttttttttctatttcaatgtatttaaactctagacacagtttttatcctggattaacttagataacttttgtagcagtggttatattgcttataatttaatgtacaatactattgaaactggtgagttctgattattaaatattctctgtaaatcagtaaacatgtataaagtatttgtaatgtttggtcataatttatttatgaagacagcaaa

SEQ ID NO: 332966 - DNA, 572 bp, Homo sapiens
  misc_feature (43)..(43): n is a, c, g, or t
tgttcatattttactactctcatataattaaaccaaacgaccnccttatgggcacaatttccaacgttaccattaaatttggtcctgaacgcatgtatattgattgctgggtaaaaaaacacacctatgacacctttaaggaggttcttggatcagggatgcagtaccacttgcagtcaaatgaattccttcgaaatgtatttgaacttggacccccagtgatgcttgatgctgcaacgcttaaaacgatgaagatttctcgtttcgaaaggcatttatataactctgcagccttcaaagctcgaaccaaagctagaagcaaatgtcgagataagagagcagatgttggagaattcttctagattttcagaacttgaagactattttctaatttctatttttttttctatttcaatgtatttaaactctagacacagtttttatcctggattaacttagataacttttgtagcagtggttatattgcttataatttaatgtacaatactattgaaactggtgagttctgattattaaatattctctgtaaatcagtaaacatgtataaagta

SEQ ID NO: 332967 - DNA, 2299 bp, Homo sapiens
tgctacttaaggcgtcgtggcctcccctgccccgccttagctcccgcgctagagagaaacatgtatcgttttcgatcacagctcttcacggggatttctgctgccgccaccgcccactcttacccccgccgcttctcgactctgttgttagccgaagactcgcctctcagccgcccgccgcacagacgcacgagtaaaaagtgcagctccatcggctgatcctcgctaagctccgactctgggcggcaccgggcgtcccacgatgccgaagaacaagaagcggaacactccccaccgcggtagcagtgctggcggcggcgggtcaggagcagccgcagcgacggcggcgacagcaggtggccagcatcgaaatgttcagccttttagtgatgaagatgcatcaattgaaacaatgagccattgcagtggttatagcgatccttccagttttgctgaagatggaccagaagtccttgatgaggaaggaactcaagaagacctagagtacaagttgaagggattaattgacctaaccctggataagagtgcgaagacaaggcaagcagctcttgaaggtattaaaaatgcactggcttcaaaaatgctgtatgaatttattctggaaaggagaatgactttaactgatagcattgaacgctgcctgaaaaaaggtaagagtgatgagcaacgtgcagctgcagcgttagcatctgttctttgtattcagctgggccctggaattgaaagtgaagagattttgaaaactcttggaccaatcctaaagaaaatcatttgtgatgggtcagctagtatgcaggctaggcaaacttgtgcaacttgctttggtgtttgctgttttattgccacagatgacattactgaactatactcaactctggaatgtttggaaaatatcttcactaaatcctatctcaaagagaaagacactactgttatttgcagcactcctaatacagtgcttcatatcagctctcttcttgcatggacactactgctgaccatatgcccaatcaatgaagtgaagaaaaagcttgagatgcatttccataagcttccaagcctcctctcttgtgatgatgtaaacatgagaatagctgctggtgaatctttggcacttctctttgaattggccagaggaatagagagtgactttttttatgaagacatggagtccttgacgcagatgcttagggccttggcaacagatggaaataaacaccgggccaaagtggacaagagaaagcagcggtcagttttcagagatgtcctgagggcagtggaggaacgggattttccaacagaaaccattaaatttggtcctgaacgcatgtatattgattgctgggtaaaaaaacacacctatgacacctttaaggaggttcttggatcagggatgcagtaccacttgcagtcaaatgaattccttcgaaatgtatttgaacttggacccccagtgatgcttgatgctgcaacgcttaaaacgatgaagatttctcgtttcgaaaggcatttatataactctgcagccttcaaagctcgaaccaaagctagaagcaaatgtcgagataagagagcagatgttggagaattcttctagattttcagaacttgaagactattttctaatttctatttttttttctatttcaatgtatttaaactctagacacagtttttatcctggattaacttagataacttttgtagcagtggttatattgcttataatttaatgtacaatactattgaaactggtgagttctgattattaaatattctctgtaaatcagtaaacatgtataaagtatttgtaatgtttggtcataatttatttatgaagacagcaaaagactgatttcatgatggggaaaacaattagccaaagtttaatttcttacactgtggttgtcaagaatactgatttactataatgatatatacatgcaagatatttaacttaatatcttagacaagagttctgggtacaattttgggatctagttcccctggaaaagctgctgtatttttaatttttaatggaatgtagcttttaaaatcctgtcactggcatcaacaaaaggaattataccatgagaccttatagctgtacttaaaagccattcagttcagctattgggagttcatgatgaattagcatatgccagaaaggttgctaaccttaacatctgagagcagtaacactgattttatctgctgtatgagactttgtgcattttactttgaaataaagatttttttccacactgaaaaaaaaaaa

SEQ ID NO: 332968 - DNA, 1037 bp, Homo sapiens
  misc_feature (1)..(1): n is a, c, g, or t
  misc_feature (8)..(8): n is a, c, g, or t
ncctaagngtaacgtgactctctccttaaccaccgctacaggaacgggattttccaacagaaaccattaaatttggtcctgaacgcatgtatattgattgctgggtaaaaaaacacacctatgacacctttaaggaggttcttggatcagggatgcagtaccacttgcagtcaaatgaattccttcgaaatgtatttgaacttggacccccagtgatgcttgatgctgcaacgcttaaaacgatgaagatttctcgtttcgaaaggcatttatataactctgcagccttcaaagctcgaaccaaagctagaagcaaatgtcgagataagagagcagatgttggagaattcttctagattttcagaacttgaagactattttctaatttctatttttttttctatttcaatgtatttaaactctagacacagtttttatcctggattaacttagataacttttgtagcagtggttatattgcttataatttaatgtacaatactattgaaactggtgagttctgattattaaatattctctgtaaatcagtaaacatgtataaagtatttgtaatgtttggtcataatttatttatgaagacagcaaaagactgatttcatgatggggaaaacaattagccaaagtttaatttcttacactgtggttgtcaagaatactgatttactataatgatatatacatgcaagatatttaacttaatatcttagacaagagttctgggtacaattttgggatctagttcccctggaaaagctgctgtatttttaatttttaatggaatgtagcttttaaaatcctgtcactggcatcaacaaaaggaattataccatgagaccttatagctgtacttaaaagccattcagttcagctattgggagttcatgatgaattagcatatgccagaaaggttgctaaccttaacatctgagagcagtaacactgattttatctgctgtatgagactttgtgcattttactttgaaataaagatttttttccacactgaaaaaaaaaaa

SEQ ID NO: 332969 - DNA, 1037 bp, Homo sapiens
  misc_feature (33)..(35): n is a, c, g, or t
  misc_feature (37)..(38): n is a, c, g, or t
gttttaagtgccatctatcatttgcgagaaggnnncnncgtttgaggcaatatttccacagtaccattaaatttggtcctgaacgcatgtatattgattgctgggtaaaaaaacacacctatgacacctttaaggaggttcttggatcagggatgcagtaccacttgcagtcaaatgaattccttcgaaatgtatttgaacttggacccccagtgatgcttgatgctgcaacgcttaaaacgatgaagatttctcgtttcgaaaggcatttatataactctgcagccttcaaagctcgaaccaaagctagaagcaaatgtcgagataagagagcagatgttggagaattcttctagattttcagaacttgaagactattttctaatttctatttttttttctatttcaatgtatttaaactctagacacagtttttatcctggattaacttagataacttttgtagcagtggttatattgcttataatttaatgtacaatactattgaaactggtgagttctgattattaaatattctctgtaaatcagtaaacatgtataaagtatttgtaatgtttggtcataatttatttatgaagacagcaaaagactgatttcatgatggggaaaacaattagccaaagtttaatttcttacactgtggttgtcaagaatactgatttactataatgatatatacatgcaagatatttaacttaatatcttagacaagagttctgggtacaattttgggatctagttcccctggaaaagctgctgtatttttaatttttaatggaatgtagcttttaaaatcctgtcactggcatcaacaaaaggaattataccatgagaccttatagctgtacttaaaagccattcagttcagctattgggagttcatgatgaattagcatatgccagaaaggttgctaaccttaacatctgagagcagtaacactgattttatctgctgtatgagactttgtgcattttactttgaaataaagatttttttccacactgaaaaaaaaaaa

SEQ ID NO: 332970 - DNA, 431 bp, Homo sapiens
ttcctgggttactaagtccagatcatggaatattccactctgggacagtaaaagagggtcatgttctcagcctccccagcaccaaagcagctaaaaacagggatcacaggcccccagtgtttccaccactcctgagctgcttggaagcttcctctcagggtgtgtctgtggaaagcctagggggaccagtatgacaccgtttctcaggtatctcaaatgtccccacagtcgcctggaagagaatcatcatctcaagccagtaagcccttgcaagaaccagaatttgagggaagaagaaacattggtggagactgccttggttactatgataaatggccagtaacctttaacatcttctaaagccaaagtcacacagaaaaaagtctgccctaccagactcaaagaaatgttaaaagaaatcttagtgtcag

SEQ ID NO: 332971 - DNA, 828 bp, Homo sapiens
ggtatttgttatgtctcaggaaagctggatgactatctcattctctgatgatggagaagaatactcacaacctgctccccacctcccactgtgaaatgccaatatggtggaaacagaagggagaagaaagaacagcggagacactgatcattcgaaaccaaagaagcagctcatgcataatggagagctatctgcatgcaaattgctaggagtacttcctacttttctgggatattgtatttagccctctgtactctattcagaagagttctgttccccaggccaagaaggggaaatacattgaagacaacattaagtgttggaactaaatgcacaagaatcaggagcatcttaacgccatggcctgaacatgataggtactgaagaactatggattaattatttttgattgattgattgattgaaaatgtgtcactataaaaaagcaaatgtgaagcttacagagggatagtggtgcagttaaatgctaaagttaaatctccttttctggcagctgcagaaagattcctattctgcctcctatacttgctctgaggatatttaaattgtagagctctaagtggctgccctcaatttgcttcaaagataataacgtcaccttacagtttataaagcaccttgttacatccctttggagacctacagcaatcccgtatgaatctggggattatttattctttttttcaaataagaaaactgaagcacagaggaaggagttacacattaaaagccagggaacttgtacattagttaaggtaatgctagcagctataacaaataaatgcccaaatctcagaacttaataca

SEQ ID NO: 332972 - DNA, 541 bp, Homo sapiens
gaatgatccagtagagtgagaagaattgatgatgcaggagaaagttgtgaattcctggagcactgtttgaggaggcgagagtgggtgggatttgtgtgtagctgaagagtttggcctttgctgaaagcatggagagaaggagaatatagggacacagtggagatggggagataaggtggtgggacttgatgaacatgttcttgtgattgcatctatctttttcagtaaaatagaaagcaaggccatccactgagagtacagatggtggaggaggcatcgagtgtttgagggagaagaaggtgtgaagtagtcatcccaagagagactggacttaacagatagggttgtccaagtgaggccagtcagcatggtagtgtgtctccctctggcgacattcagttgcgtaggtgcagactggttggagaacaggatttaacctcttggccttttgctaaatgagcacagtaaagcaagaaaaggaagggacaatgaaggaagaaaaggaatacagtgattatagggttcagacctagcgatgggg

SEQ ID NO: 332973 - DNA, 138 bp, Homo sapiens
acggagctgagagagatacagtgaacaaagagtggttaactacagtgggggaaggaaaagtttgactttgcctgtggctaaaagggaaattcacaatggccatgatttatgggctgaattactcaggatcctccttag

SEQ ID NO: 332974 - DNA, 291 bp, Homo sapiens
ctctagccaatcagatcatcaagcctattaaaactaagcctaaaataaggacaaacaagctctgagtgaaggctgaataggtattttctaccattgcagtttgataaaatcatttcatgcattatccgtttctttctgatgagatatttctattacccaactgaccatgccacccatttaagaagataatttaaagaaatgttttaccaacaaaatttcccactcttctctcattctcttctaaaataaacaaaacaggccaggcatggtggcttgcgcctgtaatcccag

SEQ ID NO: 332975 - DNA, 2800 bp, Homo sapiens
cgcgatgtttgcgtttgaacctcttggcgggtgccggccatggcggcttcgctcccgggacctgggagccggcttttccgcacatatggggctgcggacggcaggagacagcggcggccgggccgggaagccgcgcagtggttcccgccgcaggaccggaggcgtttcttcaacagcagcggcagcagcgacgccagcatcggcgacccctcgcagtccgacgatcctgacgatcccgacgaccccgacttccccggcagcccggtgaggcggcggcggaggtgtcccggcggccgagtgcccaaggaccggcccagcctgaccgtgaccccaaagcgctggaagctgcgagctcgcccaagcctaaccgtgaccccaagacgcctggggctgcgagctcggcccccgcagaagtgcagcacaccctgcggcccgctccgacttccgcccttccccagccgcgactccggccgcctcagcccggacctcagcgtgtgcggccagcccagggacggcgacgagctgggcatcagtgcctccctgttcagctctctggcctcgccctgccccgggtccccaacgccaagggacagtgtcatctcgatcggcacctccgcctgtctggttgcagcctcagccgtcccgagcgacctccacctcccagaagtctccctggaccgagcatctctcccctgctcccaggaggaagcgacaggaggagccaaggacaccaggatggtccaccaaacccgcgccagcctcaggtcagttctctttggccttatgaactcaggaacccctgaggattctgagtttcgggcagatgggaagaatatgagagagtcctgctgtaaaaggaaactggtggtgggaaatggaccagagggtccaggtctgtcaagcacaggcaagaggagggccacaggccaggactcttgtcaagagagagggcttcaagaggccgtccggagagagcatcaggaggccagtgttcccaagggccgcattgtgccaaggggaacagacaggctggagagaactagatcaagccggaagagcaaacatcaggaggcaacggaaacctctctcctccattcccaccgctttaaaaagggccaaaagctgggaaaagattcgttccccacccaggacctgactcctttacagaatgcctgcttttggaccaaaaccagggcttccttcagtttccacaagaagaaaattgtgactgatgtgtcagaggtctgcagcatctataccactgccacttctctctctggatccctcctatcagaatgttcaaaccggcctgtcatgaacagaacaagtggtgctccgtcctcttggcactcctcctctatgtatttgctaagccccttaaacactctaagtatttcaaacaaaaaggcatctgatgctgaaaaggtttatggggaatgcagtcagaagggtcctgtcccctttagccattgccttcccacagaaaaactgcaacgctgtgagaagattggggaaggggtgtttggcgaagtgtttcaaacaattgctgatcacacacccgtagccataaaaatcattgctattgaaggaccagatttagtcaatggatcccatcagaaaacctttgaggaaatcctgccagagatcatcatctccaaagagttgagcctcttatccggtgaagtgtgcaaccgcacagaaggctttatcgggctgaactcagtgcactgtgtccagggatcttaccctcccttgctcctcaaagcctgggatcactataattcaaccaaaggctctgcaaatgaccggcctgatttttttaaagacgaccagctcttcattgtgctggaatttgagtttggagggattgacttagagcaaatgcgaaccaagttgtcttccttggctactgcaaagagcattctacaccagctcacagcctccctcgcagtggcagaggcatcactgcgctttgagcaccgagacttacactgggggaacgtgctcttaaagaaaaccagcctcaaaaaactccactacaccctcaatgggaagagcagcactatccccagctgtgggttgcaagtgagcatcattgactacaccctgtcgcgcttggaacgggatgggattgtggttttctgtgacgtttccatggatgaggacctgtttaccggtgacggtgactaccagtttgacatctacaggctcatgaagaaggagaataacaaccgctggggtgaatatcacccttatagtaatgtgctctggttacattacctgacagacaagatgctgaaacaaatgaccttcaagactaaatgtaacactcctgccatgaagcaaattaagagaaaaatccaggagttccacaggacaatgctgaacttcagctctgccactgacttgctctgccagcacagtctgtttaagtaagctaaatgtatcttactgccccgaaatgagaggagactggtcttgaagcctctggtgctgtttcaacctccgtccccacaggagggtggaactcccattctcacaggtttccagtcagcttttcaaacaagaattttgtttccaaatggaaactgaaatatttgttgaaatgtttaaatttgctgataacaaatgttctgaaagaagtaaactagccgggcgcagtggcgtgtgcctgtagtcccagctactcgggaggctgaggcaggaggatcgcttgagcccaagagttcatatctagcctggtcaacatagcaagacccctgtctctatttttttaaataaataaactacatgtgaaaaa

SEQ ID NO: 332976 - DNA, 3075 bp, Homo sapiens
cgcgatgtttgcgtttgaacctcttggcgggtgccggccatggcggcttcgctcccgggacctgggagccggcttttccgcacatatggggctgcggacggcaggagacagcggcggccgggccgggaagccgcgcagtggttcccgccgcaggaccggaggcgtttcttcaacagcagcggcagcagcgacgccagcatcggcgacccctcgcagtccgacgatcctgacgatcccgacgaccccgacttccccggcagcccggtgaggcggcggcggaggtgtcccggcggccgagtgcccaaggaccggcccagcctgaccgtgaccccaaagcgctggaagctgcgagctcgcccaagcctaaccgtgaccccaagacgcctggggctgcgagctcggcccccgcagaagtgcagcacaccctgcggcccgctccgacttccgcccttccccagccgcgactccggccgcctcagcccggacctcagcgtgtgcggccagcccagggacggcgacgagctgggcatcagtgcctccctgttcagctctctggcctcgccctgccccgggtccccaacgccaagggacagtgtcatctcgatcggcacctccgcctgtctggttgcagcctcagccgtcccgagcgacctccacctcccagaagtctccctggaccgagcatctctcccctgctcccaggaggaagcgacaggaggagccaaggacaccaggatggtccaccaaacccgcgccagcctcaggtcagttctctttggccttatgaactcaggaacccctgaggattctgagtttcgggcagatgggaagaatatgagagagtcctgctgtaaaaggaaactggtggtgggaaatggaccagagggtccaggtctgtcaagcacaggcaagaggagggccacaggccaggactcttgtcaagagagagggcttcaagaggccgtccggagagagcatcaggaggccagtgttcccaagggccgcattgtgccaaggggaacagacaggctggagagaactagatcaagccggaagagcaaacatcaggaggcaacggaaacctctctcctccattcccaccgctttaaaaagggccaaaagctgggaaaagattcgttccccacccaggacctgactcctttacagaatgcctgcttttggaccaaaaccagggcttccttcagtttccacaagaagaaaattgtgactgatgtgtcagaggtctgcagcatctataccactgccacttctctctctggatccctcctatcagaatgttcaaaccggcctgtcatgaacagaacaagtggtgctccgtcctcttggcactcctcctctatgtatttgctaagccccttaaacactctaagtatttcaaacaaaaaggcatctgatgctgaaaaggtttatggggaatgcagtcagaagggtcctgtcccctttagccattgccttcccacagaaaaactgcaacgctgtgagaagattggggaaggggtgtttggcgaagtgtttcaaacaattgctgatcacacacccgtagccataaaaatcattgctattgaaggaccagatttagtcaatggatcccatcagaaaacctttgaggaaatcctgccagagatcatcatctccaaagagttgagcctcttatccggtgaagtgtgcaaccgcacagaaggctttatcgggctgaactcagtgcactgtgtccagggatcttaccctcccttgctcctcaaagcctgggatcactataattcaaccaaaggctctgcaaatgaccggcctgatttttttaaagacgaccagctcttcattgtgctggaatttgagtttggagggattgacttagagcaaatgcgaaccaagttgtcttccttggctactgcaaagagcattctacaccagctcacagcctccctcgcagtggcagaggcatcactgcgctttgagcaccgagacttacactgggggaacgtgctcttaaagaaaaccagcctcaaaaaactccactacaccctcaatgggaagagcagcactatccccagctgtgggttgcaagtgagcatcattgactacaccctgtcgcgcttggaacgggatgggattgtggttttctgtgacgtttccatggatgaggacctgtttaccggtgacggtgactaccagtttgacatctacaggctcatgaagaaggagaataacaaccgctggggtgaatatcacccttatagtaatgtgctctggttacattacctgacagacaagatgctgaaacaaatgaccttcaagactaaatgtaacactcctgccatgaagcaaattaagagaaaaatccaggagttccacaggacaatgctgaacttcagctctgccactgacttgctctgccagcacagtctgtttaagtaagctaaatgtatcttactgccccgaaatgagaggagactggtcttgaagcctctggtgctgtttcaacctccgtccccacaggagggtggaactcccattctcacaggtttccagtcagcttttcaaacaagaattttgtttccaaatggaaactgaaatatttgttgaaatgtttaaatttgctgataacaaatgttctgaaagaagtaaactagccgggcgcagtggcgtgtgcctgtagtcccaagtagctgggactacaggcgcccgccaccacgcccggagaattttttgtatttttagtagagacggggtttcaccgtgttagccaggatggtctcgatctgctgaccttgtgatccacccgcctcggcctcccaaagtgctgggattacaggtgtgagccaccgcacctggccaatttttgcttatttttcctcaaagggaggaaaactgacaggttgctttaagagctgagtgattgagagtccttctgaacaggacttcgggaatttactcctaatcttttcccatggttaacttgtcttcactctgtttctaagaactctggtttttatacttgagactctgtagtcactgtggaaagaggtgtgactgataaagaactgcctttaaata

SEQ ID NO: 332977 - DNA, 1064 bp, Homo sapiens
tagctgggattgcaggcatacaccaccatgcccggctaattgtttgtatttttttagtagagatgggggtttcaccatgttggccaggctggtctcgaactcctcaccttgtgatccacccacctcggcatcccaaagtgctgggtgattacaggagtgagccatggcacctgacctataagccctctttctaattgtcagcagagtcctttctgtaaattcctttccgttttttgagccttaacacttatgtagtctgagcaaaaaaaaaatgcccaggcttcagcttcatactgagcagagcctgttgcttcaggtatcaaggctagctttgggaaccagactacagatgagacaactgaaagcaaagaggctgaggcaaagcagagaccaaaaaagagtctcaggggagaagaagggaagctagtaagcaacttatagggggcagtgtaagaaatgtcacatgttacatcactcacacagagaagcagaatttatcaattttcaaagggaaaatgtctctgtctactgacaaggttttaatttttgctttttttttttttgagatggagtctcactctgtctcccaggctggagtgcagtggcaggatctcggctcactgcaagctccgcctcccgggctcacaccattctcctgcctcagcctcccaagtagctgggactacaggcgcccgccaccacgcccggagaattttttgtatttttagtagagacggggtttcaccgtgttagccaggatggtctcgatctgctgaccttgtgatccacccgcctcggcctcccaaagtgctgggattacaggtgtgagccaccgcacctggccaatttttgcttatttttcctcaaagggaggaaaactgacaggttgctttaagagctgagtgattgagagtccttctgaacaggacttcgggaatttactcctaatcttttcccatggttaacttgtcttcactctgtttctaagaactctggtttttatacttgagactctgtagtcactgtggaaagaggtgtgactgataaagaactgcctttaaata

SEQ ID NO: 332978 - DNA, 436 bp, Homo sapiens
gtccaacgaattaaggcaagatcttcgatgagcccttggtggttagagttggttgttgtactgaagcaggtactcttgtttcagctgggctcttatggccaaccgttcagcttgcatctgccagccttccagagatatgtcatatttggctgagtcgagggtcaagggcagagtggccaggtgcgatggagtaaacttggggaatgacattttggtgacccagcacacaactgcctgaaattccattttcatgtgacacttttgtatctgtaaccatcaggtctgttccctatgttttctattccttaacttggctaccattataccatcacatctctttccttttctagtgactccccattagactagctcctatctcataacctccttttgtaatttaatggcccaaagattagcaaattccagaaattcctaa

SEQ ID NO: 332979 - DNA, 369 bp, Homo sapiens
tttatgttgtttcatatgctagctaggacttgttgttaacagactttttatttttgccagtctggagttgtgtattactcatgaacagcagtgttcactgggctatttgcatcagtacacttgcaaaaatttaaaagggtttaactgtcttcaaggggcttatgctattcttgtatagacaagaagtactggaaaaaagataaataacagggaagtgctagtgaatgttatagacaaggaactatgttttccttgaattttttataattttactgagtttctctagctttttactgtgacaaatttcaaacaaatagaaaagtttaaagaagaatatagtataattgcagtatactcttcacctaagtt

SEQ ID NO: 332980 - DNA, 1094 bp, Homo sapiens
aactactcagtataattattgtctgaatgcaaagtatgtgtttataggatgtgaaaaaatgtaatgcaaaacaaatttgaatcccatggcagttggaatataaagcagatgttcatcacttattttccttttttcttttcttatttttttttttgacagtctgtgtcactgattgagatagaaatgccaattatcaaggaaataatgttttcttaagttccctaaggcagaagatttaacatgcaattctaccagatcccttcctattcccccaacaccttttctctaacccccatatcccaaataataataataataataataataataataataataataataaaagcagttggttcagtgattctgaattaaaaggataatgttttgcaatgttcaagttgtaaaaactggccgagtattggctgtgtggaagactaaagctttcattctaacattcagacatagcaatccaaacccttgttcctgctgtaaatgaacttgatggagcatgggcagatttcagtgatacgagaaaggggactggtcatctatagaaaaatctgtgagagaacttggaagtggactgcgtttatcaatacagtcacaatgttaaatgaacaaaattcttgaacagttttttttcaaaaaatgttcaggtttatttgtggaaatgcaagatttctatgaaaatagtttttgtatggaaatttttgtaatactttttatcaacaaaacaagaacatgtgttcctgtcaggggtgtgatgtcaagcatgaatggtagtgcgtgtgcaccaccaacgtttggtgaaaactatttttatcaagaaaaaaggaatcatagaagagaaatattttcaagttagataatataaaagctaggtgcactaccaccactgcttaccatgccacacccctggtttccacgaggctgacaacatactgtaatgaacaattgtgtgtaaaatggtaaaagacacagacctcttgacaacattgtgataacagttgagtgcacacagtttgctgtttgaatccaatgcacaaaattaaaaaaaatcattaaaactatgttcattttactttcagctt

SEQ ID NO: 332981 - DNA, 575 bp, Homo sapiens
tcttgttctaattaaatcatacaaacataaaaaagttcatgataaatgaaaaacagattattagactacacataggattatctatctatatataaacaaaactcaaaatacctggttttcgttttgtttttgtttttcctgagacaaggtcttgctctgtcaccaaggctggagtgcagtagtgcggtcatggctcactgcagccttgacctcctgggctcaagcaatcctcccacctcagtttcctgaatagctgggaccacaggcaatgaaagtttttatattatcattaataataattatctctgagtagtgatcagactatgagtggtttttttattttttttcttactgggaatttttcatctgttctattttttaaaaaacaaaatctgtattgagatttaattcacataccatacaattagcccttgtaaagtgtatgattcagtggtttttagcatatccaaagttgtgcaaccatcacctcaatcaattttagaacatttttatcactccaaaaagaaacgctgttctcattagcagtcattacccatttctccccaaccctccca

SEQ ID NO: 332982 - DNA, 726 bp, Homo sapiens
gtgatgtctagagcagtgatttccaaatgggagcaaaaggatccaagggaatgctcagaaatatgcaatggggtacagaaagaagacattatttaagatttggtttacttatctcaaaaagaagtgactaaaagttcaatgggagaaatgatagaagctaattgtgataaaacagataaagtacatggcacaatgagtgtgaacccctggagttttacaatcatttgaaattcaaaggcaaatgctgagagcacaccatcatgagaattggcaccaatgaaaaagtttgtcaaaatcactctggcactaaaccactgaatgttttcaacacaaatggaaagctgacatcatttatagacaactcatggaccaacacaaaggaaaaaatgtcagatccagtgaatttcttttcttgtaattactgtatgatttcaacattggcgtctgtaagaaatactattttcctctgaagtgttttctgtagcattattttgtttaccatgggaggtttgtcttctcccattttccttagaagttgaacacacattttcaaagcctgctagtgattttgaatttcaaaagcgattacaagcatgattcatgcaatatgactcatccctctcaaatgctctaattgtataaactatatccttcaaagcgtcttatggacacattaaatattagtaaacacattttcaagtgccaaaaggtatggttccttcacac

SEQ ID NO: 332983 - DNA, 501 bp, Homo sapiens
gggtggggaaaactgatcatctgattttgtgactccatcaaaaggaaaggtcagactttcttacgaaggttaaaaaacaaaaccaagaatcctttaaaatggttcctttttgcatttctgacttgactctgtaatttgattgtagtcaagaggagatgttgtctgcatagaattcctgagcaagtgggaatcttcccagggaaggaagctctggggtaggaaagggatgacaatccgaggagacggggggcagggatggattcttggctgggtctctccttgcacaggttacttacctctcagaactccatctagaaaatggggatgctgatagaaaattatttcacaagcgttatctctttggcctcacctcaaccaggagcctggattagcttctaacatttccctgacagagccatggccttccttgggggaagttccttaaacaactgtcttcccatcataaattagcgttcacataattcaggttccctgtccctg

SEQ ID NO: 332984 - DNA, 287 bp, Homo sapiens
catagactatccccagtatcctaaggggatgtcctaacttaagtcttattctgtattaattgcagggcccatgggagggtgggagtcctggcttgagctacagctatgctcagatgaaccattcaggaggcaggctggccttccttaggcagtacttgcatagccaccttagacctgtttctacactggacagattgggggtagacgtgctgtttactggtttggctatttgtgaggcaaagttaagttatgactgagtatggcctttagagtctggcaagggccgg

SEQ ID NO: 332985 - DNA, 281 bp, Homo sapiens
acactccaatcatcaggcagaattatatttttccctcaataaggtctctcattattaaggagattataaaaatacatagggtcagttctggctagaaagtttaatctctattagcacctttcaaaagaacactcgctcaatgacggacacttatatcatcaaaattattaaagcgatataatgtctagaagacaatgtaaaaaatttggtctctgccactaaccaactcttgaagaaggctggctagatctgagagatttagttatctgaccacttagcac

SEQ ID NO: 332986 - DNA, 175 bp, Homo sapiens
cttctgtgcctctacactgttgacggcgcgggataattccttatggttgcatagggcactcctgtgcactgcgggaagtttaacagtatcactggtctggactccactagatgccagtgaccccgtcttccacagcctacccgtcttccacagcctacccgtcttccacagccta

SEQ ID NO: 332987 - DNA, 290 bp, Homo sapiens
acagtaagtagtcaaggaacactggtttaatgaacagaggtggaggagatggaagcatcaggctttgggtgctccgcagagctgggatgcaaacgcagctatctggctcaagagcctgaattgcggtgctttgaggcaggacagtaaaggcaccatcacaccagttgaaaacctttgaccggcaattccttccacggacaactgctgacaagtgaccagtggggatggacaccaccatggcatttgcagagttgaaaatggaaaatgacatctgtgtcctctactaggga

SEQ ID NO: 332988 - DNA, 170 bp, Homo sapiens
ttttttgtagagatgaggtctcactatgttgcctaggctggtctcaaactcctgggctcaagcgattccccccatcttggcattccaaaacgctgggattaccagcatgagtcatcacacctggtctgttttcttaacaaaaaagttttattcaaacacagccatgtatg

SEQ ID NO: 332989 - DNA, 148 bp, Homo sapiens
cacacaaacaaacaaacagacaaaaaagaaccattcctgagagcatctggaattaaatgaatagctatggtgaagtctggctgctggtactgcgcttttttttaaacttgctgatttttgctgccatgaaaaatcagcatcatcacaa

SEQ ID NO: 332990 - DNA, 195 bp, Homo sapiens
gggagtctgttttattcactgaagcaggctcaagccatagaccgtgcctggcacatagcagatgctcaaaaaatatttgccgaatgaatgagggagtttgtttacaggacagatgctggaatgagacccaggacagtgttgctgggcctttgacttgggcttgggcctactgaaacccatgcatcttttctccca

SEQ ID NO: 332991 - DNA, 325 bp, Homo sapiens
gatgaaaaatattaaacctatttatataggtacgtctccttggaacattggccaagtagaatagttttcttttggtgcttcttccacatttagccctagttattcagattggatagatagtatttgtagccattttttaaatgactgtgtagattaaaaaaatatgtgtgtaagcttggtgtcatggcttacgcctgtaattctagcattttgggaagctgaggcaggaggatcagttgaggccgggagttcaagaccagcctgggcaacatagcaagactgtgtgtcaattaaaaacaaaaaaaaaatttttagaaaaaaaaaa

SEQ ID NO: 332992 - DNA, 343 bp, Homo sapiens
tgccatgcggggcttgagaaaagcggttatccaggaactcccaggtcatgtaagaataaaaatctcccttcctcccccttgcgtttgccaattgggcaaaccccttccgaactgctcatttccgagcgtggacagttgtggctatttctgcttcctcctccggatggcccctcctccaagcagccacccacaggtcccccagggcagaagtggcagcccctccctggggacctcagctgaccttgtactcagcacagtatctctgctgaacttctatttataatctacttaacttcactgttttaaattttttggtagagatggagtctccctatgttgccct

SEQ ID NO: 332993 - DNA, 610 bp, Homo sapiens
cctcctcccaagtgtgaacacagactcttttccctaatcgccaccgcagccctgggaatctgatgtaaatgtaacaggaaaccaaggggaagtgccagctgagtaacgtaactgctcctgcttgggacaatcctcagtacagggtgacattgggttgtgaatgggaacaaaaacttcatcgtcaggtaggtctgaattctgcccctactagttgtgttacactgaaaaccccatctacgctgtctgagctggctccctccatctgtaagacgaggaaaatgatagatagtatctatcccatacgaaaactcatacatgaatgttcaaaaagtggaaacatcccaaatgcccatcagctgatgaatggataaaaaagatgtggctgtatttatcaatggaatattacttggcagaaaaaggaatgcagtactgatatacgccacagcatcaaggatcctctaagtgaaagaagctagtcacaaaagaccatacatcacatgactccagccaaatgaagtgtccagaatgggaaatctatagagaaagaaaggagataagtggctgcctaggggagggggtggaggtgagtaggaaggaagtgggcagtgac

SEQ ID NO: 332994 - DNA, 551 bp, Homo sapiens
tcagaacggaacagaacaggacagggattttcacagtgcttttccatacaatgtctggaatctatagataacacaagcagttaagtcaggggttgatttttagctaccaggcccagggcatggcactgggctggctggctgtggatttcatttctgctttttagtttttacttcttttttctttggaggcagaaattgggcataagacaatatgagaggtggtctcctcccttcacagaaccatgaaaatgccatttccttcctagccaggaatctgcatgtataagtcctctaaggaattctgacccaagtggtccttggatttacttctggtaatgccttagggagtatattctgcgctgactggtggattgactgatgaactcacttccttcattcagcaagcatttatttacctctactctgtactgggcgccgaagacagagcagtgaacaaaacagaggcaagtccctctcctcatggagcttacgtttctgtcttaggcagacaatgaatggattcacaaagaatatgtgcaatgtggtgttgg

SEQ ID NO: 332995 - DNA, 387 bp, Homo sapiens
atgttgacccctcatgaacaccttgcactccagtatatttctaagtgcttctgagagcccggcctgcaacaccacttctcccctctgcctccagcctagagatgggaatggcttcctgctggtgctaatctctaggtggcctcaccatgtcccatttggacactctgctcttgcatcatccatgtaatcaattaactgcattaaatccccatctctttaaataaagtaggttctgacacagccaacattatactgaatggggaaaagttgaaagcgttcctcctgagaactggaacaagacaaggatgttcactttcaccacttctattcaacatagtactggaagtcctagccagagcaatcagacaagagaaggcaataaaggac

SEQ ID NO: 332996 - DNA, 225 bp, Homo sapiens
tcagggagcacagagaggaacctggaacaatgacaatgtgatcaatgcctcaggaataggcatttcatgcttatgttagagctaggttctcatatctttaagaaattagaataaacatggggtatatatcacaggcatctgaagaaggaagtcaacaacttgcccagtatcacacttagccaggacaagtatctgtctggcttgctaatccagtttctttccatt

SEQ ID NO: 332997 - DNA, 133 bp, Homo sapiens
cggctccgaccccagctgcaggcgaccctccctccccagccagagccctgggcccgcctcctccccgggggcctagggaggtggtacccaggtgggggggcatgtaggtgacctggcggcctggctcagttca

SEQ ID NO: 332998 - DNA, 800 bp, Homo sapiens
taagaagagaagatcaagtcatcactgggtaagtaaactacagaaagcagctaccacctctagggctgaggggacaaagttaagacattggaaccatcaaagtttataaagcttgcaggagggggtctcatggtgctgatactgaggcctctgagaagggagtactgcttagctagtactggagtccctgtgctctgagggcctgggacctgttggcctggagagagtatgccagagggctgatgctgatgtctccaggacaggcatgatgagactagttctgcaagtgttaaaactggattcaggggctgttttaggaagaaactcttgctgctggagtgaagaagttctactagagtcacactcccaggagtctcaagtcataaggaagtccatgtggagcaagcagacatgtccgagtcccttcaccagcttggcagtttccctccagcgcaccttactggcagagccaacatgcagccagcaggcaaagcaggaatgtttgcacagtctagctctggcttcactaaccggagatagaggtggttctgaagctgagacaacttaaatggcacagatcacccctccagctactcagcatccacatacacccttccacacctttcaacttttcctccgacagccacacaagtgtttccatctaaaaaggtgcaactgtctttcattcagagaaagatgttctcaccctctccccaaactgggaagctgcaaagaccccataggcatcacattcatttctggaaaacggttactgtctttgggctacattaaccacccct

SEQ ID NO: 332999 - DNA, 716 bp, Homo sapiens
cctgacattcccccacccctaccctctttcctttccaatactctctgtatatctgtattaatgttcccaccacactgtaggaatatctgtttgcatggctgtttcttcccctacactatgggctctttgaggatagagaccatatctagcatttctctgtaactaatgcccagcacagtaccttggtgtcaaaccgaatacgcctttgttgaataaatgtatgagtcaatgaatgaggttgcagagttatcaagtggaggagggattagaacccaggtatcttgagcccaagcaatttgaaggtgtttaagctaattcttttgtatgtttttctggctgtttatgtacttttgaagtctttatctttctgtgttaaaatatgtctatcgttattgcattttacagcatcaaaaattaagaatacttacattcttctacaaattgatgcttcaaaatagaaaatttggaatttcagaagctccagtacagtaactaatctgaaattattgatgcattttctttcgtcagggaataactttgaaagattcaaatgatttcaaaatccaactttctaacgtctgggagagaattcctcaaacacatttagcagtcaaaacaattctatagagtataaaagatgaagcatggcacttcgaagtaaaggttacagtttctataaatgagaaaaggccgaatatttgctagcaaaatatttt

SEQ ID NO: 333000 - DNA, 158 bp, Homo sapiens
cacacagatcggaattctgggaccattatttattagttaagagatctggaagaagttatacaatgcctcttgaattagtttgcttacctatacaatgggaataacagtatataactaacagggttgtaagcattaaaggatatattatattttcaaat

SEQ ID NO: 333001 - DNA, 2278 bp, Homo sapiens
aaagagcaactattttgactgcgcatgcgggaagatggcgggccgggcgacttgagatccgcgggtctccctcctctttttccgtctgcgtcgggagctcccgggcacgtgaggccgtgccgcgtttactggcgggcgggacggcctagccgggcggcgcctcggaggaagccgcggaccccttaggtgctgggcccttggaaatcggcgcgtggggggcggtgctcgagctgagcgcgagagggcgggagagctcgtggggtgcgaggggagcaggacgcccggccgggcagcatgagtcagcagcggccggcgaggaagttacccagtctcctcctggacccgacggaggagacggttcgccgtcggtgccgagaccccatcaacgtggagggcctgctgaagctctaaaagtgaagagacctcgttttgatgtatcgctggtttatttaactcgaaaatttatggatcttgtcagatctgctcccgggggtattcttgacttaaacaaggttgcaacgaaactgggagtccgaaagcggagagtgtatgacatcaccaatgtcttagatggaatcgacctcgttgaaaagaaatccaagaaccatattagatggataggatctgatcttagcaattttggagcagttccccaacaaaagaagctacaggaggaactttctgacttatcagcaatggaagatgctttggatgagttaattaaggattgtgctcagcagctgtttgagttaacagatgacaaagaaaatgaaagactagcatatgtgacctatcaagacattcatagcattcaggccttccatgaacagatcgtcattgcagttaaagctccagcagaaaccagattggatgttccagctcccagagaagactctatcacagtgcacataaggagcaccaacggacctatcgatgtctatttgtgtgaagtggagcagggtcagaccagtaacaaaaggtctgaaggtgtcgggacctcttcatctgagagcactcatccagaaggccctgaggaagaagaaaatcctcagcaaagtgaagaattgcttgaagtaagcaactgatggcatttgagaatttatgtatcactgagttttttgggaatatcttcgtggagaattacgcatcaaatttgattctcagagcaataaattatccatgaagtgctctcgttctcagtagcggcatcatggccagtagtgtctttgaggagttcaccacttagattactgagtaattgtggtttccacatttgaaaacaactccttttataattattcactgctttttgtcagtgaaatagacatcttgcctcctgaagtagcttcatcacagagtgtcatgaagacagacagtcaggctgaaatggacagttctttgtggactctacccttcccttcaaggagtatgtcatatatcacaaaagaaattgccttacactggttcatgtttgcagttactgttgtacattgcatagatgtacacacgaatttaaatgtgatgtcttgtatatatctgtataatgttgagattacttacgaaatatgtctgagtgacacttttcacccttgtacagccaaaataatgtatatatggaaagtgacagacaaattctctaatctctttggtacctataacttattagaatcctctggatgagggttagaagagactttttccaaacttctacatgtagaagtatcataaatgtgctacacatttatgtttgtggatttaattaaagtattttaatatggttttcagtgctaaaattggagtcagatacttcttggttttaagctgtctacctaattgctgtctcccagcagactggtggcatgcccagtggctttgggggcaaggatagaaatgccatcaggaaatagctgaattcattgtgaaacatgaattcagtcatggtgataattggaaactcctttcaggtttttgcaagtagattttgtaatgtttgtgtatgcagccttgctgttgagtcagtccaaggggttttacttaggacaagttgtaccttgccctctctccagctctgctcccacattttcacatacctagctgtttctacctcattgggtaagtcatttaccactctgtgcctcagtttactctgtagtttaccattagactgtgagctccttgagggactttgtcataatcactgttacatcccagtgcctcacaccatgcctggcccttaagaagtgctcaataaatgtctgaacaaaaaaaaaaaaaaaaa

SEQ ID NO: 333002 - DNA, 1468 bp, Homo sapiens
ctccattctcggacgggtgctttcaggtacaagttagagttccagtttattcttgagaggctgaaaaaattagccttatgccattaacctgagaatacgtgttcttgaccaggcatcttcagggttttctgaagtagtcagattgtgtattcttttacgtatttgcctatcagaccttcacttaggtgtattcacttaggtgtatttctctctcgtgttcttttccagaagaaaatcctcagcaaagtgaagaattgcttgaagtaagcaactgatggcatttgagaatttatgtatcactgagttttttgggaatatcttcgtggagaattacgcatcaaatttgattctcagagcaataaattatccatgaagtgctctcgttctcagtagcggcatcatggccagtagtgtctttgaggagttcaccacttagattactgagtaattgtggtttccacatttgaaaacaactccttttataattattcactgctttttgtcagtgaaatagacatcttgcctcctgaagtagcttcatcacagagtgtcatgaagacagacagtcaggctgaaatggacagttctttgtggactctacccttcccttcaaggagtatgtcatatatcacaaaagaaattgccttacactggttcatgtttgcagttactgttgtacattgcatagatgtacacacgaatttaaatgtgatgtcttgtatatatctgtataatgttgagattacttacgaaatatgtctgagtgacacttttcacccttgtacagccaaaataatgtatatatggaaagtgacagacaaattctctaatctctttggtacctataacttattagaatcctctggatgagggttagaagagactttttccaaacttctacatgtagaagtatcataaatgtgctacacatttatgtttgtggatttaattaaagtattttaatatggttttcagtgctaaaattggagtcagatacttcttggttttaagctgtctacctaattgctgtctcccagcagactggtggcatgcccagtggctttgggggcaaggatagaaatgccatcaggaaatagctgaattcattgtgaaacatgaattcagtcatggtgataattggaaactcctttcaggtttttgcaagtagattttgtaatgtttgtgtatgcagccttgctgttgagtcagtccaaggggttttacttaggacaagttgtaccttgccctctctccagctctgctcccacattttcacatacctagctgtttctacctcattgggtaagtcatttaccactctgtgcctcagtttactctgtagtttaccattagactgtgagctccttgagggactttgtcataatcactgttacatcccagtgcctcacaccatgcctggcccttaagaagtgctcaataaatgtctgaacaaaaaaaaaaaaaaaaa

SEQ ID NO: 333003 - DNA, 1878 bp, Homo sapiens
aaagagcaactattttgactgcgcatgcgggaagatggcgggccgggcgacttgagatccgcgggtctccctcctctttttccgtctgcgtcgggagctcccgggcacgtgaggccgtgccgcgtttactggcgggcgggacggcctagccgggcggcgcctcggaggaagccgcggaccccttaggtgctgggcccttggaaatcggcgcgtggggggcggtgctcgagctgagcgcgagagggcgggagagctcgtggggtgcgaggggagcaggacgcccggccgggcagcatgagtcagcagcggccggcgaggaagttacccagtctcctcctggacccgacggaggagacggttcgccgtcggtgccgagaccccatcaacgtggagggcctgctgaagctctaaaagtgaagagacctcgttttgatgtatcgctggtttatttaactcgaaaatttatggatcttgtcagatctgctcccgggggtattcttgacttaaacaaggttgcaacgaaactgggagtccgaaagcggagagtgtatgacatcaccaatgtcttagatggaatcgacctcgttgaaaagaaatccaagaaccatattagatggataggatctgatcttagcaattttggagcagttccccaacaaaagaagctacaggaggaactttctgacttatcagcaatggaagatgctttggatgagttaattaaggattgtgctcagcagctgtttgagttaacagatgacaaagaaaatgaaagactagcatatgtgacctatcaagacattcatagcattcaggccttccatgaacagatcgtcattgcagttaaagctccagcagaaaccagattggatgttccagctcccagagaagactctatcacagtgcacataaggagcaccaacggacctatcgatgtctatttgtgtgaagtggagcagggtcagaccagtaacaaaaggtctgaaggtgtcgggacctcttcatctgagagcactcatccagaaggccctgaggaagaagaaaatcctcagcaaagtgaagaattgcttgaagtaagcaactgatggcatttgagaatttatgtatcactgagttttttgggaatatcttcgtggagaattacgcatcaaatttgattctcagagcaataaattatccatgaagtgctctcgttctcagtagcggcatcatggccagtagtgtctttgaggagttcaccacttagattactgagtaattgtggtttccacatttgaaaacaactccttttataattattcactgctttttgtcagtgaaatagacatcttgcctcctgaagtagcttcatcacagagtgtcatgaagacagacagtcaggctgaaatggacagttctttgtggactctacccttcccttcaaggagtatgtcatatatcacaaaagaaattgccttacactggttcatgtttgcagttactgttgtacattgcatagatgtacacacgaatttaaatgtgatgtcttgtatatatctgtataatgttgagattacttacgaaatatgtctgagtgacacttttcacccttgtacagccaaaatatgacatttggcaggtgcaaacaatcccaactcttggaaccctaaacacaataagaccacctgggaggagggacaaaacagatgttccaaccctcaacgtgcgaagcgcccgagtgaccacccataggagggagcgtacaacgagcgaacaacggatcgacgaaagcggacaaacgaggtagtgagccaagagacgccgacgcgaccagcgccgacagaaccccagcgcagaacaagcaagagcaagagaaaaagagatagaaagagcacgcca

SEQ ID NO: 333004 - DNA, 2062 bp, Homo sapiens
aaagagcaactattttgactgcgcatgcgggaagatggcgggccgggcgacttgagatccgcgggtctccctcctctttttccgtctgcgtcgggagctcccgggcacgtgaggccgtgccgcgtttactggcgggcgggacggcctagccgggcggcgcctcggaggaagccgcggaccccttagaagctctaaaagtgaagagacctcgttttgatgtatcgctggtttatttaactcgaaaatttatggatcttgtcagatctgctcccgggggtattcttgacttaaacaaggttgcaacgaaactgggagtccgaaagcggagagtgtatgacatcaccaatgtcttagatggaatcgacctcgttgaaaagaaatccaagaaccatattagatggataggatctgatcttagcaattttggagcagttccccaacaaaagaagctacaggaggaactttctgacttatcagcaatggaagatgctttggatgagttaattaaggattgtgctcagcagctgtttgagttaacagatgacaaagaaaatgaaagactagcatatgtgacctatcaagacattcatagcattcaggccttccatgaacagatcgtcattgcagttaaagctccagcagaaaccagattggatgttccagctcccagagaagactctatcacagtgcacataaggagcaccaacggacctatcgatgtctatttgtgtgaagtggagcagggtcagaccagtaacaaaaggtctgaaggtgtcgggacctcttcatctgagagcactcatccagaaggccctgaggaagaagaaaatcctcagcaaagtgaagaattgcttgaagtaagcaactgatggcatttgagaatttatgtatcactgagttttttgggaatatcttcgtggagaattacgcatcaaatttgattctcagagcaataaattatccatgaagtgctctcgttctcagtagcggcatcatggccagtagtgtctttgaggagttcaccacttagattactgagtaattgtggtttccacatttgaaaacaactccttttataattattcactgctttttgtcagtgaaatagacatcttgcctcctgaagtagcttcatcacagagtgtcatgaagacagacagtcaggctgaaatggacagttctttgtggactctacccttcccttcaaggagtatgtcatatatcacaaaagaaattgccttacactggttcatgtttgcagttactgttgtacattgcatagatgtacacacgaatttaaatgtgatgtcttgtatatatctgtataatgttgagattacttacgaaatatgtctgagtgacacttttcacccttgtacagccaaaataatgtatatatggaaagtgacagacaaattctctaatctctttggtacctataacttattagaatcctctggatgagggttagaagagactttttccaaacttctacatgtagaagtatcataaatgtgctacacatttatgtttgtggatttaattaaagtattttaatatggttttcagtgctaaaattggagtcagatacttcttggttttaagctgtctacctaattgctgtctcccagcagactggtggcatgcccagtggctttgggggcaaggatagaaatgccatcaggaaatagctgaattcattgtgaaacatgaattcagtcatggtgataattggaaactcctttcaggtttttgcaagtagattttgtaatgtttgtgtatgcagccttgctgttgagtcagtccaaggggttttacttaggacaagttgtaccttgccctctctccagctctgctcccacattttcacatacctagctgtttctacctcattgggtaagtcatttaccactctgtgcctcagtttactctgtagtttaccattagactgtgagctccttgagggactttgtcataatcactgttacatcccagtgcctcacaccatgcctggcccttaagaagtgctcaataaatgtctgaacaaaaaaaaaaaaaaaaa

SEQ ID NO: 333005 - DNA, 279 bp, Homo sapiens
tttttgtaattttagtacagacagggtttcaccatgttggccaggctggtctcgaactcctgacctcaggtgatccacccatctcggcctcccaaagtgctgggattacaggtgtgagccaccacgcccagagaatcctaggttttcaatagaggagttgaaatcatgtacctagttagataattagttttttttttttctaaagaaagactagtttatttcaagaggtatatactaagatctttccagcatagggcttctctgattctgtgtttaatc

SEQ ID NO: 333006 - DNA, 329 bp, Homo sapiens
ctgctgtgtgctgtgcctcgggttcctcccgcgtctgcgtgcctcaggcttgcgctgtcgctggggcagtgaacgtgctggggaataacggaccttggtgtcccctccgccttgtgtgcccatgcagctccgcgcgctcgctgtcaatagtaacggtcccctgggggtagatatcggacgtggggaggctggagctgtgaataggaggctgggaaagtgttggaggagggagcacttcatggatccttaggattccaactggattcgcgtttggctccgttacataccctgtactttactgttctcgattcataaacatatccagacct

SEQ ID NO: 333007 - DNA, 500 bp, Homo sapiens
acccttgccctgacaaactgggtcagctctgagggatggggccccaaggttccattgaacagtttggttggagagcctggagcagataaaaagatacagcgctagctaatcaggagaccttagccctcgtcctggttttgccgttaactcttaattaaccttggcaagctactttctttcttcagcctgcctacatttccccatctgtaaaatgggagataatatgaagtcctttatggcacagcacacatcctgccttgtgagggggcaggggatccacgctgctttgaacaaaaattcccactaagtattccccaaattcagttgctaattggcaaaagaaaaaaaaatagcactctgattaaatataaggatacaagttctcctccaaaagtaaaaggctcctcaaacaagggacttaaagggaggaagaagggaaatggattacaggaaactagaaaattctcaagtataaagaaaataaggagtcaattattaaa

SEQ ID NO: 333008 - DNA, 418 bp, Homo sapiens
tccatttcagggttaacaaagccagactggagatgtgtctagcaagcctccctagggtaagaatctcctattggtgtatccaagctatggcccatggaaactcttcacttttgatagttcagaagaacaaatgtttaacagaagtgaacctctttatcactctgaagtttctgcttctcatcttgacgtgacctggtgcctggtaggaggacttattgtgagctatttgcaggactaatattcaggttcactcagattcagtagtactggtttttgatatattacaatacttatgtactaggtggcacgtggtataagctacagctgtggccctggacacagctgctcaacagaccaagagagcagaagcaggggcatgtgtagcatccatggaaggctccaggggagctaagcactg

SEQ ID NO: 333009 - DNA, 397 bp, Homo sapiens
gtgcaggctgaagaattcaaggagaagtgtacaaatgcctgcaaggccctttgaaatgcatctaaaaataatatagattgatgattggagagaaggatgaatacattgatagatacataataaagctaataaaatggtaactgcagactctagccagtgggtacacaggtgttcattgtacaattttttcaactttgatgtatgtttctacatttatataataaaatgtacaataaggaactgtgtcaaataagtcatttcttaaaaaaaaaaacaaaggcaaagctgaaaattatgtagacacaataaaaactcaaacaacagtctgcctcagatcatcgtgctgatcttccaaatttcagcagggatggttggttttcctgcaaacctcgaaaca

SEQ ID NO: 333010 - DNA, 454 bp, Homo sapiens
cacgatgttgtgccacagtgattggaataattggaagatggtcatgcctttggaaagaaatagaaaagctaagaggggcaactagttagggaaagcacatgatttgtttgattctgtatactcctggtatgtatttctttcacttaatggaatgtaagcaaatagaactggaaacaaatgttaagataacatcatcctaataacatctatgagatacatagaaaagccagccagggagactgaatcaggctcacagagggtcgggggaatccagggagagctcagggagaagagaacttccacgatgtagatgatgtaacatttatatcaaagaagccaaggaaaatgagatttgagtcactaagaaggtttttggacaatagaagcttcctgtgcacaggtaaaggtgaagtgggtagaacttgtagagaaggagaaaaagaaagaagataga

SEQ ID NO: 333011 - DNA, 164 bp, Homo sapiens
cagggagatgcagagggcaagggctctttaggctcaagtagtgcgtcgtatgggagttcggaggcaggagaaagagcatgtatattaagggaatggggggaaagtgtataggtgtggaatatgcaagccctttaagagcatataaagagagaaatgggctttgg

SEQ ID NO: 333012 - DNA, 855 bp, Homo sapiens
tggtttcatgtctgtctttcaatagaatgaatgggagggaaatagaaaccatgtccacatgacattagtacctgcatctaggaaggaggacttagtcccaggaaggctggccctcccatctggccaccctgagaggtttcagttcccttctgattcatgtgccaagcttacctgtcagctttcacctcccaagggatgcagcgtcagtgtgttgaagctgcagcatatgaaccaataaagctacctctgagtaacatggaagcaaggtaggaaggcaaaaaccacatcccactgtgatatcatcagccatatttcttccacatggcaagttttattttgtttaatttaacaataaagtcattatattaactcgattcaatagaagcagcagggggatttctcctaatttaatcgtgggctttggggcgtcttgctcagtgttaaaacaataccatataaaaatattaaagggattgtattatattgaaaaaaatatgttagcgtctccaaatgcagcctacctttaatttagaaactagtcagcctacttcttactttatccgaagtgtcatctagtcaagagggccaatctctgcaagcaaatcatgccgctttagggtttaaactccgcaaagtgagcatttcatccatggaggtgatgctccaatttgaagagttattagatacacccagccagggaatataaataacttgagcttaccagtgtcacagaactggttttctgtaagtcacttgaaaatacaaggacatagggccgggcatggtggctcacgcctgtaatcccagcactttgggaagaagaggcgggcagattacgaggtcaggagttcgaga

SEQ ID NO: 333013 - DNA, 347 bp, Homo sapiens
ctctgtgctggagcgcatcccacggcatcttccagaaactccagggagcagcgctgggacgtgactcgcttcctgcaagatgacaatggagcctcaaaacaggccaccagcccgggtgccgcctttgtggccagaaaccgagtgccgcccgctgtgcagggaagggccactctccagcccagcggcgcacccatgggccgaggggcttccagagcccatgcagactgaggcggggaggaggggcacctcctgccttgagaggttcctgttttggaggcactgagctcttctctggggaccagcagccctgggggacaggctcctcaggcataggatagcacagcaca

SEQ ID NO: 333014 - DNA, 1858 bp, Homo sapiens
atagatagatagatagttggagtttggataaaaatctcgagttgagatctgagagaccattctgagggagtgtgtgagtagaagaccaagatttgaaccctggtaaacatggtgcaagaggaagaaaatgaaggagacattctaggtggaaggagaacggtagtattattgggatggtaaagagaagagtttaaagatatttggaatagtgaattgtgtttggcacgaggatttgtgacagccatccttagctctgtcagctgattatcgactggggccgggagtgtgggcagtggagactgtttggaaatgtatggtggtgttggagattgccacagtgattgtaggacactactgccacttactaggctggggctagggatgttgaactttgtccagtgcacaagaccatcccatacaagtccaaaatttaatagcacctctgctgagaaatataatgccagggatctatttcagttctccacactccattggtcaccatgttcattcatgtctgccttctaaacatctcaatctagccctttcttcccccttctcagagccactgccatacttgaggcttccattgtctcctgattggactatttatattgccgtaacttcctaccttgattgtctattgccactctctttgccacctcccttctgtttaccaccagaaccgtgaatctaaaatatttcctcttcattaaaagtgaaagaacattatcacgtcatttcctgtttcattaaaagtgaaacattttttaaaaggaaaaataatagcccttcaaggtctggcgctaagctcattttctcgcagcttcaccatggtatctatcttgtattccagctgcagacctccacattcctcagataagtctttccttttttgtactcctttatatgtcagtgtgttcctccttttgtctgggctgtcatttcccttacccacatagagaactccttcctttcaagaatcaactcctgtgtcacctactttgccagtacgatctgttcctctctctctctcgctccaaaagactaatctgcacactctgttacagcacttgtctaattgtgctgtagcgtttatttacatgtttgtttctcctctagccagtgagcacctctcaagcagaattatcttccttgtttctctggcaccctaaatatttgttgaattaatagtccttctcttcttttgtaattttgctttctgtaatagaagcttaattttaagtatagttatatcagtaatcaaaatgaatcacacactgagaaatcaatgtggatgccctttaagggttctgttattttttttattgccattgagtaaaataagatactctgtgataaagtatattagcattaaagtgttcaaatctgatctttattagtaggcctcaagtgaatccttgctgacatttaaggtttatgacatttccttcacgttcgttcttgactggaaggcataaatggctgacagtaaagagcaattaataattttccaagtaaaacattttcagggacatctgcctttattgctccccagatgagagtacagcctgtttcttatgtgttccaaagatgatttccctatcagctttttggtcagttaaccaaaaaaaaaaaaaaaaaaaaaagaaaagaaaaaagaaaaaaaagttacacttttctgaattctgcaagattgacagaaggggaatttttgagtctactttgttgcttggtaggtgtcatatttgctctttatttgacagttatctagacttaaaaaaaatgaagcaggtttttttttagtgccagtttatattgtttactaagcaagtgctacctctgccatccagtagggtga

SEQ ID NO: 333015 - DNA, 5553 bp, Homo sapiens
  misc_feature (30)..(30): n is a, c, g, or t
  misc_feature (44)..(44): n is a, c, g, or t
aagagaagaggaaggcagcccatatctacnacacagcctctcgncactgctgctccttatatttcctggaaggaagaacttcataggagcagggaagtcagatgcatgttgcagtgtccatcagtagaagtcagcttcttacctctcatagtgaatacagttgctctgcctgatgaattgagctacatatgtacacatggggaagactgggatgtagcttacattattcatctttatccttctctcactttgcggaatcttctcccatattccctaagatatttacttgagggaacagcagaaactcatgagctggcagaaggcagtactgctgatgttctgcattcgagaatcagtggtgaaataatggaattagtcctggtgaaataccagggcaaaaactggaatggacatttccgcatacgtgatacactaccagaattctttcctgtgtgtttttcttctgactccacagaagtgacgacagtcgacctgtcagtccacgtcaggagaattggcagccggatggtgctgtctgtctttagtccctattggttaatcaacaagactacccgggttctccagtatcgttcagaagatattcatgtgaaacatccagctgatttcagggatattattttattttctttcaagaagaagaacatttttactaaaaataaggtacaattaaaaatttcaaccagtgcctggtccagtagtttctcattggatacagtgggaagttatgggtgtgtgaagtgtcctgccaacaatatggagtacctggttggtgttagcatcaaaatgagcagtttcaacctttcacgaatagttaccctgactcccttttgtaccattgcaaacaagtcatcattagaactagaagttggcgagattgcatctgatggctcaatgccaactaataaatggaactatattgcttcttcagagtgccttccattttggccagaaaatttgtcaggcaaactttgtgtgagagtggtgggctgtgaaggatcttccaaaccattcttttataaccgacaggataatggcactttattgagcttagaagatctgaatgggggtatcttggtggatgtaaacactgccgaacattcaactgtcataactttttctgattaccatgagggatctgcacctgccttgataatgaaccatacaccatgggacatcctcacatacaaacagagtgggtcaccagaagaaatggtcttgctgccaagacaggctcgactttttgcctgggcagatcctactggtaccagaaaacttacatggacatatgcagcaaatgttggggaacatgatctgttaaaggatggatgtggacagtttccatatgatgcaaacatccagatacactgggtatcatttctggatgggcgccagagagttttgcttttcaccgatgatgttgccttggtttccaaagcactgcaggcagaagaaatggaacaggctgattatgaaataaccttgtctctccacagtcttgggctttcactggttaacaatgaaagcaagcaggaagtttcctatattgggataaccagttctggtgttgtttgggaggtgaaaccaaagcagaaatggaagccatttagtcaaaagcagataatcttattggaacaatcctatcagaaacatcaaatatcaagagaccatggctggattaagctagataataattttgaggtcaattttgataaagatccaatggaaatgcgcctccctattcgtagccctattaaacgagactttttatcaggaattcagattgaatttaagcagtcttctcaccagagaagtttaagggccaggttgtactggcttcaggttgataatcagttaccaggtgcaatgttccctgttgtatttcatcctgttgcccctccaaaatctattgctttagattcagagcccaagcctttcattgatgtgagtgtcatcacaagatttaatgagtacagtaaagtcttacagttcaagtattttatggtcctcattcaggaaatggccttaaaaattgatcaagggtttctaggagctattattgcactgtttaccccaacaacagaccctgaagctgaaagaagacggacaaagttaatccaacaagatattgatgctctaaatgcagaattaatggagacttcaatgactgatatgtcaattcttagtttctttgaacatttccatatttctcctgtgaagttgcatttgagtttgtctttgggttccggaggtgaagaatcagacaaagaaaaacaggaaatgtttgcagttcattctgtcaacttgctgttgaaaagcataggtgctactctgactgatgtggatgaccttatattcaaacttgcttattatgaaattcgatatcagttctacaagagagatcagcttatatggagtgttgttaggcattacagtgaacagttcttgaaacagatgtatgtccttgtattggggttagatgtacttggaaacccatttggattaattagaggtctgtctgaaggagttgaagctttattctatgaacccttccagggtgctgttcaaggccctgaagaatttgcagaggggttagtgattggagtgagaagcctctttggacacacagtaggtggtgcagcaggagttgtatctcgaatcaccggttctgttgggaaaggtttggcagcaattacaatggacaaggaatatcagcaaaaaagaagagaagagttgagtcgacagcccagagattttggagacagcctggccagaggaggaaagggctttctgcgaggagttgttggtggagtgactggaataataacaaaacctgtggaaggtgccaaaaaggaaggagctgctggattctttaaaggaattggaaaagggcttgtgggtgctgtggcccgtccaactggtggaatcgtagatatggccagtagtaccttccaaggcattcagagggcagcagaatcaactgaggaagtatctagcctccgtccccctcgcctgatccatgaagatggcatcattcgtccttatgacagacaggaatctgagggctctgacttacttgagaatcatatcaaaaagttggaaggagagacttaccgataccactgtgctattcctggaagcaagaagacaatccttatggttacaaataggcgagtgttgtgtataaaggaagttgaaatcctgggccttatgtgtgtagactggcaatgtccatttgaagattttgtatttcctcctagtgtcagtgaaaatgtgctaaaaatttcagttaaggaacagggtctgttccacaaaaaagacagtgccaatcaaggctgtgttcgaaaagtttacctgaaggacaccgccacagcagagagagcatgtaatgccattgaggatgcacagtcaacgagacagcagcaaaaattgatgaagcagtcatcagtgagacttctcagaccccaattgccatcttaatcacagacctcaggggctccaacagggagaaaaaacaatcactggtcttgtctataagtcactctgctttatcttgctaaagacaatttttcaagcaatcctttagttttagttttctggaatagctagtattgggttttctagttttttcaccttttagtttttactctaattttgtaaccatgtatatgctagcagtccacttctacgccaccacccaaatgggtcagacccttgaagaaacgtcacttcaaactcagaatgaaattttcattaatattaaaattgtgaagcaaaggtcaataggcttatatttaattaaagccttactgaagaataagaaatgagcttagaatgactagtgttctttgaaaggtttttttatttttgtttttttggggtttttttttttttttgagaccgagtcttgctctgtcgcccaggctggaatgcagtggtgcgatcttggctcactgcaatctctgcctctcgggttcaagctgttctactgcctcagcctcctgagtagctgggattacaggtgtgtgccaccacgcctgggtaattttttttttttttgtatttttagtagagatgagtttcaccatgttggtcagtctagtctcgaactcctgaccttgtgatccgcatgcctcagcctcccaaagtgctgggattacaggcatgagccaccacggcccgccaaaaggctttaacccatgaacaaatgttggatcctgacattttgtttaagagtgatttgttcaataattgaactgagttaacattcttggtaaaccaggtaattgaatgaagaaaggtcactaaagggagaaatgacatgttttctattttcttttcatgaaaacactgtttttccccctaataaagcatattttactttggtgcttatttttcctccttgcagtctaataaaaaaatctggacaatcaaaccttaaaatagctacactctgccctctgtaatgtagcattcataaaaatttggaagtatttacatcctctttcaagatgagcttatatgacacaattattatttgctgatacatgaaaatactgcactttaagtttctcaagactctgaaatatgtaaaattcaatatttttatattcccagaaattgtttcttacaggttgaaagtcttttaagggcatcacaaattaacatttactcctaatgcacgcctagaatgtattttaaatacttactaagaagaatgaaaattctttggttgttttatatataaataaggcatatataatgacactgtgttctgtgagggagcaggccctgtgagaatcaattcaggacagtatttttttttgtcctttctccatccttgatcagagataaactattaaaactttaaaaaatactcaaaaatatgtaagttttttggttgaacctttagatttgctcataatgtttaacataacaacatttatttcaaatcactgaattcatggagatgtggacacgcttggtttgctctatttttgtttatgtgtgatagtggttctgtcatcatcattcatgttttttaaggcctggtcataaaactttaaattttactagtgttacttaatgtatattctaaaaagagaatgcagtaactaatgccctaaatgtttgatctctgtttgtcattactttttcaaaattatttttttctgtaaagtataatatataaaacttcttgcttaaattgaatttctatattagtggttaattgcagtttattaaagggatcattatcagtaatttcatagcaactgttctagtgttttgtgtttttaaaacagaattaggaatttgagatatctgattatatttttcatatgaatcacagctgttgacaatgtcccatatatttaagaaattatatcatactgatactatttgtaacattttgatttgatttaatctccagggacagaaataattcattggtaaagtgtaataatgcgttttttaaaaatgctttgagaggtaattacttgcatatgagagaaataaaacatttggcacattgtt

SEQ ID NO: 333016 - DNA, 3649 bp, Homo sapiens
ctcattctgaagatgagatcccagttctttgtggattcctcttccttattcatggctttttgcaattgtcaaggaatgactaggtaccaagcaactttaaaaaatgtatatttaagcattgaaataatatcaaatgtgatttctctgcttgtggttatattgattatattatccttttaataatattggcattatattcttggtcgtaaaatgtcaaggtcttatttattcagtatatttatgttctgtattttcatatatattatctattttcagccatgcattatatataatgtcagtaatagtatttcattagcattcattataaaaaaactcgtttttaatatttgactaattcaagtcacagtacttttgagatagctgaaaaggaaaataaatgtgttttaatgtgctactacttatacttgaattattttatgctcatatttgtttttagaaataaattgtgccagctattttgaaatcttagaaattgttcatattaatattgtcatattttcttttctataagaaatataatttgatatataaatatacttccccacgcatgtttaacgtataagatcaaatgttcaaagcattaaacattaattatcttggaattttattatgtgtataatatctactaatacctctatgtaaaccagtggttcttaatctttgagatcacagacccccctctgtgattaaaaaaaaactgacaaaaaatattaactgccctgaaaaaagttttagaactacgttttcaaaattttctattttatgttaggtggttcagagacccaccgcaaagtgctaccagtgacccctatttcaaatcccctgtaatgttaatgtagttattttatattagcatatgtttcttaattaaagtgtgtgataattgctggtagatattttaatatttctaagttactacagaacaaaatgtattttaccagaagaccacttggtaagcatttattacatgtttttcttttaaggcaacagtggaagttaacttacaaacatgctgtgaatatttttctagcttcatgtaccaatatgtagaattgtgcttttatttctaattaattttttcctaacactattattataattagctaatatgcagtattgtaaatactacttaaatgcataacttcccaaatctagagcctggtttccttttcagaatcatatcaaaaagttggaaggagagacttaccgataccactgtgctattcctggaagcaagaagacaatccttatggttacaaataggcgagtgttgtgtataaaggaagttgaaatcctgggccttatgtgtgtagactggcaatgtccatttgaagattttgtatttcctcctagtgtcagtgaaaatgtgctaaaaatttcagttaaggaacagggtctgttccacaaaaaagacagtgccaatcaaggctgtgttcgaaaagtttacctgaaggacaccgccacagcagagagagcatgtaatgccattgaggatgcacagtcaacgagacagcagcaaaaattgatgaagcagtcatcagtgagacttctcagaccccaattgccatcttaatcacagacctcaggggctccaacagggagaaaaaacaatcactggtcttgtctataagtcactctgctttatcttgctaaagacaatttttcaagcaatcctttagttttagttttctggaatagctagtattgggttttctagttttttcaccttttagtttttactctaattttgtaaccatgtatatgctagcagtccacttctacgccaccacccaaatgggtcagacccttgaagaaacgtcacttcaaactcagaatgaaattttcattaatattaaaattgtgaagcaaaggtcaataggcttatatttaattaaagccttactgaagaataagaaatgagcttagaatgactagtgttctttgaaaggtttttttatttttgtttttttggggtttttttttttttttgagaccgagtcttgctctgtcgcccaggctggaatgcagtggtgcgatcttggctcactgcaatctctgcctctcgggttcaagctgttctactgcctcagcctcctgagtagctgggattacaggtgtgtgccaccacgcctgggtaattttttttttttttgtatttttagtagagatgagtttcaccatgttggtcagtctagtctcgaactcctgaccttgtgatccgcatgcctcagcctcccaaagtgctgggattacaggcatgagccaccacggcccgccaaaaggctttaacccatgaacaaatgttggatcctgacattttgtttaagagtgatttgttcaataattgaactgagttaacattcttggtaaaccaggtaattgaatgaagaaaggtcactaaagggagaaatgacatgttttctattttcttttcatgaaaacactgtttttccccctaataaagcatattttactttggtgcttatttttcctccttgcagtctaataaaaaaatctggacaatcaaaccttaaaatagctacactctgccctctgtaatgtagcattcataaaaatttggaagtatttacatcctctttcaagatgagcttatatgacacaattattatttgctgatacatgaaaatactgcactttaagtttctcaagactctgaaatatgtaaaattcaatatttttatattcccagaaattgtttcttacaggttgaaagtcttttaagggcatcacaaattaacatttactcctaatgcacgcctagaatgtattttaaatacttactaagaagaatgaaaattctttggttgttttatatataaataaggcatatataatgacactgtgttctgtgagggagcaggccctgtgagaatcaattcaggacagtatttttttttgtcctttctccatccttgatcagagataaactattaaaactttaaaaaatactcaaaaatatgtaagttttttggttgaacctttagatttgctcataatgtttaacataacaacatttatttcaaatcactgaattcatggagatgtggacacgcttggtttgctctatttttgtttatgtgtgatagtggttctgtcatcatcattcatgttttttaaggcctggtcataaaactttaaattttactagtgttacttaatgtatattctaaaaagagaatgcagtaactaatgccctaaatgtttgatctctgtttgtcattactttttcaaaattatttttttctgtaaagtataatatataaaacttcttgcttaaattgaatttctatattagtggttaattgcagtttattaaagggatcattatcagtaatttcatagcaactgttctagtgttttgtgtttttaaaacagaattaggaatttgagatatctgattatatttttcatatgaatcacagctgttgacaatgtcccatatatttaagaaattatatcatactgatactatttgtaacattttgatttgatttaatctccagggacagaaataattcattggtaaagtgtaataatgcgttttttaaaaatgctttgagaggtaattacttgcatatgagagaaataaaacatttggcacattgtt

SEQ ID NO: 333017 - DNA, 2670 bp, Homo sapiens
gcgatgtcctaaccactgaggatccccagtgcccccagcccttggagggggcctggccggtgactctgggagatgctcaggccctgaagcccctcaagttcggcagcagaatcaactgaggaagtatctagcctccgtccccctcgcctgatccatgaagatggcatcattcgtccttatgacagacaggaatctgagggctctgacttacttgagaatcatatcaaaaagttggaaggagagacttaccgataccactgtgctattcctggaagcaagaagacaatccttatggttacaaataggcgagtgttgtgtataaaggaagttgaaatcctgggccttatgtgtgtagactggcaatgtccatttgaagattttgtatttcctcctagtgtcagtgaaaatgtgctaaaaatttcagttaaggaacagggtctgttccacaaaaaagacagtgccaatcaaggctgtgttcgaaaagtttacctgaaggacaccgccacagcagagagagcatgtaatgccattgaggatgcacagtcaacgagacagcagcaaaaattgatgaagcagtcatcagtgagacttctcagaccccaattgccatcttaatcacagacctcaggggctccaacagggagaaaaaacaatcactggtcttgtctataagtcactctgctttatcttgctaaagacaatttttcaagcaatcctttagttttagttttctggaatagctagtattgggttttctagttttttcaccttttagtttttactctaattttgtaaccatgtatatgctagcagtccacttctacgccaccacccaaatgggtcagacccttgaagaaacgtcacttcaaactcagaatgaaattttcattaatattaaaattgtgaagcaaaggtcaataggcttatatttaattaaagccttactgaagaataagaaatgagcttagaatgactagtgttctttgaaaggtttttttatttttgtttttttggggtttttttttttttttgagaccgagtcttgctctgtcgcccaggctggaatgcagtggtgcgatcttggctcactgcaatctctgcctctcgggttcaagctgttctactgcctcagcctcctgagtagctgggattacaggtgtgtgccaccacgcctgggtaattttttttttttttgtatttttagtagagatgagtttcaccatgttggtcagtctagtctcgaactcctgaccttgtgatccgcatgcctcagcctcccaaagtgctgggattacaggcatgagccaccacggcccgccaaaaggctttaacccatgaacaaatgttggatcctgacattttgtttaagagtgatttgttcaataattgaactgagttaacattcttggtaaaccaggtaattgaatgaagaaaggtcactaaagggagaaatgacatgttttctattttcttttcatgaaaacactgtttttccccctaataaagcatattttactttggtgcttatttttcctccttgcagtctaataaaaaaatctggacaatcaaaccttaaaatagctacactctgccctctgtaatgtagcattcataaaaatttggaagtatttacatcctctttcaagatgagcttatatgacacaattattatttgctgatacatgaaaatactgcactttaagtttctcaagactctgaaatatgtaaaattcaatatttttatattcccagaaattgtttcttacaggttgaaagtcttttaagggcatcacaaattaacatttactcctaatgcacgcctagaatgtattttaaatacttactaagaagaatgaaaattctttggttgttttatatataaataaggcatatataatgacactgtgttctgtgagggagcaggccctgtgagaatcaattcaggacagtatttttttttgtcctttctccatccttgatcagagataaactattaaaactttaaaaaatactcaaaaatatgtaagttttttggttgaacctttagatttgctcataatgtttaacataacaacatttatttcaaatcactgaattcatggagatgtggacacgcttggtttgctctatttttgtttatgtgtgatagtggttctgtcatcatcattcatgttttttaaggcctggtcataaaactttaaattttactagtgttacttaatgtatattctaaaaagagaatgcagtaactaatgccctaaatgtttgatctctgtttgtcattactttttcaaaattatttttttctgtaaagtataatatataaaacttcttgcttaaattgaatttctatattagtggttaattgcagtttattaaagggatcattatcagtaatttcatagcaactgttctagtgttttgtgtttttaaaacagaattaggaatttgagatatctgattatatttttcatatgaatcacagctgttgacaatgtcccatatatttaagaaattatatcatactgatactatttgtaacattttgatttgatttaatctccagggacagaaataattcattggtaaagtgtaataatgcgttttttaaaaatgctttgagaggtaattacttgcatatgagagaaataaaacatttggcacattgtt

SEQ ID NO: 333018 - DNA, 6038 bp, Homo sapiens
  misc_feature (30)..(30): n is a, c, g, or t
  misc_feature (44)..(44): n is a, c, g, or t
aagagaagaggaaggcagcccatatctacnacacagcctctcgncactgctgctccttatatttcctggaaggaagaacttcataggagcagggaagtcagatgcatgttgcagtgtccatcagtagaagtcagcttcttacctctcatagtgaatacagttgctctgcctgatgaattgagctacatatgtacacatggggaagactgggatgtagcttacattattcatctttatccttctctcactttgcggaatcttctcccatattccctaagatatttacttgagggaacagcagaaactcatgagctggcagaaggcagtactgctgatgttctgcattcgagaatcagtggtgaaataatggaattagtcctggtgaaataccagggcaaaaactggaatggacatttccgcatacgtgatacactaccagaattctttcctgtgtgtttttcttctgactccacagaagtgacgacagtcgacctgtcagtccacgtcaggagaattggcagccggatggtgctgtctgtctttagtccctattggttaatcaacaagactacccgggttctccagtatcgttcagaagatattcatgtgaaacatccagctgatttcagggatattattttattttctttcaagaagaagaacatttttactaaaaataaggtacaattaaaaatttcaaccagtgcctggtccagtagtttctcattggatacagtgggaagttatgggtgtgtgaagtgtcctgccaacaatatggagtacctggttggtgttagcatcaaaatgagcagtttcaacctttcacgaatagttaccctgactcccttttgtaccattgcaaacaagtcatcattagaactagaagttggcgagattgcatctgatggctcaatgccaactaataaatggaactatattgcttcttcagagtgccttccattttggccagaaaatttgtcaggcaaactttgtgtgagagtggtgggctgtgaaggatcttccaaaccattcttttataaccgacaggataatggcactttattgagcttagaagatctgaatgggggtatcttggtggatgtaaacactgccgaacattcaactgtcataactttttctgattaccatgagggatctgcacctgccttgataatgaaccatacaccatgggacatcctcacatacaaacagagtgggtcaccagaagaaatggtcttgctgccaagacaggctcgactttttgcctgggcagatcctactggtaccagaaaacttacatggacatatgcagcaaatgttggggaacatgatctgttaaaggatggatgtggacagtttccatatgatgcaaacatccagatacactgggtatcatttctggatgggcgccagagagttttgcttttcaccgatgatgttgccttggtttccaaagcactgcaggcagaagaaatggaacaggctgattatgaaataaccttgtctctccacagtcttgggctttcactggttaacaatgaaagcaagcaggaagtttcctatattgggataaccagttctggtgttgtttgggaggtgaaaccaaagcagaaatggaagccatttagtcaaaagcagataatcttattggaacaatcctatcagaaacatcaaatatcaagagaccatggctggattaagctagataataattttgaggtcaattttgataaagatccaatggaaatgcgcctccctattcgtagccctattaaacgagactttttatcaggaattcagattgaatttaagcagtcttctcaccagagaagtttaagggccaggttgtactggcttcaggttgataatcagttaccaggtgcaatgttccctgttgtatttcatcctgttgcccctccaaaatctattgctttagattcagagcccaagcctttcattgatgtgagtgtcatcacaagatttaatgagtacagtaaagtcttacagttcaagtattttatggtcctcattcaggaaatggccttaaaaattgatcaagggtttctaggagctattattgcactgtttaccccaacaacagaccctgaagctgaaagaagacggacaaagttaatccaacaagatattgatgctctaaatgcagaattaatggagacttcaatgactgatatgtcaattcttagtttctttgaacatttccatatttctcctgtgaagttgcatttgagtttgtctttgggttccggaggtgaagaatcagacaaagaaaaacaggaaatgtttgcagttcattctgtcaacttgctgttgaaaagcataggtgctactctgactgatgtggatgaccttatattcaaacttgcttattatgaaattcgatatcagttctacaagagagatcagcttatatggagtgttgttaggcattacagtgaacagttcttgaaacagatgtatgtccttgtattggggttagatgtacttggaaacccatttggattaattagaggtctgtctgaaggagttgaagctttattctatgaacccttccagggtgctgttcaaggccctgaagaatttgcagaggggttagtgattggagtgagaagcctctttggacacacagtaggtggtgcagcaggagttgtatctcgaatcaccggttctgttgggaaaggtttggcagcaattacaatggacaaggaatatcagcaaaaaagaagagaagagttgagtcgacagcccagagattttggagacagcctggccagaggaggaaagggctttctgcgaggagttgttggtggagtgactggaataataacaaaacctgtggaaggtgccaaaaaggaaggagctgctggattctttaaaggaattggaaaagggcttgtgggtgctgtggcccgtccaactggtggaatcgtagatatggccagtagtaccttccaaggcattcagagggcagcagaatcaactgaggaagtatctagcctccgtccccctcgcctgatccatgaagatggcatcattcgtccttatgacagacaggaatctgagggctctgacttacttgagaatcatatcaaaaagttggaaggagagacttaccgataccactgtgctattcctggaagcaagaagacaatccttatggttacaaataggcgagtgttgtgtataaaggaagttgaaatcctgggccttatgtgtgtagactggcaatgtccatttgaagattttgtatttcctcctagtgtcagtgaaaatgtgctaaaaatttcagttaaggaacagggtctgttccacaaaaaagacagtgccaatcaaggctgtgttcgaaaagtttacctgaaggacaccgccacagcagagagagcatgtaatgccattgaggatgcacagtcaacgagacagcagcaaaaattgatgaagcagtcatcagtgagacttctcagaccccaattgccatcttaatcacagacctcaggggctccaacagggagaaaaaacaatcactggtcttgtctataagtcactctgctttatcttgctaaagacaatttttcaagcaatcctttagttttagttttctggaatagctagtattgggttttctagttttttcaccttttagtttttactctaattttgtaaccatgtatatgctagcagtccacttctacgccaccacccaaatgggtcagacccttgaagaaacgtcacttcaaactcagaatgaaattttcattaatattaaaattgtgaagcaaaggtcaataggcttatatttaattaaagccttactgaagaataagaaatgagcttagaatgactagtgttctttgaaaggtttttttatttttgtttttttggggtttttttttttttttgagaccgagtcttgctctgtcgcccaggctggaatgcagtggtgcgatcttggctcactgcaatctctgcctctcgggttcaagctgttctactgcctcagcctcctgagtagctgggattacaggtgtgtgccaccacgcctgggtaattttttttttttttgtatttttagtagagatgagtttcaccatgttggtcagtctagtctcgaactcctgaccttgtgatccgcatgcctcagcctcccaaagtgctgggattacaggcatgagccaccacggcccgccaaaaggctttaacccatgaacaaatgttggatcctgacattttgtttaagagtgatttgttcaataattgaactgagttaacattcttggtaaaccaggtaattgaatgaagaaaggtcactaaagggagaaatgacatgttttctattttcttttcatgaaaacactgtttttccccctaataaagcatattttactttggtgcttatttttcctccttgcagtctaataaaaaaatctggacaatcaaaccttaaaatagctacactctgccctctgtaatgtagcattcataaaaatttggaagtatttacatcctctttcaagatgagcttatatgacacaattattatttgctgatacatgaaaatactgcactttaagtttctcaagactctgaaatatgtaaaattcaatatttttatattcccagaaattgtttcttacaggttgaaagtcttttaagggcatcacaaattaacatttactcctaatgcacgcctagaatgtattttaaatacttactaagaagaatgaaaattctttggttgttttatatataaataaggcatatataatgacactgtgttctgtgagggagcaggccctgtgagaatcaattcaggacagtatttttttttgtcctttctccatccttgatcagagataaactattaaaactttaaaaaatactcaaaaatatgtaagttttttggttgaacctttagatttgctcataatgtttaacataacaacatttatttcaaatcactgaattcatggagatgtggacacgcttggtttgctctatttttgtttatgtgtgatagtggttctgtcatcatcattcatgttttttaaggcctggtcataaaactttaaattttactagtgttacttaatgtatattctaaaaagagaatgcagtaactaatgccctaaatgtttgatctctgtttgtcattactttttcaaaattatttttttctgtaaagtataatatataaaacttcttgcttaaattgaatttctatattagtggttaattgcagtttattaaagggatcattatcagtaatttcatagcaactgttctagtgttttgtgtttttaaaacagaattaggaatttgagatatctgattatatttttcatatgaatcacagctgttgacaatgtcccatatatttaagaaattatatcatactgatactatttgtaacattttgatttgatttaatctccagggacagaaataattcattggtaaagtgtaataatgcgttttttaaaaatgctttgagaggtaattacttgcatatgagagaaataaaacatttggcacattgttaaaaaaaaaaaaaaaaaaaaaaaaaaaaaaaaaaaaaaaaaaaaaaaaaaaaaaaaaaaaaaaaaaaaaaaaaaaaaaaaaaaaaacaagcaacgaaaaaacaaaaaaaaacgaaaaaccaaaaggacgggcgcgatgaagagaacacaacaatacacgaggagcaggaacactcgtcagcgagacgcctataaagaagaaggggagggacgtgcagacaaaacaacagaaaatggaaaagacaggagaagaccctacgacgacaatccactgcgtcgcacaaacaactaactaacgtagaaagcgcagctaagagcggacacaaccaaccgcccgaaggtgaacatcacgaggccgaaaacgaacagcaagcaatgtaccggtgcaacgaaaaaaaaactagacactgagggagaacccacaagcaatagcatgtcaaaaagaaatagagactagaaaaaaaacacaaacaacggaaaaaaacc

SEQ ID NO: 333019 - DNA, 2323 bp, Homo sapiens
tcgggtgcaagggtcttatttttatatgacacatctggactgtatccttggtccttagctgttggtcctgtttggagagcttcagcccttgctttcatacctttcccttcaaccaaatgagcctatacttgtctttaaaattcataataagtattttactttacagagagcatgtaatgccattgaggatgcacagtcaacgagacagcagcaaaaattgatgaagcagtcatcagtgagacttctcagaccccaattgccatcttaatcacagacctcaggggctccaacagggagaaaaaacaatcactggtcttgtctataagtcactctgctttatcttgctaaagacaatttttcaagcaatcctttagttttagttttctggaatagctagtattgggttttctagttttttcaccttttagtttttactctaattttgtaaccatgtatatgctagcagtccacttctacgccaccacccaaatgggtcagacccttgaagaaacgtcacttcaaactcagaatgaaattttcattaatattaaaattgtgaagcaaaggtcaataggcttatatttaattaaagccttactgaagaataagaaatgagcttagaatgactagtgttctttgaaaggtttttttatttttgtttttttggggtttttttttttttttgagaccgagtcttgctctgtcgcccaggctggaatgcagtggtgcgatcttggctcactgcaatctctgcctctcgggttcaagctgttctactgcctcagcctcctgagtagctgggattacaggtgtgtgccaccacgcctgggtaattttttttttttttgtatttttagtagagatgagtttcaccatgttggtcagtctagtctcgaactcctgaccttgtgatccgcatgcctcagcctcccaaagtgctgggattacaggcatgagccaccacggcccgccaaaaggctttaacccatgaacaaatgttggatcctgacattttgtttaagagtgatttgttcaataattgaactgagttaacattcttggtaaaccaggtaattgaatgaagaaaggtcactaaagggagaaatgacatgttttctattttcttttcatgaaaacactgtttttccccctaataaagcatattttactttggtgcttatttttcctccttgcagtctaataaaaaaatctggacaatcaaaccttaaaatagctacactctgccctctgtaatgtagcattcataaaaatttggaagtatttacatcctctttcaagatgagcttatatgacacaattattatttgctgatacatgaaaatactgcactttaagtttctcaagactctgaaatatgtaaaattcaatatttttatattcccagaaattgtttcttacaggttgaaagtcttttaagggcatcacaaattaacatttactcctaatgcacgcctagaatgtattttaaatacttactaagaagaatgaaaattctttggttgttttatatataaataaggcatatataatgacactgtgttctgtgagggagcaggccctgtgagaatcaattcaggacagtatttttttttgtcctttctccatccttgatcagagataaactattaaaactttaaaaaatactcaaaaatatgtaagttttttggttgaacctttagatttgctcataatgtttaacataacaacatttatttcaaatcactgaattcatggagatgtggacacgcttggtttgctctatttttgtttatgtgtgatagtggttctgtcatcatcattcatgttttttaaggcctggtcataaaactttaaattttactagtgttacttaatgtatattctaaaaagagaatgcagtaactaatgccctaaatgtttgatctctgtttgtcattactttttcaaaattatttttttctgtaaagtataatatataaaacttcttgcttaaattgaatttctatattagtggttaattgcagtttattaaagggatcattatcagtaatttcatagcaactgttctagtgttttgtgtttttaaaacagaattaggaatttgagatatctgattatatttttcatatgaatcacagctgttgacaatgtcccatatatttaagaaattatatcatactgatactatttgtaacattttgatttgatttaatctccagggacagaaataattcattggtaaagtgtaataatgcgttttttaaaaatgctttgagaggtaattacttgcatatgagagaaataaaacatttggcacattgtt

SEQ ID NO: 333020 - DNA, 3940 bp, Homo sapiens
  misc_feature (30)..(30): n is a, c, g, or t
  misc_feature (44)..(44): n is a, c, g, or t
aagagaagaggaaggcagcccatatctacnacacagcctctcgncactgctgctccttatatttcctggaaggaagaacttcataggagcagggaagtcagatgcatgttgcagtgtccatcagtagaagtcagcttcttacctctcatagtgaatacagttgctctgcctgatgaattgagctacatatgtacacatggggaagactgggatgtagcttacattattcatctttatccttctctcactttgcggaatcttctcccatattccctaagatatttacttgagggaacagcagaaactcatgagctggcagaaggcagtactgctgatgttctgcattcgagaatcagtggtgaaataatggaattagtcctggtgaaataccagggcaaaaactggaatggacatttccgcatacgtgatacactaccagaattctttcctgtgtgtttttcttctgactccacagaagtgacgacagtcgacctgtcagtccacgtcaggagaattggcagccggatggtgctgtctgtctttagtccctattggttaatcaacaagactacccgggttctccagtatcgttcagaagatattcatgtgaaacatccagctgatttcagggatattattttattttctttcaagaagaagaacatttttactaaaaataaggtacaattaaaaatttcaaccagtgcctggtccagtagtttctcattggatacagtgggaagttatgggtgtgtgaagtgtcctgccaacaatatggagtacctggttggtgttagcatcaaaatgagcagtttcaacctttcacgaatagttaccctgactcccttttgtaccattgcaaacaagtcatcattagaactagaagttggcgagattgcatctgatggctcaatgccaactaataaatggaactatattgcttcttcagagtgccttccattttggccagaaaatttgtcaggcaaactttgtgtgagagtggtgggctgtgaaggatcttccaaaccattcttttataaccgacaggataatggcactttattgagcttagaagatctgaatgggggtatcttggtggatgtaaacactgccgaacattcaactgtcataactttttctgattaccatgagggatctgcacctgccttgataatgaaccatacaccatgggacatcctcacatacaaacagagtgggtcaccagaagaaatggtcttgctgccaagacaggctcgactttttgcctgggcagatcctactggtaccagaaaacttacatggacatatgcagcaaatgttggggaacatgatctgttaaaggatggatgtggacagtttccatatgatgcaaacatccagatacactgggtatcatttctggatgggcgccagagagttttgcttttcaccgatgatgttgccttggtttccaaagcactgcaggcagaagaaatggaacaggctgattatgaaataaccttgtctctccacagtcttgggctttcactggttaacaatgaaagcaagcaggaagtttcctatattgggataaccagttctggtgttgtttgggaggtgaaaccaaagcagaaatggaagccatttagtcaaaagcagataatcttattggaacaatcctatcagaaacatcaaatatcaagagaccatggctggattaagctagataataattttgaggtcaattttgataaagatccaatggaaatgcgcctccctattcgtagccctattaaacgagactttttatcaggaattcagattgaatttaagcagtcttctcaccagagaagtttaagggccaggttgtactggcttcaggttgataatcagttaccaggtgcaatgttccctgttgtatttcatcctgttgcccctccaaaatctattgctttagattcagagcccaagcctttcattgatgtgagtgtcatcacaagatttaatgagtacagtaaagtcttacagttcaagtattttatggtcctcattcaggaaatggccttaaaaattgatcaagggtttctaggagctattattgcactgtttaccccaacaacagaccctgaagctgaaagaagacggacaaagttaatccaacaagatattgatgctctaaatgcagaattaatggagacttcaatgactgatatgtcaattcttagtttctttgaacatttccatatttctcctgtgaagttgcatttgagtttgtctttgggttccggaggtgaagaatcagacaaagaaaaacaggaaatgtttgcagttcattctgtcaacttgctgttgaaaagcataggtgctactctgactgatgtggatgaccttatattcaaacttgcttattatgaaattcgatatcagttctacaagagagatcagcttatatggagtgttgttaggcattacagtgaacagttcttgaaacagatgtatgtccttgtattggggttagatgtacttggaaacccatttggattaattagaggtctgtctgaaggagttgaagctttattctatgaacccttccagggtgctgttcaaggccctgaagaatttgcagaggggttagtgattggagtgagaagcctctttggacacacagtaggtggtgcagcaggagttgtatctcgaatcaccggttctgttgggaaaggtttggcagcaattacaatggacaaggaatatcagcaaaaaagaagagaagagttgagtcgacagcccagagattttggagacagcctggccagaggaggaaagggctttctgcgaggagttgttggtggagtgactggaataataacaaaacctgtggaaggtgccaaaaaggaaggagctgctggattctttaaaggaattggaaaagggcttgtgggtgctgtggcccgtccaactggtggaatcgtagatatggccagtagtaccttccaaggcattcagagggcagcagaatcaactgaggaagtatctagcctccgtccccctcgcctgatccatgaagatggcatcattcgtccttatgacagacaggaatctgagggctctgacttacttgagaatcatatcaaaaagttggaaggagagacttaccgataccactgtgctattcctggaagcaagaagacaatccttatggttacaaataggcgagtgttgtgtataaaggaagttgaaatcctgggccttatgtgtgtagactggcaatgtccatttgaagattttgtatttcctcctagtgtcagtgaaaatgtgctaaaaatttcagttaaggaacagggtctgttccacaaaaaagacagtgccaatcaaggctgtgttcgaaaagtttacctgaaggacaccgccacagcagagagagcatgtaatgccattgaggatgcacagtcaacgagacagcagcaaaaattgatgaagcagtcatcagtgagacttctcagaccccaattgccatcttaatcacagacctcaggggctccaacagggagaaaaaacaatcactggtcttgtctataagtcactctgctttatcttgctaaagacaatttttcaagcaatcctttagttttagttttctggaatagctagtattgggttttctagttttttcaccttttagtttttactctaattttgtaaccatgtatatgctagcagtccacttctacgccaccacccaaatgggtcagacccttgaagaaacgtcacttcaaactcagaatgaaattttcattaatattaaaattgtgaagcaaaggtcaataggcttatatttaattaaagccttactgaagaataagaaatgagcttagaatgactagtgttctttgaaaggtttttttatttttgtttttttggggttttttttcaacagagcaagactgtctctcaaaaaaaaaaa

SEQ ID NO: 333021 - DNA, 779 bp, Homo sapiens
  misc_feature (9)..(9): n is a, c, g, or t
cggtgtctngaggatccccgaactgattgagcgccctgtgagaatcaattcaggacagtatttttttttgtcctttctccatccttgatcagagataaactattaaaactttaaaaaatactcaaaaatatgtaagttttttggttgaacctttagatttgctcataatgtttaacataacaacatttatttcaaatcactgaattcatggagatgtggacacgcttggtttgctctatttttgtttatgtgtgatagtggttctgtcatcatcattcatgttttttaaggcctggtcataaaactttaaattttactagtgttacttaatgtatattctaaaaagagaatgcagtaactaatgccctaaatgtttgatctctgtttgtcattactttttcaaaattatttttttctgtaaagtataatatataaaacttcttgcttaaattgaatttctatattagtggttaattgcagtttattaaagggatcattatcagtaatttcatagcaactgttctagtgttttgtgtttttaaaacagaattaggaatttgagatatctgattatatttttcatatgaatcacagctgttgacaatgtcccatatatttaagaaattatatcatactgatactatttgtaacattttgatttgatttaatctccagggacagaaataattcattggtaaagtgtaataatgcgttttttaaaaatgctttgagaggtaattacttgcatatgagagaaataaaacatttggcacattgtt

SEQ ID NO: 333022 - DNA, 4271 bp, Homo sapiens
  misc_feature (30)..(30): n is a, c, g, or t
  misc_feature (44)..(44): n is a, c, g, or t
aagagaagaggaaggcagcccatatctacnacacagcctctcgncactgctgctccttatatttcctggaaggaagaacttcataggagcagggaagtcagatgcatgttgcagtgtccatcagtagaagtcagcttcttacctctcatagtgaatacagttgctctgcctgatgaattgagctacatatgtacacatggggaagactgggatgtagcttacattattcatctttatccttctctcactttgcggaatcttctcccatattccctaagatatttacttgagggaacagcagaaactcatgagctggcagaaggcagtactgctgatgttctgcattcgagaatcagtggtgaaataatggaattagtcctggtgaaataccagggcaaaaactggaatggacatttccgcatacgtgatacactaccagaattctttcctgtgtgtttttcttctgactccacagaagtgacgacagtcgacctgtcagtccacgtcaggagaattggcagccggatggtgctgtctgtctttagtccctattggttaatcaacaagactacccgggttctccagtatcgttcagaagatattcatgtgaaacatccagctgatttcagggatattattttattttctttcaagaagaagaacatttttactaaaaataaggtacaattaaaaatttcaaccagtgcctggtccagtagtttctcattggatacagtgggaagttatgggtgtgtgaagtgtcctgccaacaatatggagtacctggttggtgttagcatcaaaatgagcagtttcaacctttcacgaatagttaccctgactcccttttgtaccattgcaaacaagtcatcattagaactagaagttggcgagattgcatctgatggctcaatgccaactaataaatggaactatattgcttcttcagagtgccttccattttggccagaaaatttgtcaggcaaactttgtgtgagagtggtgggctgtgaaggatcttccaaaccattcttttataaccgacaggataatggcactttattgagcttagaagatctgaatgggggtatcttggtggatgtaaacactgccgaacattcaactgtcataactttttctgattaccatgagggatctgcacctgccttgataatgaaccatacaccatgggacatcctcacatacaaacagagtgggtcaccagaagaaatggtcttgctgccaagacaggctcgactttttgcctgggcagatcctactggtaccagaaaacttacatggacatatgcagcaaatgttggggaacatgatctgttaaaggatggatgtggacagtttccatatgatgcaaacatccagatacactgggtatcatttctggatgggcgccagagagttttgcttttcaccgatgatgttgccttggtttccaaagcactgcaggcagaagaaatggaacaggctgattatgaaataaccttgtctctccacagtcttgggctttcactggttaacaatgaaagcaagcaggaagtttcctatattgggataaccagttctggtgttgtttgggaggtgaaaccaaagcagaaatggaagccatttagtcaaaagcagataatcttattggaacaatcctatcagaaacatcaaatatcaagagaccatggctggattaagctagataataattttgaggtcaattttgataaagatccaatggaaatgcgcctccctattcgtagccctattaaacgagactttttatcaggaattcagattgaatttaagcagtcttctcaccagagaagtttaagggccaggttgtactggcttcaggttgataatcagttaccaggtgcaatgttccctgttgtatttcatcctgttgcccctccaaaatctattgctttagattcagagcccaagcctttcattgatgtgagtgtcatcacaagatttaatgagtacagtaaagtcttacagttcaagtattttatggtcctcattcaggaaatggccttaaaaattgatcaagggtttctaggagctattattgcactgtttaccccaacaacagaccctgaagctgaaagaagacggacaaagttaatccaacaagatattgatgctctaaatgcagaattaatggagacttcaatgactgatatgtcaattcttagtttctttgaacatttccatatttctcctgtgaagttgcatttgagtttgtctttgggttccggaggtgaagaatcagacaaagaaaaacaggaaatgtttgcagttcattctgtcaacttgctgttgaaaagcataggtgctactctgactgatgtggatgaccttatattcaaacttgcttattatgaaattcgatatcagttctacaagagagatcagcttatatggagtgttgttaggcattacagtgaacagttcttgaaacagatgtatgtccttgtattggggttagatgtacttggaaacccatttggattaattagaggtctgtctgaaggagttgaagctttattctatgaacccttccagggtgctgttcaaggccctgaagaatttgcagaggggttagtgattggagtgagaagcctctttggacacacagtaggtggtgcagcaggagttgtatctcgaatcaccggttctgttgggaaaggtttggcagcaattacaatggacaaggaatatcagcaaaaaagaagagaagagttgagtcgacagcccagagattttggagacagcctggccagaggaggaaagggctttctgcgaggagttgttggtggagtgactggaataataacaaaacctgtggaaggtgccaaaaaggaaggagctgctggattctttaaaggaattggaaaagggcttgtgggtgctgtggcccgtccaactggtggaatcgtagatatggccagtagtaccttccaaggcattcagagggcagcagaatcaactgaggaagtatctagcctccgtccccctcgcctgatccatgaagatggcatcattcgtccttatgacagacaggaatctgagggctctgacttacttgagcaagaactggaaatacaggaataaatgtttcctaaactactacttgatttcatccttaaaaatcaaaacaaactgtggtgttaattgactgtgtgtgaattccattgtcaattttaatgaaattttctttaaaactctcacctccatctgaacttttcatagtagtgggattgactacaaataaaaacttgtggtattcctggtaatactgtccagaaataagagattagtataaaatattaaaggatgcagagaatcagctctgttctgcgtttaatagatgaaagcctttattgagctcagaagcagatactgttactatcatttggaaaattttatcttatggtgttcatgtgcatttcaggtaaaattgaaaaacaggacaattattatgtccaattaatatgtttatgtttgtgagtcttgatgatggaattacatagctttctgtttcacaaatggctctaaatttgcttaagttacgggactattacctggagcatctgctttaataattgaattgtcagttgctctgagcctgcccttagacctcaagtaataaatagttggcacatgaattttgaggatatgtttcctcttccctctttttcctatttaaccccttggtactgttgctaaataaatgatagccattttataattatgttatatacattttcagcctttagcatttctgcttttcaaaaattgaatctccttgttggttatgcttatttcataattattagttttaattaatgtagatagaagttgaacatgtaattaggcaaattgctgtgtggcacttgaatacatagatttctttattttcaaaaaccaaccttttgcttttaaatccttagagagggtttattatcttagagaaaaaataattataatcattatttttgaaattagtatcctcttaattctcaacataagttatgtttcaatttcttttttttgtaataaatgatggaaatgtttaacaatgtcttatctagcaactttcatgcttctcctcagaaatgaagccaaagtataaacttagatttaatgtgttgtatatttgaagagaatgaaactattaacatataattgttcagttggattatgtattttaaggattgcagttatcaaaataataaattgaatgttttatgtttaaccac

SEQ ID NO: 333023 - DNA, 672 bp, Homo sapiens
aatctgtttacctaatgaattccattgctatgattccacttggatcaattccgagtgcattgaagcttcagaaagggcaatattctgtttccccgagcttaaaaaccatgagtttattagatattttagggtacttgtttttaggtagagttgtgttttattaaccacagcaatttcgtaggacttctgtgctaatcccttcctcagtaaactacaggtttgggtttcttatctccaagatattctgattttctctctgttcattgtgttttagtgggtcaccagaagaaatggtcttgctgccaagacaggctcgactttttgcctgggcagatcctactggtaccagaaaacttacatggacatatgcagcaaatgttggggaacatgatctgttaaaggtatcttttgatgtgaatgagtgctatatgagttacctgacagtgaaggaagtagagaagctatcttcactgactccttgtcctaattgaactaaaagtgaattggaagtatttccagaataagtagcttttggactttagatggcaaatactgtagttcaaaccagtatattactttagctctatcaaagtaatttatttacaatttaaaaaatagacctgctttatcttgcctatgtaaagcacctttttaattaatttacctatttta

SEQ ID NO: 333024 - DNA, 433 bp, Homo sapiens
tccagatacactgggtatcatttctggatgggcgccagagagttttgcttttcaccgatgatgttgccttggtttccaaagcactgcaggcagaagaaatggaacaggctgattatgaaataaccttgtctctccacagtcttgggctttcactggttaacaatgaaagcaagcaggaagtttcctatattgggataaccaggtatgcaagaaggaaaataagacatcctaaacctttaaaaggcattaagttcataatagccgatttgaagaaagtaaaaagatacctggtttgactttggtatgctgtatatttattcagtaaagcttactgaataattctttgaactgttagttgaaaagccccgaggatagaaagatgactaagatattgtctttgtcttcacaatactcattgtcagttggtggggga

SEQ ID NO: 333025 - DNA, 379 bp, Homo sapiens
acttaaaaaaaatgaagcaggtttttttttagtgccagtttatattgtttactaagcaagtgctacctctgccatccagtagggtgaaatattggcaagaataaactgtcttcatcatttactgtaagtttttgttttcttttgcaaaataggcgagtgttgtgtataaaggaagttgaaatcctgggccttatgtgtgtagactggcaatgtccatttgaagattttgtatttcctcctagtgtcagtgaaaatgtgctaaaaatttcagttaaggtaagaaaacatgtcacacctttagagctaagagttcattgcttttagactgttttgcagttaactacacaaaatatttgaaggattagtgtcgttattacta

SEQ ID NO: 333026 - DNA, 1962 bp, Homo sapiens
  misc_feature (30)..(30): n is a, c, g, or t
  misc_feature (44)..(44): n is a, c, g, or t
aagagaagaggaaggcagcccatatctacnacacagcctctcgncactgctgctccttatatttcctggaaggaagaacttcataggagcagggaagtcagatgcatgttgcagtgtccatcagtagaagtcagcttcttacctctcatagtgaatacagttgctctgcctgatgaattgagctacatatgtacacatggggaagactgggatgtagcttacattattcatctttatccttctctcactttgcggaatcttctcccatattccctaagatatttacttgagggaacagcagaaactcatgagctggcagaaggcagtactgctgatgttctgcattcgagaatcagtggtgaaataatggaattagtcctggtgaaataccagggcaaaaactggaatggacatttccgcatacgtgatacactaccagaattctttcctgtgtgtttttcttctgactccacagaagtgacgacagtcgacctgtcagtccacgtcaggagaattggcagccggatggtgctgtctgtctttagtccctattggttaatcaacaagactacccgggttctccagtatcgttcagaagatattcatgtgaaacatccagctgatttcagggatattattttattttctttcaagaagaagaacatttttactaaaaataaggtacaattaaaaatttcaaccagtgcctggtccagtagtttctcattggatacagtgggaagttatgggtgtgtgaagtgtcctgccaacaatatggagtacctggttggtgttagcatcaaaatgagcagtttcaacctttcacgaatagttaccctgactcccttttgtaccattgcaaacaagtcatcattagaactagaagttggcgagattgcatctgatggctcaatgccaactaataaatggaactatattgcttcttcagagtgccttccattttggccagaaaatttgtcaggcaaactttgtgtgagagtggtgggctgtgaaggatcttccaaaccattcttttataaccgacaggataatggcactttattgagcttagaagatctgaatgggggtatcttggtggatgtaaacactgccgaacattcaactgtcataactttttctgattaccatgagggatctgcacctgccttgataatgaaccatacaccatgggacatcctcacatacaaacagagtgggtcaccagaagaaatggtcttgctgccaagacaggctcgactttttgcctgggcagatcctactggtaccagaaaacttacatggacatatgcagcaaatgttggggaacatgatctgttaaaggtatcttttgatgtgaatgagtgctatatgagttacctgacagtgaaggaagtagagaagctatcttcactgactccttgtcctaattgaactaaaagtgaattggaagtatttccagaataagtagcttttggactttagatggcaaatactgtagttcaaaccagtatattactttagctctatcaaagtaatttatttacaatttaaaaaatagacctgctttatcttgcctatgtaaagcacctttttaattaatttacctattttaaaaggaaggaattgtaagactaagttaaaaacaactttattttgaacatacctatgccacttttggctatgagtttttaaagcttgttttcctaagcacagctatgtattttgttaattaatgaagtctgatagtatgcaaattatcgcatgtaagaaatttagtgaaatatttatcgaaacaatatttaggtagctgagttgattaaatatgttattttttagactcttagcctctgaaagggcccaaagaattcatataccatcctcccatctgatataggaattgctcctgcattagtaatatatcatccagtttctgtatgaataaaatccatgatgaaagagttt

SEQ ID NO: 333027 - DNA, 4441 bp, Homo sapiens
  misc_feature (30)..(30): n is a, c, g, or t
  misc_feature (44)..(44): n is a, c, g, or t
aagagaagaggaaggcagcccatatctacnacacagcctctcgncactgctgctccttatatttcctggaaggaagaacttcataggagcagggaagtcagatgcatgttgcagtgtccatcagtagaagtcagcttcttacctctcatagtgaatacagttgctctgcctgatgaattgagctacatatgtacacatggggaagactgggatgtagcttacattattcatctttatccttctctcactttgcggaatcttctcccatattccctaagatatttacttgagggaacagcagaaactcatgagctggcagaaggcagtactgctgatgttctgcattcgagaatcagtggtgaaataatggaattagtcctggtgaaataccagggcaaaaactggaatggacatttccgcatacgtgatacactaccagaattctttcctgtgtgtttttcttctgactccacagaagtgacgacagtcgacctgtcagtccacgtcaggagaattggcagccggatggtgctgtctgtctttagtccctattggttaatcaacaagactacccgggttctccagtatcgttcagaagatattcatgtgaaacatccagctgatttcagggatattattttattttctttcaagaagaagaacatttttactaaaaataaggtacaattaaaaatttcaaccagtgcctggtccagtagtttctcattggatacagtgggaagttatgggtgtgtgaagtgtcctgccaacaatatggagtacctggttggtgttagcatcaaaatgagcagtttcaacctttcacgaatagttaccctgactcccttttgtaccattgcaaacaagtcatcattagaactagaagttggcgagattgcatctgatggctcaatgccaactaataaatggaactatattgcttcttcagagtgccttccattttggccagaaaatttgtcaggcaaactttgtgtgagagtggtgggctgtgaaggatcttccaaaccattcttttataaccgacaggataatggcactttattgagcttagaagatctgaatgggggtatcttggtggatgtaaacactgccgaacattcaactgtcataactttttctgattaccatgagggatctgcacctgccttgataatgaaccatacaccatgggacatcctcacatacaaacagagtgggtcaccagaagaaatggtcttgctgccaagacaggctcgactttttgcctgggcagatcctactggtaccagaaaacttacatggacatatgcagcaaatgttggggaacatgatctgttaaaggatggatgtggacagtttccatatgatgcaaacatccagatacactgggtatcatttctggatgggcgccagagagttttgcttttcaccgatgatgttgccttggtttccaaagcactgcaggcagaagaaatggaacaggctgattatgaaataaccttgtctctccacagtcttgggctttcactggttaacaatgaaagcaagcaggaagtttcctatattgggataaccagttctggtgttgtttgggaggtgaaaccaaagcagaaatggaagccatttagtcaaaagcagataatcttattggaacaatcctatcagaaacatcaaatatcaagagaccatggctggattaagctagataataattttgaggtcaattttgataaagatccaatggaaatgcgcctccctattcgtagccctattaaacgagactttttatcaggaattcagattgaatttaagcagtcttctcaccagagaagtttaagggccaggttgtactggcttcaggttgataatcagttaccaggtgcaatgttccctgttgtatttcatcctgttgcccctccaaaatctattgctttagattcagagcccaagcctttcattgatgtgagtgtcatcacaagatttaatgagtacagtaaagtcttacagttcaagtattttatggtcctcattcaggaaatggccttaaaaattgatcaagggtttctaggagctattattgcactgtttaccccaacaacagaccctgaagctgaaagaagacggacaaagttaatccaacaagatattgatgctctaaatgcagaattaatggagacttcaatgactgatatgtcaattcttagtttctttgaacatttccatatttctcctgtgaagttgcatttgagtttgtctttgggttccggaggtgaagaatcagacaaagaaaaacaggaaatgtttgcagttcattctgtcaacttgctgttgaaaagcataggtgctactctgactgatgtggatgaccttatattcaaacttgcttattatgaaattcgatatcagttctacaagagagatcagcttatatggagtgttgttaggcattacagtgaacagttcttgaaacagatgtatgtccttgtattggggttagatgtacttggaaacccatttggattaattagaggtctgtctgaaggagttgaagctttattctatgaacccttccagggtgctgttcaaggccctgaagaatttgcagaggggttagtgattggagtgagaagcctctttggacacacagtaggtggtgcagcaggagttgtatctcgaatcaccggttctgttgggaaaggtttggcagcaattacaatggacaaggaatatcagcaaaaaagaagagaagagttgagtcgacagcccagagattttggagacagcctggccagaggaggaaagggctttctgcgaggagttgttggtggagtgactggaataataacaaaacctgtggaaggtgccaaaaaggaaggagctgctggattctttaaaggaattggaaaagggcttgtgggtgctgtggcccgtccaactggtggaatcgtagatatggccagtagtaccttccaaggcattcagagggcagcagaatcaactgaggaagtatctagcctccgtccccctcgcctgatccatgaagatggcatcattcgtccttatgacagacaggaatctgagggctctgacttacttgagaatcatatcaaaaagttggaaggagagacttaccgataccactgtgctattcctggaagcaagaagacaatccttatggttacaaataggcgagtgttgtgtataaaggaagttgaaatcctgggccttatgtgtgtagactggcaatgtccatttgaagattttgtatttcctcctagtgtcagtgaaaatgtgctaaaaatttcagttaaggaacagggtctgttccacaaaaaagacagtgccaatcaaggctgtgttcgaaaagtttacctgaaggacaccgccacagcagagagagcatgtaatgccattgaggatgcacagtcaacgagacagcagcaaaaattgatgaagcagtcatcagtgagacttctcagaccccaattgccatcttaatcacagacctcaggggctccaacagggagaaaaaacaatcactggtcttgtctataagtcactctgctttatcttgctaaagacaatttttcaagcaatcctttagttttagttttctggaatagctagtattgggttttctagttttttcaccttttagtttttactctaattttgtaaccatgtatatgctagcagtccacttctacgccaccacccaaatgggtcagacccttgaagaaacgtcacttcaaactcagaatgaaattttcattaatattaaaattgtgaagcaaaggtcaataggcttatatttaattaaagccttactgaagaataagaaatgagcttagaatgactagtgttctttgaaaggtttttttatttttgtttttttggggttttttttgaaacagagcaagacactgtctctctctctctctccatatatatatgtgtgtggtgtgtatatatatatatatatggtggtggtggtggtggtggtggtgtatacatatatacagcatattatacacacacatcatgacatatacgatggtgtatatatataccatcccatatatagtggtgggatatatatatatatatatagggataatgggtatatatatggggatggtgtgagtggacccaggcaagtatatgaaaacataaaacgtccctgatgcataatgaccaaagagacatcgcgtgaacgtggcagcggcaacatatgcggaggggcaccgcagagtaaaacactcttacaaaggcaaggacacaaaagaagccactctgcatcgcagaaaaaagggtccccccagcggggagactagggtaactcaagacacgaattatacaaaccacgaatccaaaccaaggcaccaattcaaacgaaacactaccggaaaaatacaacacactgcataagaggtcatcaacc

SEQ ID NO: 333028 - DNA, 1020 bp, Homo sapiens
  misc_feature (30)..(30): n is a, c, g, or t
  misc_feature (44)..(44): n is a, c, g, or t
aagagaagaggaaggcagcccatatctacnacacagcctctcgncactgctgctccttatatttcctggaaggaagaacttcataggagcagggaagtcagatgcatgttgcagtgtccatcagtagaagtcagcttcttacctctcatagtgaatacagttgctctgcctgatgaattgagctacatatgtacacatggggaagactgggatgtagcttacattattcatctttatccttctctcactttgcggaatcttctcccatattccctaagatatttacttgagggaacagcagaaactcatgagctggcagaaggcagtactgctgatgttctgcattcgagaatcagtggtgaaataatggaattagtcctggtgaaataccagggcaaaaactggaatggacatttccgcatacgtgatacactaccagaattctttcctgtgtgtttttcttctgactccacagaagtgacgacagtcgacctgtcagtccacgtcaggagaattggcagccggatggtgctgtctgtctttagtccctattggttaatcaacaagactacccgggttctccagtatcgttcagaagatattcatgtgaaacatccagctgatttcagggatattattttattttctttcaagaagaagaacatttttactaaaaataaggtacaattaaaaatttcaaccagtgcctggtccagtagtttctcattggatacagtgggaagttatgggtgtgtgaagtgtcctgccaacaatatggagtacctggttggtgttagcatcaaaatgagcagtttcaacctttcacgaatagttaccctgactcccttttgtaccattgcaaacaagtcatcattagaactagaagttggcgagattgcatctgatggctcaatgccaactaataaatggaactatattgcttcttcagaggtagcatttttctttgttacaactgattcctaaaatatacaaataaatattgacatctaaataagaatt

SEQ ID NO: 333029 - DNA, 355 bp, Homo sapiens
cagtccattttctacacgaaagaaactcactatattaattactgcaatacattacattttacctttcttacaaaggtaaaagtaagttaggttgtatcttaatggacaaacatatcctgtagaagagagaaactttttcctctgtgctattttgtacttgtaatttaatgacgtgaaatatgtaaaatctcaacctgcccatccttgcattgtagctgagtactcacattccatggggtggtcttgtccttgactcttggaggggcaagttcaagcggctaccatgcacagaaggggaagatgatgaaaggagaactccgtctcctagggaagaatcagtcctactgcagttgag

SEQ ID NO: 333030 - DNA, 594 bp, Homo sapiens
aatcttcaaggcttcctaggcctcactggttaccctcccagtcccctttgctgtgctgtcctcagtcctaggatttttctcctctctcaactctctttcctatgtgagctcttccacccgcatgaattaaaatctccccaatgtttatctcctacccaaattagtcttctgagcagcagactgacacagccaactgcctacctaccatctccaccaggatatctcactaacaagtccattttaaatagcaaaattgaattcctgagagtctgcttccagtaaagctgactagctcactgcagaccaacatttctgccaagaacaacttaaaaaactgaacaaattattagaaacaactgtttgaaggcatcagagagctacccatgcagtgaggactctggaggccaggattccagagggaaaaggggagtgcagaaaagtgagcccaatcaccggggccccttttctccttgagggattcgccaattcacagcagaagctgggaagccaaaataccaaacagaaacaagtgactgagaatccaagaaggtcagcagaatagccaccagtcttaggggactggtggcacaaaaa

SEQ ID NO: 333031 - DNA, 358 bp, Homo sapiens
gagaggtcaaggtgggttgtataaatttacatttgatcattgagatcaaaaccaggagtactgatgagggtgtagttgagaagagaccctgggtctaagccggtggaatttcaaaggctcacgaatgggtattagaataagtagacccaagggactgagagtgagagggtggcaagggggtgcaagattcagaagactggggtattccggaagcagtggaagagtgtgtttaagaaggagatttgtcaggtccgggcgcagtggctcagacctgtaatcccagcactttgggaggccaaggcgggtgggtcacctcaggtcaggagttcgagaccagcctggccaacatggtgaaacc

SEQ ID NO: 333032 - DNA, 330 bp, Homo sapiens
tccaccaccaccaaaacctaaaagtaaacatctactgctaccagcaccaccaagagtcagacaagtcagaattcagctttcaagttgattaacaacctctgctaaattcacttagaacattcccaactattaaaaagtaaggttgcattgtggaaaatcaaagaaagtggttaatccagatttgctgatgtgttaggtagttgtggcacactcacctgtctttcctaaatgcctctaattatggctatgctattattgggtgattgcatttaatattatttgaggttttgcaagagatatgtgatgtcaaggaataagtaaagacagtgg

SEQ ID NO: 333033 - DNA, 292 bp, Homo sapiens
atcttaaacacgtactgaccacattcccaatctgggccatgacgttgatcaggtgtttatctcctgcttggatcaggcgttggcctcctaatcttttcagtccaaagagttttctttccaaagcacagatctgatcatgtctttccttagcctaaaatatttctgtggtcttcaataaccttgggtcaaagtctgaactccacagcaatttatacgaggcccttcctaagctgacctggctcacctcacctgctgcatttcttgctcctttcctcctcaaactctgaccagt

SEQ ID NO: 333034 - DNA, 197 bp, Homo sapiens
ataatactcagtattagagaaggtaattaataatgtgtgccacaagatgttcattgcagtgtccttccttcctccctcccttctttcctccctccctctttcccttctttgctctctctttcttttttctttatctttttttggtatatgtttgatattggtgaaaaactgaaaaatgaaaatgaccaacaaaaaga

SEQ ID NO: 333035 - DNA, 211 bp, Homo sapiens
gctgttgtgagaatcaaatgaaaacagatatggaaagacacttatagagtgtctggcacatagaaaggtgtcagtgagtgttattttatttccattattattattatcacctagatccaaattctttttttgtgtgtgtaactgggtaaactagaagacgtagttgggaatatcaaaggataacaaagattactgaagtagctgaggatca

SEQ ID NO: 333036 - DNA, 111 bp, Homo sapiens
agaacgaaaaccaaaacaccctatagtttaacacattttaataaattatttcaaaaacctgtttctaaatttccttccactaaaatattataagattattaaatgcagtcg

SEQ ID NO: 333037 - DNA, 169 bp, Homo sapiens
cttgtcttcccccaatccattgaccccagcttaaaatccgtcagcgactccccatcgcactctgggtgaagtccaaacctgtcacagcagccaagaaagttcgtctcttcactccacctccacgatctaagctccaaccacacaggattcagaggccttcttgtgcttg

SEQ ID NO: 333038 - DNA, 542 bp, Homo sapiens
cagccacaggtcatgattaggataaagtatattcacgcactaattaaatcagaacaactgtgcacagacatgcaacagattcaacctcaaagtctgcagaaggaccaaccccgtcaacaccttgatttccgacttgtgagaatacatttctgttttaagccagtttgtggtactttgttaccacagccctaggactgaggtacacatacatatattacacacccagatgtgcacacacacgtgtgagcacgcacacccaattaaggaatctgtctatacaagaggtttactctttgatggctttcatgaaatcacaagctctctatggagtaacccacttttgcactgttaattcactaattgaaaaacagtatttacatccttccctcatttgaactgcatctttaaaatcatctaaatctgtgagttggctctcttcactgtaacaataaaatatcaaccaaaatgcatcacacaattaagacagcagatgttaccctctgggatggagctaaaatgcatctgatgtatctgctgaaaag

SEQ ID NO: 333039 - DNA, 270 bp, Homo sapiens
tttgaatgagaatcaaatccactttccagataccatcaaaggttaaactttgtgaacacacattttcaagtatatgtagtctcaggactgctgttgtgagctttttctctgcacatgaattagtaggactctgttacaaaagatgctacacacccaatgtacagagagacattggggtacctaggaaacacatctttctctccggattcaccaaaaagagacattttcctattctttttttttttttttttccaagatggactctcactc

SEQ ID NO: 333040 - DNA, 205 bp, Homo sapiens
ttgttccttgcattcctgtatttttagatagtattatttttgtacagtagcatgctgtatatgaacacagaggtatataatcattagcatgctatagaactatgttactgtgaatccccccacagccttttaaacattatgaggtggtagttcactttttctcatcttcttatagacaactcatatgtgttaatacttctgtctc

SEQ ID NO: 333041 - DNA, 2683 bp, Homo sapiens
ggcgggggcgcgggcggggcggcggttccgagtcaggcgcgcgcgggcagggtccccattgcctgctgcgcacccggacgtgcggctcccctcggcctcctcgccatggacgcggacgactcccgggcccccaagggctccttgcggaagttcctggagcacctctccggggccggcaaggccatcggcgtgctgaccagcggcggggatgctcaaggtatgaacgctgccgtccgtgccgtggtgcgcatgggtatctacgtgggggccaaggtgtacttcatctacgagggctaccagggcatggtggacggaggctcaaacatcgcagaggccgactgggagagtgtctccagcatcctgcaagtgggcgggacgatcattggcagtgcgcggtgccaggccttccgcacgcgggaaggccgcctgaaggctgcttgcaacctgctgcagcgcggcatcaccaacctgtgtgtgatcggcggggacgggagcctcaccggggccaacctcttccggaaggagtggagtgggctgctggaggagctggccaggaacggccagatcgataaggaggccgtgcagaagtacgcctacctcaacgtggtgggcatggtgggctccatcgacaatgatttctgcggcaccgacatgaccatcggcacggactccgccctgcacaggatcatcgaggtcgtcgacgccatcatgaccacggcccagagccaccagaggaccttcgttctggaggtgatgggacgacactgtgggtacctggccctggtgagtgccttggcctgcggtgcggactgggtgttccttccagaatctccaccagaggaaggctgggaggagcagatgtgtgtcaaactctcggagaaccgtgcccggaaaaaaaggctgaatattattattgtggctgaaggagcaattgatacccaaaataaacccatcacctctgagaaaatcaaagagcttgtcgtcacgcagctgggctatgacacacgtgtgaccatcctcgggcacgtgcagagaggagggaccccttcggcattcgacaggatcttggccagccgcatgggagtggaggcagtcatcgccttgctagaggccaccccggacaccccagcttgcgtcgtgtcactgaacgggaaccacgccgtgcgcctgccgctgatggagtgcgtgcagatgactcaggatgtgcagaaggcgatggacgagaggagatttcaagatgcggttcgactccgagggaggagctttgcgggcaacctgaacacctacaagcgacttgccatcaagctgccggatgatcagatcccaaagaccaattgcaacgtagctgtcatcaacgtgggggcacccgcggctgggatgaacgcggccgtacgctcagctgtgcgcgtgggcattgccgacggccacaggatgctcgccatctatgatggctttgacggcttcgccaagggccagatcaaagaaatcggctggacagatgtcgggggctggaccggccaaggaggctccattcttgggacaaaacgcgttctcccggggaagtacttggaagagatcgccacacagatgcgcacgcacagcatcaacgcgctgctgatcatcggtggattcgaggcctacctgggactcctggagctgtcagccgcccgggagaagcacgaggagttctgtgtccccatggtcatggttcccgctactgtgtccaacaatgtgccgggttccgatttcagcatcggggcagacaccgccctgaacactatcaccgacacctgcgaccgcatcaagcagtccgccagcggaaccaagcggcgcgtgttcatcatcgagaccatgggcggctactgtggctacctggccaacatgggggggctcgcggccggagctgatgccgcatacattttcgaagagcccttcgacatcagggatctgcagtccaacgtggagcacctgacggagaaaatgaagaccaccatccagagaggccttgtgctcagaaatgagagctgcagtgaaaactacaccaccgacttcatttaccagctgtattcagaagagggcaaaggcgtgtttgactgcaggaagaacgtgctgggtcacatgcagcagggtggggcaccctctccatttgatagaaactttggaaccaaaatctctgccagagctatggagtggatcactgcaaaactcaaggaggcccggggcagaggaaaaaaatttaccaccgatgattccatttgtgtgctgggaataagcaaaagaaacgttatttttcaacctgtggcagagctgaagaagcaaacggattttgagcacaggattcccaaagaacagtggtggctcaagctacggcccctcatgaaaatcctggccaagtacaaggccagctatgacgtgtcggactcaggccagctggaacatgtgcagccctggagtgtctgacccagtcccgcctgcatgtgcctgcagccaccgtggactgtctgtttttgtaacacttaagttattttatcagcactttatgcacgtattattgacattaatacctaatcggcgagtgcccatctgccccaccagctccagtgcgtgctgtctgtggagtgtgtctcatgctttcagatgtgcatatgagcagaattaattaaacatttgcctatgactccaa

SEQ ID NO: 333042 - DNA, 402 bp, Homo sapiens
gaaaaaaaggctgatattattttgtggctaagaagcaaacggattttgagcacaggattcccaaagaacagtggtggctcaagctacggcccctcatgaaaatcctggccaagtacaaggccagctatgacgtgtcggactcaggccagctggaacatgtgcagccctggagtgtctgacccagtcccgcctgcatgtgcctgcagccaccgtggactgtctgtttttgtaacacttaagttattttatcagcactttatgcacgtattattgacattaatacctaatcggcgagtgcccatctgccccaccagctccagtgcgtgctgtctgtggagtgtgtctcatgctttcagatgtgcatatgagcagaattaattaaacatttgcctatgactccaa

SEQ ID NO: 333043 - DNA, 1086 bp, Homo sapiens
acttgtttccgtgggagagatccagccgtggctgtcgacagcagctgccgactgtgcccaatagagaaggtatctgggaaagagcccagcacggggccggggagtgtgagtgtgtcctggcacaggcaggcagaaggtgtccaacgtgcaactggagagcgcagaggtggctcaagtccccttcctcgcaggagtctggaaggctactgcatagcgtttgccttagtagaaaatggaccatttttgaagcctaggtccctgcaggcctcctggctaactcggctgtcaaagccccttttctctgctttctgagctgtttccaggactgagtgggtgctccctctgtttctctgctttctgagctgtgtccggggctccctctgtttctcttccagccaccagaggaccttcgttctggaggtgatgggacgacactgtgggtacctggccctggtgagtgccttggcctgcggtgcggactgggtgttccttccagaatctccaccagaggaaggctgggaggagcagatgtgtgtcaaactctcggagaaccgtgcccggaaaaaaaggctgaatattattattgtggctgaaggagcaattgatacccaaaataaacccatcacctctgagaaaatcaaagagcttgtcgtcacgcagctgggctatgacacacgtgtgaccatcctcgggcacgtgcagagaggagggaccccttcggcattcgacaggatcttggccagccgcatgggagtggaggcagtcatcgccttgctagaggccaccccggacaccccagcttgcgtcgtgtcactgaacgggaaccacgccgtgcgcctgccgctgatggagtgcgtgcagatgactcaggatgtgcagaaggcgatggacgagaggagatttcaagatgcggttcgactccgagggaggagctttgcgggcaacctgaacacctacaagcgacttgccatcaagctgccggatgatcagatcccaaagacccattggcaacgtagctgtcatcaacgtgggggtccggctgtctaatcaagcttatagataccttgacctcgaggggggcccggt

SEQ ID NO: 333044 - DNA, 1684 bp, Homo sapiens
aggtaactgcagggagagacaccgggataatttctgtgaagagaggacatggggtggctccgagagcccctgacagagggaactttgtggtcctagaaaccaggtggtgttttcctgaggaaatgacattttcctctggatcagagctgaggaaggtgcctctgtgtgtcccgtggccgctgtgacactgaccacacacctggggctggaaaataatactcactctcccacagctctggagcgcaggagccatgggctgaggccagaatgtttgctccaggagcgtccctcgtggcccgttcaggtgcccagagttgcgggccttgcacgccttgtacgccttgttccctggcgcctcctccttccatgtgggtgtgcagcatcccgctccagggccttcagcctctgcgcccctcatctgctgatgcaggtgatggcatttaaggcccacctgggtactcctaggattcacctttatcaccgcatgagggagcattcccaggttccagggattagggataggactgggattcctttgggggctgctctcccgcccaccactgtgccggaatgtgatgcacacagcggccagcatatccaaaggccccaggaggacctggggtggctggaacaggacctggtgccgggagcaggcggggccggggattcccgacaaaggcttgatgtgtacttgaagtgagcaaagggttttgaataaaccaagaactggatcagatttatgttttttatagatggggtcctttctgtgtgaacggattggagggtcccggggtgggagctgaggcccaggaagagggcgttgcagccggactgatgtatgggtgggaaggcggccgatgcatttctttgccatttttctccccgccgagcttgggtcctcatggagggcggatggcagacatttcactctgggatccgatgcctgtgcatctggaagacttccccaggtgcctgggtctaagaaccaccatctgcctttgagtagagtttccataaatgtaacattcgccaatggatggaagatggccgcacctctaaaatcacagggagcttttcagaagaaaatagaatagcacagcggttctcacggactaagctggcaggggacagtcccctaacatctcagctaacacctaacggtgtctgtgtccggtgaaagcggcttcagcagggacagtcacagagcagcgtggagtgagctggcttgtggggtcgtcttttccgtccccttctatggggcctgggagaagggagcggcagatggccaggcccccaaaacgggacatcgaggtcacctccaggtggctgccatggtggggttgcgggggaccacgttcacacccactccgagggcacatcccggctgctgcacacccttcacctctgcgggatgctgggaccgcatgtttgggcgcggtgggggggccctggagtgtctgacccagtcccgcctgcatgtgcctgcagccaccgtggactgtctgtttttgtaacacttaagttattttatcagcactttatgcacgtattattgacattaatacctaatcggcgagtgcccatctgccccaccagctccagtgcgtgctgtctgtggagtgtgtctcatgctttcagatgtgcatatgagcagaattaattaaacatttgcctatgactccaa

SEQ ID NO: 333045 - DNA, 1081 bp, Homo sapiens
ggcgggggcgcgggcggggcggcggttccgagtcaggcgcgcgcgggcagggtccccattgcctgctgcgcacccggacgtgcggctcccctcggcctcctcgccatggacgcggacgactcccgggcccccaagggctccttgcggaagttcctggagcacctctccggggccggcaaggccatcggcgtgctgaccagcggcggggatgctcaaggagtggagtgggctgctggaggagctggccaggaacggccagatcgataaggaggccgtgcagaagtacgcctacctcaacgtggtgggcatggtgggctccatcgacaatgatttctgcggcaccgacatgaccatcggcacggactccgccctgcacaggatcatcgaggtcgtcgacgccatcatgaccacggcccagagccaccagaggaccttcgttctggaggtgatgggacgacactgtgggccagccgcatgggagtggaggcagtcatcgccttgctagaggccaccccggacaccccagcttgcgtcgtgtcactgaacgggaaccacgccgtgcgcctgccgctgatggagtgcgtgcagatgactcaggatgtgcagaaggcgatggacgagaggagatttcaagatgcggttcgactccgagggaggagctttgcgggcaacctgaacacctacaagcgacttgccatcaagctgccggatgatcagatcccaaagaccaattgcaacgtagctgtcatcaacgtgggggcacccgcggctgggatgaacgcggccgtacgctcagctgtgcgcgtgggcattgccgacggccacaggatgctcgccatctatgatggctttgacggcttcgccaagggccagatcaaagaaatcggctggacagatgtcgggggctgaccggcaaggcgtccatctgggaaaacggggtcccgggagacttggaggaatcgtcaaagtgtgcgcggacacccgggcgggtactggggaacgcccggggccttgatgcacggaaaaaagttccccggtctccatggccacagtctcaggtaacgcaaaaggtaaaaccaag

SEQ ID NO: 333046 - DNA, 851 bp, Homo sapiens
tcaaaaccacctctacatatagaatgatctcctacatggttagaaggctggttattttgacacagctcaaaacaatttcgaataagttgaaatgacttcagagcctgtggcatgttcttagatgtgatcgaatgactcaacgtaaaaaattctgtccgacgatggatccgatacagccaacgaggagctctaaggttcatcttggctaccagggcatggtggacggaggctcaaacatcgcagaggccgactgggagagtgtctccagcatcctgcaagtgggcgggacgatcattggcagtgcgcggtgccaggccttccgcacgcgggaaggccgcctgaaggctgcttgcaacctgctgcagcgcggcatcaccaacctgtgtgtgatcggcggggacgggagcctcaccggggccaacctcttccggaaggagtggagtgggctgctggaggagctggccaggaacggccagatcgataaggaggccgtgcagaagtacgcctacctcaacgtggtgggcatggtgggctccatcgacaatgatttctgcggcaccgacatgaccatcggcacggactccgccctgcacaggatcatcgaggtcgtcgacgccatcatgaccacggcccagagcacaagaggaccttcgctctggaggtgatgggacgaacactgtggggtatcctgggcctggtgaggggcgtggccggggtggggctggctgtcttccaagaatcttcacacagaaggaaggggggaagaccacgggtgtcaacccagaagaaccggcccggaaaacagggaacataaaagggcgcgcgggcacggaccaatagccacgcggaac

SEQ ID NO: 333047 - DNA, 391 bp, Homo sapiens
ggtcgactactactactaaattcgcggccgcgtcgacgtgcagatgactcaggatgtgcagaaggcgatggacgagaggagatttcaagatgcggttcgactccgagggaggagctttgcgggcaacctgaacacctacaagcgacttgccatcaagctgccggatgatcagatcccaaagaccaattgcaacgtagctgtcatcaacgtgggggcacccgcggctgggatgaacgcggccgtacgctcagctgtgcgcgtgggcattgccgacggccacaggatgctcgccatctatgatggctttgacggcttcgccaagggccagatcaaagaaatcggctggacagatgtcgggggcagggactgcttcagtttgtcgacgcggccg

SEQ ID NO: 333048 - DNA, 617 bp, Homo sapiens
gggaaaagacctcctagcaaataacagtgctggaaaactggtaaccctatacaaaagaacctggactacctctcaccatgtataaacgtagcctccaacgtggagcacctgacggagaaaatgaagaccaccatccagagaggccttgtgctcagaaatgagagctgcagtgaaaactacaccaccgacttcatttaccagctgtattcagaagagggcaaaggcgtgtttgactgcaggaagaacgtgctgggtcacatgcagcaggtgggtacgtcactacccacctggcccctgtgatccctgacaggtcaaccttgctggtgaaggcttcctcaatgcccagctggagaagtatgtcgttcaggttatagtccctcgagatagcaaactttggcaggtagagctcacctatctctctgaactccagagagtctctccaccgcttcagggtctctgggagcagcatggcttccacttcctccatcttgtcttgatcagggaggatgaagagtgccctggcgttgcctgtgtacattcagctccaccacgatgcaggacagctcctcgtcccggaagaaggtataatcagttgcgctactccggatcctctagaa

SEQ ID NO: 333049 - DNA, 2799 bp, Homo sapiens
ggcgggggcgcgggcggggcggcggttccgagtcaggcgcgcgcgggcagggtccccattgcctgctgcgcacccggacgtgcggctcccctcggcctcctcgccatggacgcggacgactcccgggcccccaagggctccttgcggaagttcctggagcacctctccggggccggcaaggccatcggcgtgctgaccagcggcggggatgctcaaggtatgaacgctgccgtccgtgccgtggtgcgcatgggtatctacgtgggggccaaggtgtacttcatctacgagggctaccagggcatggtggacggaggctcaaacatcgcagaggccgactgggagagtgtctccagcatcctgcaagtgggcgggacgatcattggcagtgcgcggtgccaggccttccgcacgcgggaaggccgcctgaaggctgcttgcaacctgctgcagcgcggcatcaccaacctgtgtgtgatcggcggggacgggagcctcaccggggccaacctcttccggaaggagtggagtgggctgctggaggagctggccaggaacggccagatcgataaggaggccgtgcagaagtacgcctacctcaacgtggtgggcatggtgggctccatcgacaatgatttctgcggcaccgacatgaccatcggcacggactccgccctgcacaggatcatcgaggtcgtcgacgccatcatgaccacggcccagagccaccagaggaccttcgttctggaggtgatgggacgacactgtgggtacctggccctggtgagtgccttggcctgcggtgcggactgggtgttccttccagaatctccaccagaggaaggctgggaggagcagatgtgtgtcaaactctcggagaaccgtgcccggaaaaaaaggctgaatattattattgtggctgaaggagcaattgatacccaaaataaacccatcacctctgagaaaatcaaagagcttgtcgtcacgcagctgggctatgacacacgtgtgaccatcctcgggcacgtgcagagaggagggaccccttcggcattcgacaggatcttggccagccgcatgggagtggaggcagtcatcgccttgctagaggccaccccggacaccccagcttgcgtcgtgtcactgaacgggaaccacgccgtgcgcctgccgctgatggagtgcgtgcagatgactcaggatgtgcagaaggcgatggacgagaggagatttcaagatgcggttcgactccgagggaggagctttgcgggcaacctgaacacctacaagcgacttgccatcaagctgccggatgatcagatcccaaagaccaattgcaacgtagctgtcatcaacgtgggggcacccgcggctgggatgaacgcggccgtacgctcagctgtgcgcgtgggcattgccgacggccacaggatgctcgccatctatgatggctttgacggcttcgccaagggccagatcaaagaaatcggctggacagatgtcgggggctggaccggccaaggaggctccattcttgggacaaaacgcgttctcccggggaagtacttggaagagatcgccacacagatgcgcacgcacagcatcaacgcgctgctgatcatcggtggattcgaggcctacctgggactcctggagctgtcagccgcccgggagaagcacgaggagttctgtgtccccatggtcatggttcccgctactgtgtccaacaatgtgccgggttccgatttcagcatcggggcagacaccgccctgaacactatcaccgacacctgcgaccgcatcaagcagtccgccagcggaaccaagcggcgcgtgttcatcatcgagaccatgggcggctactgtggctacctggccaacatgggggggctcgcggccggagctgatgccgcatacattttcgaagagcccttcgacatcagggatctgcagtccaacgtggagcacctgacggagaaaatgaagaccaccatccagagaggccttgtgctcagaaatgagagctgcagtgaaaactacaccaccgacttcatttaccagctgtattcagaagagggcaaaggcgtgtttgactgcaggaagaacgtgctgggtcacatgcagcagggtggggcaccctctccatttgatagaaactttggaaccaaaatctctgccagagctatggagtggatcactgcaaaactcaaggaggcccggggcagaggaaaaaaatttaccaccgatgattccatttgtgtgctgggaataagcaaaagaaacgttatttttcaacctgtggcagagctgaagaagcaaacggattttgagcacaggattcccaaagaacagtggtggctcaagctacggcccctcatgaaaatcctggccaagtacaaggccagctatgacgtgtcggactcaggccagctggaacatgtgcagccctggagtgtctgacccagtcccgcctgcatgtgcctgcagccaccgtggactgtctgtttttgtaacacttaagttattttatcagcactttatgcacgtattattgacattaatacctaatcggcgagtgcccatctgccccaccagctccagtgcgtgctgtctgtggagtgtgtctcatgctttcagatgtgcatatgagcagaattaattaaacatttgcctatgactccaaaaaaaacaaaaaatcggggttatttccggggcggaaaaaggtagacactgggcacggcaacggtcgtggccatttctgcaagggcaaaaggggccaaaggagggaaataagcggag

SEQ ID NO: 333050 - DNA, 2832 bp, Homo sapiens
  misc_feature (2716)..(2716): n is a, c, g, or t
  misc_feature (2735)..(2735): n is a, c, g, or t
  misc_feature (2761)..(2761): n is a, c, g, or t
  misc_feature (2795)..(2795): n is a, c, g, or t
  misc_feature (2801)..(2801): n is a, c, g, or t
ggcgggggcgcgggcggggcggcggttccgagtcaggcgcgcgcgggcagggtccccattgcctgctgcgcacccggacgtgcggctcccctcggcctcctcgccatggacgcggacgactcccgggcccccaagggctccttgcggaagttcctggagcacctctccggggccggcaaggccatcggcgtgctgaccagcggcggggatgctcaaggtatgaacgctgccgtccgtgccgtggtgcgcatgggtatctacgtgggggccaaggtgtacttcatctacgagggctaccagggcatggtggacggaggctcaaacatcgcagaggccgactgggagagtgtctccagcatcctgcaagtgggcgggacgatcattggcagtgcgcggtgccaggccttccgcacgcgggaaggccgcctgaaggctgcttgcaacctgctgcagcgcggcatcaccaacctgtgtgtgatcggcggggacgggagcctcaccggggccaacctcttccggaaggagtggagtgggctgctggaggagctggccaggaacggccagatcgataaggaggccgtgcagaagtacgcctacctcaacgtggtgggcatggtgggctccatcgacaatgatttctgcggcaccgacatgaccatcggcacggactccgccctgcacaggatcatcgaggtcgtcgacgccatcatgaccacggcccagagccaccagaggaccttcgttctggaggtgatgggacgacactgtgggtacctggccctggtgagtgccttggcctgcggtgcggactgggtgttccttccagaatctccaccagaggaaggctgggaggagcagatgtgtgtcaaactctcggagaaccgtgcccggaaaaaaaggctgaatattattattgtggctgaaggagcaattgatacccaaaataaacccatcacctctgagaaaatcaaagagcttgtcgtcacgcagctgggctatgacacacgtgtgaccatcctcgggcacgtgcagagaggagggaccccttcggcattcgacaggatcttggccagccgcatgggagtggaggcagtcatcgccttgctagaggccaccccggacaccccagcttgcgtcgtgtcactgaacgggaaccacgccgtgcgcctgccgctgatggagtgcgtgcagatgactcaggatgtgcagaaggcgatggacgagaggagatttcaagatgcggttcgactccgagggaggagctttgcgggcaacctgaacacctacaagcgacttgccatcaagctgccggatgatcagatcccaaagaccaattgcaacgtagctgtcatcaacgtgggggcacccgcggctgggatgaacgcggccgtacgctcagctgtgcgcgtgggcattgccgacggccacaggatgctcgccatctatgatggctttgacggcttcgccaagggccagatcaaagaaatcggctggacagatgtcgggggctggaccggccaaggaggctccattcttgggacaaaacgcgttctcccggggaagtacttggaagagatcgccacacagatgcgcacgcacagcatcaacgcgctgctgatcatcggtggattcgaggcctacctgggactcctggagctgtcagccgcccgggagaagcacgaggagttctgtgtccccatggtcatggttcccgctactgtgtccaacaatgtgccgggttccgatttcagcatcggggcagacaccgccctgaacactatcaccgacacctgcgaccgcatcaagcagtccgccagcggaaccaagcggcgcgtgttcatcatcgagaccatgggcggctactgtggctacctggccaacatgggggggctcgcggccggagctgatgccgcatacattttcgaagagcccttcgacatcagggatctgcagtccaacgtggagcacctgacggagaaaatgaagaccaccatccagagaggccttgtgctcagaaatgagagctgcagtgaaaactacaccaccgacttcatttaccagctgtattcagaagagggcaaaggcgtgtttgactgcaggaagaacgtgctgggtcacatgcagcagggtggggcaccctctccatttgatagaaactttggaaccaaaatctctgccagagctatggagtggatcactgcaaaactcaaggaggcccggggcagaggaaaaaaatttaccaccgatgattccatttgtgtgctgggaataagcaaaagaaacgttatttttcaacctgtggcagagctgaagaagcaaacggattttgagcacaggattcccaaagaacagtggtggctcaagctacggcccctcatgaaaatcctggccaagtacaaggccagctatgacgtgtcggactcaggccagctggaacatgtgcagccctggagtgtctgacccagtcccgcctgcatgtgcctgcagccaccgtggactgtctgtttttgtaacacttaagttattttatcagcactttatgcacgtattattgacattaatacctaatcggcgagtgcccatctgccccaccagctccagtgcgtgctgtctgtggagtgtgtctcatgctttcagatgtgcatatgagcagaattaattaaacatttgcctatgactccaaaaaaaaaaaaaaaaaaaaaaaaaaaaaaaaaanccacattaacaacataaanccctcattcacacgggaaacaccctnatgttcatacacctttcccccattctcctccttntccctnaaccccgacataattaccgggttttcctttt

SEQ ID NO: 333051 - DNA, 2675 bp, Homo sapiens
ggcgggggcgcgggcggggcggcggttccgagtcaggcgcgcgcgggcagggtccccattgcctgctgcgcacccggacgtgcggctcccctcggcctcctcgccatggacgcggacgactcccgggcccccaagggctccttgcggaagttcctggagcacctctccggggccggcaaggccatcggcgtgctgaccagcggcggggatgctcaaggtatgaacgctgccgtccgtgccgtggtgcgcatgggtatctacgtgggggccaaggtgtacttcatctacgagggctaccagggcatggtggacggaggctcaaacatcgcagaggccgactgggagagtgtctccagcatcctgcaagtgggcgggacgatcattggcagtgcgcggtgccaggccttccgcacgcgggaaggccgcctgaaggctgcttgcaacctgctgcagcgcggcatcaccaacctgtgtgtgatcggcggggacgggagcctcaccggggccaacctcttccggaaggagtggagtgggctgctggaggagctggccaggaacggccagatcgataaggaggccgtgcagaagtacgcctacctcaacgtggtgggcatggtgggctccatcgacaatgatttctgcggcaccgacatgaccatcggcacggactccgccctgcacaggatcatcgaggtcgtcgacgccatcatgaccacggcccagagccaccagaggaccttcgttctggaggtgatgggacgacactgtgggtacctggccctggtgagtgccttggcctgcggtgcggactgggtgttccttccagaatctccaccagaggaaggctgggaggagcagatgtgtgtcaaactctcggagaaccgtgcccggaaaaaaaggctgaatattattattgtggctgaaggagcaattgatacccaaaataaacccatcacctctgagaaaatcaaagagcttgtcgtcacgcagctgggctatgacacacgtgtgaccatcctcgggcacgtgcagagaggagggaccccttcggcattcgacaggatcttggccagccgcatgggagtggaggcagtcatcgccttgctagaggccaccccggacaccccagcttgcgtcgtgtcactgaacgggaaccacgccgtgcgcctgccgctgatggagtgcgtgcagatgactcaggatgtgcagaaggcgatggacgagaggagatttcaagatgcggttcgactccgagggaggagctttgcgggcaacctgaacacctacaagcgacttgccatcaagctgccggatgatcagatcccaaagaccaattgcaacgtagctgtcatcaacgtgggggcacccgcggctgggatgaacgcggccgtacgctcagctgtgcgcgtgggcattgccgacggccacaggatgctcgccatctatgatggctttgacggcttcgccaagggccagatcaaagaaatcggctggacagatgtcgggggctggaccggccaaggaggctccattcttgggacaaaacgcgttctcccggggaagtacttggaagagatcgccacacagatgcgcacgcacagcatcaacgcgctgctgatcatcggtggattcgaggcttacaagagtgcgtgcgacatggccgaggcacgaggccgccaccaggagctttgcatccccctgtgtgtggtgccggccacgattagcaacaatgtcccaggcacagaaataagcctgggctccgacactggcctgaatgctgacctgcgaccgcatcaagcagtccgccagcggaaccaagcggcgcgtgttcatcatcgagaccatgggcggctactgtggctacctggccaacatgggggggctcgcggccggagctgatgccgcatacattttcgaagagcccttcgacatcagggatctgcagtccaacgtggagcacctgacggagaaaatgaagaccaccatccagagaggccttgtgctcagaaatgagagctgcagtgaaaactacaccaccgacttcatttaccagctgtattcagaagagggcaaaggcgtgtttgactgcaggaagaacgtgctgggtcacatgcagcagggtggggcaccctctccatttgatagaaactttggaaccaaaatctctgccagagctatggagtggatcactgcaaaactcaaggaggcccggggcagaggaaaaaaatttaccaccgatgattccatttgtgtgctgggaataagcaaaagaaacgttatttttcaacctgtggcagagctgaagaagcaaacggattttgagcacaggattcccaaagaacagtggtggctcaagctacggcccctcatgaaaatcctggccaagtacaaggccagctatgacgtgtcggactcaggccagctggaacatgtgcagccctggagtgtctgacccagtcccgcctgcatgtgcctgcagccaccgtggactgtctgtttttgtaacacttaagttattttatcagcactttatgcacgtattattgacattaatacctaatcggcgagtgcccatctgccccaccagctccagtgcgtgctgtctgtggagtgtgtctcatgctttcagatgtgcatatgagcagaattaattaaacatttgcctatgactccaa

SEQ ID NO: 333052 - DNA, 2623 bp, Homo sapiens
attccagtaaaaggaccccagcatcaacgttcttcctgcagggctgggttctcagagaaagaaaacgtgatgcagcagaggatgggattgaagaaacaggagagtgaagtggaaatagcctggcccgcgtgacttaaaccggcccggagatgtgcgggtatgaacgctgccgtccgtgccgtggtgcgcatgggtatctacgtgggggccaaggtgtacttcatctacgagggctaccagggcatggtggacggaggctcaaacatcgcagaggccgactgggagagtgtctccagcatcctgcaagtgggcgggacgatcattggcagtgcgcggtgccaggccttccgcacgcgggaaggccgcctgaaggctgcttgcaacctgctgcagcgcggcatcaccaacctgtgtgtgatcggcggggacgggagcctcaccggggccaacctcttccggaaggagtggagtgggctgctggaggagctggccaggaacggccagatcgataaggaggccgtgcagaagtacgcctacctcaacgtggtgggcatggtgggctccatcgacaatgatttctgcggcaccgacatgaccatcggcacggactccgccctgcacaggatcatcgaggtcgtcgacgccatcatgaccacggcccagagccaccagaggaccttcgttctggaggtgatgggacgacactgtgggtacctggccctggtgagtgccttggcctgcggtgcggactgggtgttccttccagaatctccaccagaggaaggctgggaggagcagatgtgtgtcaaactctcggagaaccgtgcccggaaaaaaaggctgaatattattattgtggctgaaggagcaattgatacccaaaataaacccatcacctctgagaaaatcaaagagcttgtcgtcacgcagctgggctatgacacacgtgtgaccatcctcgggcacgtgcagagaggagggaccccttcggcattcgacaggatcttggccagccgcatgggagtggaggcagtcatcgccttgctagaggccaccccggacaccccagcttgcgtcgtgtcactgaacgggaaccacgccgtgcgcctgccgctgatggagtgcgtgcagatgactcaggatgtgcagaaggcgatggacgagaggagatttcaagatgcggttcgactccgagggaggagctttgcgggcaacctgaacacctacaagcgacttgccatcaagctgccggatgatcagatcccaaagaccaattgcaacgtagctgtcatcaacgtgggggcacccgcggctgggatgaacgcggccgtacgctcagctgtgcgcgtgggcattgccgacggccacaggatgctcgccatctatgatggctttgacggcttcgccaagggccagatcaaagaaatcggctggacagatgtcgggggctggaccggccaaggaggctccattcttgggacaaaacgcgttctcccggggaagtacttggaagagatcgccacacagatgcgcacgcacagcatcaacgcgctgctgatcatcggtggattcgaggcctacctgggactcctggagctgtcagccgcccgggagaagcacgaggagttctgtgtccccatggtcatggttcccgctactgtgtccaacaatgtgccgggttccgatttcagcatcggggcagacaccgccctgaacactatcaccgacacctgcgaccgcatcaagcagtccgccagcggaaccaagcggcgcgtgttcatcatcgagaccatgggcggctactgtggctacctggccaacatgggggggctcgcggccggagctgatgccgcatacattttcgaagagcccttcgacatcagggatctgcagtccaacgtggagcacctgacggagaaaatgaagaccaccatccagagaggccttgtgctcagaaatgagagctgcagtgaaaactacaccaccgacttcatttaccagctgtattcagaagagggcaaaggcgtgtttgactgcaggaagaacgtgctgggtcacatgcagcagggtggggcaccctctccatttgatagaaactttggaaccaaaatctctgccagagctatggagtggatcactgcaaaactcaaggaggcccggggcagaggaaaaaaatttaccaccgatgattccatttgtgtgctgggaataagcaaaagaaacgttatttttcaacctgtggcagagctgaagaagcaaacggattttgagcacaggattcccaaagaacagtggtggctcaagctacggcccctcatgaaaatcctggccaagtacaaggccagctatgacgtgtcggactcaggccagctggaacatgtgcagccctggagtgtctgacccagtcccgcctgcatgtgcctgcagccaccgtggactgtctgtttttgtaacacttaagttattttatcagcactttatgcacgtattattgacattaatacctaatcggcgagtgcccatctgccccaccagctccagtgcgtgctgtctgtggagtgtgtctcatgctttcagatgtgcatatgagcagaattaattaaacatttgcctatgactccaa

SEQ ID NO: 333053 - DNA, 2476 bp, Homo sapiens
cggccagttaaactactaaaacgtgtaccttaaaggtaagccgaaggagcccttgggattgtgccgtgacaatgggttgggactggctaccagggcatggtggacggaggctcaaacatcgcagaggccgactgggagagtgtctccagcatcctgcaagtgggcgggacgatcattggcagtgcgcggtgccaggccttccgcacgcgggaaggccgcctgaaggctgcttgcaacctgctgcagcgcggcatcaccaacctgtgtgtgatcggcggggacgggagcctcaccggggccaacctcttccggaaggagtggagtgggctgctggaggagctggccaggaacggccagatcgataaggaggccgtgcagaagtacgcctacctcaacgtggtgggcatggtgggctccatcgacaatgatttctgcggcaccgacatgaccatcggcacggactccgccctgcacaggatcatcgaggtcgtcgacgccatcatgaccacggcccagagccaccagaggaccttcgttctggaggtgatgggacgacactgtgggtacctggccctggtgagtgccttggcctgcggtgcggactgggtgttccttccagaatctccaccagaggaaggctgggaggagcagatgtgtgtcaaactctcggagaaccgtgcccggaaaaaaaggctgaatattattattgtggctgaaggagcaattgatacccaaaataaacccatcacctctgagaaaatcaaagagcttgtcgtcacgcagctgggctatgacacacgtgtgaccatcctcgggcacgtgcagagaggagggaccccttcggcattcgacaggatcttggccagccgcatgggagtggaggcagtcatcgccttgctagaggccaccccggacaccccagcttgcgtcgtgtcactgaacgggaaccacgccgtgcgcctgccgctgatggagtgcgtgcagatgactcaggatgtgcagaaggcgatggacgagaggagatttcaagatgcggttcgactccgagggaggagctttgcgggcaacctgaacacctacaagcgacttgccatcaagctgccggatgatcagatcccaaagaccaattgcaacgtagctgtcatcaacgtgggggcacccgcggctgggatgaacgcggccgtacgctcagctgtgcgcgtgggcattgccgacggccacaggatgctcgccatctatgatggctttgacggcttcgccaagggccagatcaaagaaatcggctggacagatgtcgggggctggaccggccaaggaggctccattcttgggacaaaacgcgttctcccggggaagtacttggaagagatcgccacacagatgcgcacgcacagcatcaacgcgctgctgatcatcggtggattcgaggcctacctgggactcctggagctgtcagccgcccgggagaagcacgaggagttctgtgtccccatggtcatggttcccgctactgtgtccaacaatgtgccgggttccgatttcagcatcggggcagacaccgccctgaacactatcaccgacacctgcgaccgcatcaagcagtccgccagcggaaccaagcggcgcgtgttcatcatcgagaccatgggcggctactgtggctacctggccaacatgggggggctcgcggccggagctgatgccgcatacattttcgaagagcccttcgacatcagggatctgcagtccaacgtggagcacctgacggagaaaatgaagaccaccatccagagaggccttgtgctcagaaatgagagctgcagtgaaaactacaccaccgacttcatttaccagctgtattcagaagagggcaaaggcgtgtttgactgcaggaagaacgtgctgggtcacatgcagcagggtggggcaccctctccatttgatagaaactttggaaccaaaatctctgccagagctatggagtggatcactgcaaaactcaaggaggcccggggcagaggaaaaaaatttaccaccgatgattccatttgtgtgctgggaataagcaaaagaaacgttatttttcaacctgtggcagagctgaagaagcaaacggattttgagcacaggattcccaaagaacagtggtggctcaagctacggcccctcatgaaaatcctggccaagtacaaggccagctatgacgtgtcggactcaggccagctggaacatgtgcagccctggagtgtctgacccagtcccgcctgcatgtgcctgcagccaccgtggactgtctgtttttgtaacacttaagttattttatcagcactttatgcacgtattattgacattaatacctaatcggcgagtgcccatctgccccaccagctccagtgcgtgctgtctgtggagtgtgtctcatgctttcagatgtgcatatgagcagaattaattaaacatttgcctatgactccaa

SEQ ID NO: 333054 - DNA, 2590 bp, Homo sapiens
ggcgggggcgcgggcggggcggcggttccgagtcaggcgcgcgcgggcagggtccccattgcctgctgcgcacccggacgtgcggctcccctcggcctcctcgccatggacgcggacgactcccgggcccccaagggctccttgcggaagttcctggagcacctctccggggccggcaaggccatcggcgtgctgaccagcggcggggatgctcaaggtatgaacgctgccgtccgtgccgtggtgcgcatgggtatctacgtgggggccaaggtgtacttcatctacgagggctaccagggcatggtggacggaggctcaaacatcgcagaggccgactgggagagtgtctccagcatcctgcaagtgggcgggacgatcattggcagtgcgcggtgccaggccttccgcacgcgggaaggccgcctgaaggctgcttgcaacctgctgcagcgcggcatcaccaacctgtgtgtgatcggcggggacgggagcctcaccggggccaacctcttccggaaggagtggagtgggctgctggaggagctggccaggaacggccagatcgataaggaggccgtgcagaagtacgcctacctcaacgtggtgggcatggtgggctccatcgacaatgatttctgcggcaccgacatgaccatcggcacggactccgccctgcacaggatcatcgaggtcgtcgacgccatcatgaccacggcccagagccaccagaggaccttcgttctggaggtgatgggacgacactgtgggtacctggccctggtgagtgccttggcctgcggtgcggactgggtgttccttccagaatctccaccagaggaaggctgggaggagcagatgtgtgtcaaactctcggagaaccgtgcccggaaaaaaaggctgaatattattattgtggctgaaggagcaattgatacccaaaataaacccatcacctctgagaaaatcaaagagcttgtcgtcacgcagctgggctatgacacacgtgtgaccatcctcgggcacgtgcagagaggagggaccccttcggcattcgacaggatcttggccagccgcatgggagtggaggcagtcatcgccttgctagaggccaccccggacaccccagcttgcgtcgtgtcactgaacgggaaccacgccgtgcgcctgccgctgatggagtgcgtgcagatgactcaggatgtgcagaaggcgatggacgagaggagatttcaagatgcggttcgactccgagggaggagctttgcgggcaacctgaacacctacaagcgacttgccatcaagctgccggatgatcagatcccaaagaccaattgcaacgtagctgtcatcaacgtgggggcacccgcggctgggatgaacgcggccgtacgctcagctgtgcgcgtgggcattgccgacggccacaggatgctcgccatctatgatggctttgacggcttcgccaagggccagatcaaagaaatcggctggacagatgtcgggggctggaccggccaaggaggctccattcttgggacaaaacgcgttctcccggggaagtacttggaagagatcgccacacagatgcgcacgcacagcatcaacgcgctgctgatcatcggtggattcgaggcctacctgggactcctggagctgtcagccgcccgggagaagcacgaggagttctgtgtccccatggtcatggttcccgctactgtgtccaacaatgtgccgggttccgatttcagcatcggggcagacaccgccctgaacactatcaccgacacctgcgaccgcatcaagcagtccgccagcggaaccaagcggcgcgtgttcatcatcgagaccatgggcggctactgtggctacctggccaacatgggggggctcgcggccggagctgatgccgcatacattttcgaagagcccttcgacatcagggatctgcagtccaacgtggagcacctgacggagaaaatgaagaccaccatccagagaggccttgtgctcagaaatgagagctgcagtgaaaactacaccaccgacttcatttaccagctgtattcagaagagggcaaaggcgtgtttgactgcaggaagaacgtgctgggtcacatgcagcagggtggggcaccctctccatttgatagaaactttggaaccaaaatctctgccagagctatggagtggatcactgcaaaactcaaggaggcccggggcagaggaaaaaaatttaccaccgatgattccatttgtgtgctgggaataagcaaaagaaacgttatttttcaacctgtggcagagctgaagaagcaaacggattttgagcacaggattcccaaagaacagtggtggctcaagctacggcccctcatgaaaatcctggccaagtacaaggccagctatgacgtgtcggactcaggccagctggaacatgtgcagccctggagtgtctgacccagtcccgcctgcatgtgcctgacactccgtgaatctagtgctagtttatgtaaaaaattaagtgaattaagcagctagattaaagcacgtatgattaacattaatacacaatcgcacgagtgctgat

SEQ ID NO: 333055 - DNA, 2503 bp, Homo sapiens
ggcgggggcgcgggcggggcggcggttccgagtcaggcgcgcgcgggcagggtccccattgcctgctgcgcacccggacgtgcggctcccctcggcctcctcgccatggacgcggacgactcccgggcccccaagggctccttgcggaagttcctggagcacctctccggggccggcaaggccatcggcgtgctgaccagcggcggggatgctcaaggtatgaacgctgccgtccgtgccgtggtgcgcatgggtatctacgtgggggccaaggtgtacttcatctacgagggctaccagggcatggtggacggaggctcaaacatcgcagaggccgactgggagagtgtctccagcatcctgcaagtgggcgggacgatcattggcagtgcgcggtgccaggccttccgcacgcgggaaggccgcctgaaggctgcttgcaacctgctgcagcgcggcatcaccaacctgtgtgtgatcggcggggacgggagcctcaccggggccaacctcttccggaaggagtggagtgggctgctggaggagctggccaggaacggccagatcgataaggaggccgtgcagaagtacgcctacctcaacgtggtgggcatggtgggctccatcgacaatgatttctgcggcaccgacatgaccatcggcacggactccgccctgcacaggatcatcgaggtcgtcgacgccatcatgaccacggcccagagccaccagaggaccttcgttctggaggtgatgggacgacactgtgggtacctggccctggtgagtgccttggcctgcggtgcggactgggtgttccttccagaatctccaccagaggaaggctgggaggagcagatgtgtgtcaaactctcggagaaccgtgcccggaaaaaaaggctgaatattattattgtggctgaaggagcaattgatacccaaaataaacccatcacctctgagaaaatcaaagagcttgtcgtcacgcagctgggctatgacacacgtgtgaccatcctcgggcacgtgcagagaggagggaccccttcggcattcgacaggatcttggccagccgcatgggagtggaggcagtcatcgccttgctagaggccaccccggacaccccagcttgcgtcgtgtcactgaacgggaaccacgccgtgcgcctgccgctgatggagtgcgtgcagatgactcaggatgtgcagaaggcgatggacgagaggagatttcaagatgcggttcgactccgagggaggagctttgcgggcaacctgaacacctacaagcgacttgccatcaagctgccggatgatcagatcccaaagaccaattgcaacgtagctgtcatcaacgtgggggcacccgcggctgggatgaacgcggccgtacgctcagctgtgcgcgtgggcattgccgacggccacaggatgctcgccatctatgatggctttgacggcttcgccaagggccagatcaaagaaatcggctggacagatgtcgggggctggaccggccaaggaggctccattcttgggacaaaacgcgttctcccggggaagtacttggaagagatcgccacacagatgcgcacgcacagcatcaacgcgctgctgatcatcggtggattcgaggcctacctgggactcctggagctgtcagccgcccgggagaagcacgaggagttctgtgtccccatggtcatggttcccgctactgtgtccaacaatgtgccgggttccgatttcagcatcggggcagacaccgccctgaacactatcaccgacacctgcgaccgcatcaagcagtccgccagcggaaccaagcggcgcgtgttcatcatcgagaccatgggcggctactgtggctacctggccaacatgggggggctcgcggccggagctgatgccgcatacattttcgaagagcccttcgacatcagggatctgcagtccaacgtggagcacctgacggagaaaatgaagaccaccatccagagaggccttgtgctcagaaatgagagctgcagtgaaaactacaccaccgacttcatttaccagctgtattcagaagagggcaaaggcgtgtttgactgcaggaagaacgtgctgggtcacatgcagcagggtggggcaccctctccatttgatagaaactttggaaccaaaatctctgccagagctatggagtggatcactgcaaaactcaaggaggcccggggcagaggaaaaaaatttaccaccgatgattccatttgtgtgctgggaataagcaaaagaaacgttatttttcaacctgtggcagagctgaagaagcaaacggattttgagacggtttccatgcagccgccgcggtgaactcccgtctggtggacactcccccagggcctcggtgtgatggagtttcctgaatcagcgcaggcagacgtgggacacccttgtgcaccttttcattttacttctgtttttaaataaaggccctaaatgctgcttaaaataatga

SEQ ID NO: 333056 - DNA, 2400 bp, Homo sapiens
ggcgggggcgcgggcggggcggcggttccgagtcaggcgcgcgcgggcagggtccccattgcctgctgcgcacccggacgtgcggctcccctcggcctcctcgccatggacgcggacgactcccgggcccccaagggctccttgcggaagttcctggagcacctctccggggccggcaaggccatcggcgtgctgaccagcggcggggatgctcaaggtatgaacgctgccgtccgtgccgtggtgcgcatgggtatctacgtgggggccaaggtgtacttcatctacgagggctaccagggcatggtggacggaggctcaaacatcgcagaggccgactgggagagtgtctccagcatcctgcaagtgggcgggacgatcattggcagtgcgcggtgccaggccttccgcacgcgggaaggccgcctgaaggctgcttgcaacctgctgcagcgcggcatcaccaacctgtgtgtgatcggcggggacgggagcctcaccggggccaacctcttccggaaggagtggagtgggctgctggaggagctggccaggaacggccagatcgataaggaggccgtgcagaagtacgcctacctcaacgtggtgggcatggtgggctccatcgacaatgatttctgcggcaccgacatgaccatcggcacggactccgccctgcacaggatcatcgaggtcgtcgacgccatcatgaccacggcccagagccaccagaggaccttcgttctggaggtgatgggacgacactgtgggtacctggccctggtgagtgccttggcctgcggtgcggactgggtgttccttccagaatctccaccagaggaaggctgggaggagcagatgtgtgtcaaactctcggagaaccgtgcccggaaaaaaaggctgaatattattattgtggctgaaggagcaattgatacccaaaataaacccatcacctctgagaaaatcaaagagcttgtcgtcacgcagctgggctatgacacacgtgtgaccatcctcgggcacgtgcagagaggagggaccccttcggcattcgacaggatcttggccagccgcatgggagtggaggcagtcatcgccttgctagaggccaccccggacaccccagcttgcgtcgtgtcactgaacgggaaccacgccgtgcgcctgccgctgatggagtgcgtgcagatgactcaggatgtgcagaaggcgatggacgagaggagatttcaagatgcggttcgactccgagggaggagctttgcgggcaacctgaacacctacaagcgacttgccatcaagctgccggatgatcagatcccaaagaccaattgcaacgtagctgtcatcaacgtgggggcacccgcggctgggatgaacgcggccgtacgctcagctgtgcgcgtgggcattgccgacggccacaggatgctcgccatctatgatggctttgacggcttcgccaagggccagatcaaagaaatcggctggacagatgtcgggggctggaccggccaaggaggctccattcttgggacaaaacgcgttctcccggggaagtacttggaagagatcgccacacagatgcgcacgcacagcatcaacgcgctgctgatcatcggtggattcgaggcctacctgggactcctggagctgtcagccgcccgggagaagcacgaggagttctgtgtccccatggtcatggttcccgctactgtgtccaacaatgtgccgggttccgatttcagcatcggggcagacaccgccctgaacactatcaccgacacctgcgaccgcatcaagcagtccgccagcggaaccaagcggcgcgtgttcatcatcgagaccatgggcggctactgtggctacctggccaacatgggggggctcgcggccggagctgatgccgcatacattttcgaagagcccttcgacatcagggatctgcagtccaacgtggagcacctgacggagaaaatgaagaccaccatccagagaggccttgtgctcagaaatgagagctgcagtgaaaactacaccaccgacttcatttaccagctgtattcagaagagggcaaaggcgtgtttgactgcaggaagaacgtgctgggtcacatgcagcagggtggggcaccctctccatttgatagaaactttggaaccaaaatctctgccagagctatggagtggatcactgcaaaactcaaggaggcccggggcagaggaaaaaaatttaccaccgatgattccatttgtgtgctgggaataagcaaaagaaacgttatttttcaacctgtggcagagctgaagaagcaaacggattttgagtaagttggctgggttccctgaggcaataagaccccaatgtgagtacgggacaggggaatggccattgct

SEQ ID NO: 333057 - DNA, 2497 bp, Homo sapiens
acttgtttccgtgggagagatccagccgtggctgtcgacagcagctgccgactgtgcccaatagagaaggtatctgggaaagagcccagcacggggccggggagtgtgagtgtgtcctggcacaggcaggcagaaggtgtccaacgtgcaactggagagcgcagaggtggctcaagtccccttcctcgcaggagtctggaaggctactgcatagcgtttgccttagtagaaaatggaccatttttgaagcctaggtccctgcaggcctcctggctaactcggctgtcaaagccccttttctctgctttctgagctgtttccaggactgagtgggtgctccctctgtttctctgctttctgagctgtgtccggggctccctctgtttctcttccagccaccagaggaccttcgttctggaggtgatgggacgacactgtgggggtacgtacctgcggtgggtccggtggacgcggttcaggtgggggaccctcagcatcatctccctgaggctgcaccccacatcctgaatgctcccgtggaaagtcttgaaggggccggcatcccgcttcatacctggcgttaggtacctggccctggtgagtgccttggcctgcggtgcggactgggtgttccttccagaatctccaccagaggaaggctgggaggagcagatgtgtgtcaaactctcggagaaccgtgcccggaaaaaaaggctgaatattattattgtggctgaaggagcaattgatacccaaaataaacccatcacctctgagaaaatcaaagagcttgtcgtcacgcagctgggctatgacacacgtgtgaccatcctcgggcacgtgcagagaggagggaccccttcggcattcgacaggatcttggccagccgcatgggagtggaggcagtcatcgccttgctagaggccaccccggacaccccagcttgcgtcgtgtcactgaacgggaaccacgccgtgcgcctgccgctgatggagtgcgtgcagatgactcaggatgtgcagaaggcgatggacgagaggagatttcaagatgcggttcgactccgagggaggagctttgcgggcaacctgaacacctacaagcgacttgccatcaagctgccggatgatcagatcccaaagaccaattgcaacgtagctgtcatcaacgtgggggcacccgcggctgggatgaacgcggccgtacgctcagctgtgcgcgtgggcattgccgacggccacaggatgctcgccatctatgatggctttgacggcttcgccaagggccagatcaaagaaatcggctggacagatgtcgggggctggaccggccaaggaggctccattcttgggacaaaacgcgttctcccggggaagtacttggaagagatcgccacacagatgcgcacgcacagcatcaacgcgctgctgatcatcggtggattcgaggcctacctgggactcctggagctgtcagccgcccgggagaagcacgaggagttctgtgtccccatggtcatggttcccgctactgtgtccaacaatgtgccgggttccgatttcagcatcggggcagacaccgccctgaacactatcaccgacacctgcgaccgcatcaagcagtccgccagcggaaccaagcggcgcgtgttcatcatcgagaccatgggcggctactgtggctacctggccaacatgggggggctcgcggccggagctgatgccgcatacattttcgaagagcccttcgacatcagggatctgcagtccaacgtggagcacctgacggagaaaatgaagaccaccatccagagaggccttgtgctcagaaatgagagctgcagtgaaaactacaccaccgacttcatttaccagctgtattcagaagagggcaaaggcgtgtttgactgcaggaagaacgtgctgggtcacatgcagcagggtggggcaccctctccatttgatagaaactttggaaccaaaatctctgccagagctatggagtggatcactgcaaaactcaaggaggcccggggcagaggaaaaaaatttaccaccgatgattccatttgtgtgctgggaataagcaaaagaaacgttatttttcaacctgtggcagagctgaagaagcaaacggattttgagcacaggattcccaaagaacagtggtggctcaagctacggcccctcatgaaaatcctggccaagtacaaggccagctatgacgtgtcggactcaggccagctggaacatgtgcagccctggagtgtctgacccagtcccgcctgcatgtgcctgcagccaccgtggactgtctgtttttgtaacacttaagttattttatcagcactttatgcacgtattattgacattaatacctaatcggcgagtgcccatctgccccaccagctccagtgcgtgctgtctgtggagtgtgtctcatgctttcagatgtgcatatgagcagaattaattaaacatttgcctatgactccaa

SEQ ID NO: 333058 - DNA, 1880 bp, Homo sapiens
cgaagaatgatgtatagtcgacacccggtgttatttcgtcacggggcggagctgatgtgtatctatactgcgccgtaaccgtgcccggaaaaaaaggctgaatattattattgtggctgaaggagcaattgatacccaaaataaacccatcacctctgagaaaatcaaagagcttgtcgtcacgcagctgggctatgacacacgtgtgaccatcctcgggcacgtgcagagaggagggaccccttcggcattcgacaggatcttggccagccgcatgggagtggaggcagtcatcgccttgctagaggccaccccggacaccccagcttgcgtcgtgtcactgaacgggaaccacgccgtgcgcctgccgctgatggagtgcgtgcagatgactcaggatgtgcagaaggcgatggacgagaggagatttcaagatgcggttcgactccgagggaggagctttgcgggcaacctgaacacctacaagcgacttgccatcaagctgccggatgatcagatcccaaagaccaattgcaacgtagctgtcatcaacgtgggggcacccgcggctgggatgaacgcggccgtacgctcagctgtgcgcgtgggcattgccgacggccacaggatgctcgccatctatgatggctttgacggcttcgccaagggccagatcaaagaaatcggctggacagatgtcgggggctggaccggccaaggaggctccattcttgggacaaaacgcgttctcccggggaagtacttggaagagatcgccacacagatgcgcacgcacagcatcaacgcgctgctgatcatcggtggattcgaggcctacctgggactcctggagctgtcagccgcccgggagaagcacgaggagttctgtgtccccatggtcatggttcccgctactgtgtccaacaatgtgccgggttccgatttcagcatcggggcagacaccgccctgaacactatcaccgacacctgcgaccgcatcaagcagtccgccagcggaaccaagcggcgcgtgttcatcatcgagaccatgggcggctactgtggctacctggccaacatgggggggctcgcggccggagctgatgccgcatacattttcgaagagcccttcgacatcagggatctgcagtccaacgtggagcacctgacggagaaaatgaagaccaccatccagagaggccttgtgctcagaaatgagagctgcagtgaaaactacaccaccgacttcatttaccagctgtattcagaagagggcaaaggcgtgtttgactgcaggaagaacgtgctgggtcacatgcagcagggtggggcaccctctccatttgatagaaactttggaaccaaaatctctgccagagctatggagtggatcactgcaaaactcaaggaggcccggggcagaggaaaaaaatttaccaccgatgattccatttgtgtgctgggaataagcaaaagaaacgttatttttcaacctgtggcagagctgaagaagcaaacggattttgagcacaggattcccaaagaacagtggtggctcaagctacggcccctcatgaaaatcctggccaagtacaaggccagctatgacgtgtcggactcaggccagctggaacatgtgcagccctggagtgtctgacccagtcccgcctgcatgtgcctgcagccaccgtggactgtctgtttttgtaacacttaagttattttatcagcactttatgcacgtattattgacattaatacctaatcggcgagtgcccatctgccccaccagctccagtgcgtgctgtctgtggagtgtgtctcatgctttcagatgtgcatatgagcagaattaattaaacatttgcctatgactccaa

SEQ ID NO: 333059 - DNA, 1817 bp, Homo sapiens
ctagtacgaggccgggtgttaatcggccgaggggctgaatattattattgtggctgaaggagcaattgatacccaaaataaacccatcacctctgagaaaatcaaagagcttgtcgtcacgcagctgggctatgacacacgtgtgaccatcctcgggcacgtgcagagaggagggaccccttcggcattcgacaggatcttggccagccgcatgggagtggaggcagtcatcgccttgctagaggccaccccggacaccccagcttgcgtcgtgtcactgaacgggaaccacgccgtgcgcctgccgctgatggagtgcgtgcagatgactcaggatgtgcagaaggcgatggacgagaggagatttcaagatgcggttcgactccgagggaggagctttgcgggcaacctgaacacctacaagcgacttgccatcaagctgccggatgatcagatcccaaagaccaattgcaacgtagctgtcatcaacgtgggggcacccgcggctgggatgaacgcggccgtacgctcagctgtgcgcgtgggcattgccgacggccacaggatgctcgccatctatgatggctttgacggcttcgccaagggccagatcaaagaaatcggctggacagatgtcgggggctggaccggccaaggaggctccattcttgggacaaaacgcgttctcccggggaagtacttggaagagatcgccacacagatgcgcacgcacagcatcaacgcgctgctgatcatcggtggattcgaggcctacctgggactcctggagctgtcagccgcccgggagaagcacgaggagttctgtgtccccatggtcatggttcccgctactgtgtccaacaatgtgccgggttccgatttcagcatcggggcagacaccgccctgaacactatcaccgacacctgcgaccgcatcaagcagtccgccagcggaaccaagcggcgcgtgttcatcatcgagaccatgggcggctactgtggctacctggccaacatgggggggctcgcggccggagctgatgccgcatacattttcgaagagcccttcgacatcagggatctgcagtccaacgtggagcacctgacggagaaaatgaagaccaccatccagagaggccttgtgctcagaaatgagagctgcagtgaaaactacaccaccgacttcatttaccagctgtattcagaagagggcaaaggcgtgtttgactgcaggaagaacgtgctgggtcacatgcagcagggtggggcaccctctccatttgatagaaactttggaaccaaaatctctgccagagctatggagtggatcactgcaaaactcaaggaggcccggggcagaggaaaaaaatttaccaccgatgattccatttgtgtgctgggaataagcaaaagaaacgttatttttcaacctgtggcagagctgaagaagcaaacggattttgagcacaggattcccaaagaacagtggtggctcaagctacggcccctcatgaaaatcctggccaagtacaaggccagctatgacgtgtcggactcaggccagctggaacatgtgcagccctggagtgtctgacccagtcccgcctgcatgtgcctgcagccaccgtggactgtctgtttttgtaacacttaagttattttatcagcactttatgcacgtattattgacattaatacctaatcggcgagtgcccatctgccccaccagctccagtgcgtgctgtctgtggagtgtgtctcatgctttcagatgtgcatatgagcagaattaattaaacatttgcctatgactccaa

SEQ ID NO: 333060 - DNA, 1835 bp, Homo sapiens
ggcgggggcgcgggcggggcggcggttccgagtcaggcgcgcgcgggcagggtccccattgcctgctgcgcacccggacgtgcggctcccctcggcctcctcgccatggacgcggacgactcccgggcccccaagggctccttgcggaagttcctggagcacctctccggggccggcaaggccatcggcgtgctgaccagcggcggggatgctcaaggtatgaacgctgccgtccgtgccgtggtgcgcatgggtatctacgtgggggccaaggtgtacttcatctacgagggctaccagggcatggtggacggaggctcaaacatcgcagaggccgactgggagagtgtctccagcatcctgcaagtgggcgggacgatcattggcagtgcgcggtgccaggccttccgcacgcgggaaggccgcctgaaggctgcttgcaacctgctgcagcgcggcatcaccaacctgtgtgtgatcggcggggacgggagcctcaccggggccaacctcttccggaaggagtggagtgggctgctggaggagctggccaggaacggccagatcgataaggaggccgtgcagaagtacgcctacctcaacgtggtgggcatggtgggctccatcgacaatgatttctgcggcaccgacatgaccatcggcacggactccgccctgcacaggatcatcgaggtcgtcgacgccatcatgaccacggcccagagccaccagaggaccttcgttctggaggtgatgggacgacactgtgggtacctggccctggtgagtgccttggcctgcggtgcggactgggtgttccttccagaatctccaccagaggaaggctgggaggagcagatgtgtgtcaaactctcggagaaccgtgcccggaaaaaaaggctgaatattattattgtggctgaaggagcaattgatacccaaaataaacccatcacctctgagaaaatcaaagagcttgtcgtcacgcagctgggctatgacacacgtgtgaccatcctcgggcacgtgcagagaggagggaccccttcggcattcgacaggatcttggccagccgcatgggagtggaggcagtcatcgccttgctagaggccaccccggacaccccagcttgcgtcgtgtcactgaacgggaaccacgccgtgcgcctgccgctgatggagtgcgtgcagatgactcaggatgtgcagaaggcgatggacgagaggagatttcaagatgcggttcgactccgagggaggagctttgcgggcaacctgaacacctacaagcgacttgccatcaagctgccggatgatcagatcccaaagaccaattgcaacgtagctgtcatcaacgtgggggcacccgcggctgggatgaacgcggccgtacgctcagctgtgcgcgtgggcattgccgacggccacaggatgctcgccatctatgatggctttgacggcttcgccaagggccagatcaaagaaatcggctggacagatgtcgggggctggaccggccaaggaggctccattcttgggacaaaacgcgttctcccggggaagtacttggaagagatcgccacacagatgcgcacgcacagcatcaacgcgctgctgatcatcggtggattcgaggcagccaccgtggactgtctgtttttgtaacacttaagttattttatcagcactttatgcacgtattattgacattaatacctaatcggcgagtgcccatctgccccaccagctccagtgcgtgctgtctgtggagtgtgtctcatgctttcagatgtgcatatgagcagaattaattaaacatttgcctatgactccaa

SEQ ID NO: 333061 - DNA, 1613 bp, Homo sapiens
ggcgggggcgcgggcggggcggcggttccgagtcaggcgcgcgcgggcagggtccccattgcctgctgcgcacccggacgtgcggctcccctcggcctcctcgccatggacgcggacgactcccgggcccccaagggctccttgcggaagttcctggagcacctctccggggccggcaaggccatcggcgtgctgaccagcggcggggatgctcaaggtatgaacgctgccgtccgtgccgtggtgcgcatgggtatctacgtgggggccaaggtgtacttcatctacgagggctaccagggcatggtggacggaggctcaaacatcgcagaggccgactgggagagtgtctccagcatcctgcaagtgggcgggacgatcattggcagtgcgcggtgccaggccttccgcacgcgggaaggccgcctgaaggctgcttgcaacctgctgcagcgcggcatcaccaacctgtgtgtgatcggcggggacgggagcctcaccggggccaacctcttccggaaggagtggagtgggctgctggaggagctggccaggaacggccagatcgataaggaggccgtgcagaagtacgcctacctcaacgtggtgggcatggtgggctccatcgacaatgatttctgcggcaccgacatgaccatcggcacggactccgccctgcacaggatcatcgaggtcgtcgacgccatcatgaccacggcccagagccaccagaggaccttcgttctggaggtgatgggacgacactgtgggtacctggccctggtgagtgccttggcctgcggtgcggactgggtgttccttccagaatctccaccagaggaaggctgggaggagcagatgtgtgtcaaactctcggagaaccgtgcccggaaaaaaaggctgaatattattattgtggctgaaggagcaattgatacccaaaataaacccatcacctctgagaaaatcaaagagcttgtcgtcacgcagctgggctatgacacacgtgtgaccatcctcgggcacgtgcagagaggagggaccccttcggcattcgacaggatcttggccagccgcatgggagtggaggcagtcatcgccttgctagaggccaccccggacaccccagcttgcgtcgtgtcactgaacgggaaccacgccgtgcgcctgccgctgatggagtgcgtgcagatgactcaggatgtgcagaaggcgatggacgagaggagatttcaagatgcggttcgactccgagggaggagctttgcgggcaacctgaacacctacaagcgacttgccatcaagctgccggatgatcagatcccaaagaccaattgcaacgtagctgtcatcaacgtgggggcacccgcggctgggatgaacgcggccgtacgctcagctgtgcgcgtgggcattgccgacggccacaggatgctcgccatctatgatggctttgacggcttcgccaagggccagatcaaagaaatcggctggacagatgtcgggggctggaccggccaaggaggctccattcttgggacaaaacgcgttcctcccggggaatacattggaagagatcgccctttcgatagggtaccagctcggttcgtatc

SEQ ID NO: 333062 - DNA, 2430 bp, Homo sapiens
aggtaactgcagggagagacaccgggataatttctgtgaagagaggacatggggtggctccgagagcccctgacagagggaactttgtggtcctagaaaccaggtggtgttttcctgaggaaatgacattttcctctggatcagagctgaggaaggtgcctctgtgtgtcccgtggccgctgtgacactgaccacacacctggggctggaaaataatactcactctcccacagctctggagcgcaggagccatgggctgaggccagaatgtttgctccaggagcgtccctcgtggcccgttcaggtgcccagagttgcgggccttgcacgccttgtacgccttgttccctggcgcctcctccttccatgtgggtgtgcagcatcccgctccagggccttcagcctctgcgcccctcatctgctgatgcaggtgatggcatttaaggcccacctgggtactcctaggattcacctttatcaccgcatgagggagcattcccaggttccagggattagggataggactgggattcctttgggggctgctctcccgcccaccactgtgccggaatgtgatgcacacagcggccagcatatccaaaggccccaggaggacctggggtggctggaacaggacctggtgccgggagcaggcggggccggggattcccgacaaaggcttgatgtgtacttgaagtgagcaaagggttttgaataaaccaagaactggatcagatttatgttttttatagatggggtcctttctgtgtgaacggattggagggtcccggggtgggagctgaggcccaggaagagggcgttgcagccggactgatgtatgggtgggaaggcggccgatgcatttctttgccatttttctccccgccgagcttgggtcctcatggagggcggatggcagacatttcactctgggatccgatgcctgtgcatctggaagacttccccaggtgcctgggtctaagaaccaccatctgcctttgagtagagtttccataaatgtaacattcgccaatggatggaagatggccgcacctctaaaatcacagggagcttttcagaagaaaatagaatagcacagcggttctcacggactaagctggcaggggacagtcccctaacatctcagctaacacctaacggtgtctgtgtccggtgaaagcggcttcagcagggacagtcacagagcagcgtggagtgagctggcttgtggggtcgtcttttccgtccccttctatggggcctgggagaagggagcggcagatggccaggcccccaaaacgggacatcgaggtcacctccaggtggctgccatggtggggttgcgggggaccacgttcacacccactccgagggcacatcccggctgctgcacacccttcacctctgcgggatgctgggaccgcatgtttgggcgcggtgggggggccttgctgcactcactcttgggggagctctgggatggtgggcgcgccccgggcctgggctggagtgactgatcgcttctctgtgaccagacctgcgaccgcatcaagcagtccgccagcggaaccaagcggcgcgtgttcatcatcgagaccatgggcggctactgtggctacctggccaacatgggggggctcgcggccggagctgatgccgcatacattttcgaagagcccttcgacatcagggatctgcagtccaacgtggagcacctgacggagaaaatgaagaccaccatccagagaggccttgtgctcagaaatgagagctgcagtgaaaactacaccaccgacttcatttaccagctgtattcagaagagggcaaaggcgtgtttgactgcaggaagaacgtgctgggtcacatgcagcagggtggggcaccctctccatttgatagaaactttggaaccaaaatctctgccagagctatggagtggatcactgcaaaactcaaggaggcccggggcagaggaaaaaaatttaccaccgatgattccatttgtgtgctgggaataagcaaaagaaacgttatttttcaacctgtggcagagctgaagaagcaaacggattttgagcacaggattcccaaagaacagtggtggctcaagctacggcccctcatgaaaatcctggccaagtacaaggccagctatgacgtgtcggactcaggccagctggaacatgtgcagccctggagtgtctgacccagtcccgcctgcatgtgcctgcagccaccgtggactgtctgtttttgtaacacttaagttattttatcagcactttatgcacgtattattgacattaatacctaatcggcgagtgcccatctgccccaccagctccagtgcgtgctgtctgtggagtgtgtctcatgctttcagatgtgcatatgagcagaattaattaaacatttgcctatgactccaa

SEQ ID NO: 333063 - DNA, 1717 bp, Homo sapiens
ctttctgataccggagcgcatttcccagtggaaccccagagcagcaactcaggttcttgctcgcctgtgcggctttgtgtgcggcttgccgagggcagaaacggcagcttccgcccggagagcagagatgtggcgtggggctgagtgtggcccaccggtaatccagctgcatgcccccttccctgcctgcacctgggcgccgcctctgcacgatgaaggcgggcatttggtgtggtccttacagccgtgtgccccatcccactgatccttgcctgcctgcagaaagctacaggattggctttgcctttaagtgtcctgactgccctggcctcccttacctaccatgacacgccgagagctgagctgtcccactcgtgactaactcgccgttgcctgcaacctgctccgttgcctgcctcacacccaccccgctgtgctgcctgcaggcaccccctttcatgaggacctgggctgtgcccaggcggccccctgtgttgctggggcctgtgctgctctcgcacggcctccagagcctccctcggccccttgacccgcatgaaccggcttcccctggtgactcagtcccctcccgtcccttcctggacctcagcacaggccctggggctggcaggtgagcacccggcacccccgctaaccgcttggccctgctgcttcaggcttacaagagtgcgtgcgacatggccgaggcacgaggccgccaccaggagctttgcatccccctgtgtgtggtgccggccacgattagcaacaatgtcccaggcacagaaataagcctgggctccgacactggcctgaatgctgacctgcgaccgcatcaagcagtccgccagcggaaccaagcggcgcgtgttcatcatcgagaccatgggcggctactgtggctacctggccaacatgggggggctcgcggccggagctgatgccgcatacattttcgaagagcccttcgacatcagggatctgcagtccaacgtggagcacctgacggagaaaatgaagaccaccatccagagaggccttgtgctcagaaatgagagctgcagtgaaaactacaccaccgacttcatttaccagctgtattcagaagagggcaaaggcgtgtttgactgcaggaagaacgtgctgggtcacatgcagcagggtggggcaccctctccatttgatagaaactttggaaccaaaatctctgccagagctatggagtggatcactgcaaaactcaaggaggcccggggcagaggaaaaaaatttaccaccgatgattccatttgtgtgctgggaataagcaaaagaaacgttatttttcaacctgtggcagagctgaagaagcaaacggattttgagcacaggattcccaaagaacagtggtggctcaagctacggcccctcatgaaaatcctggccaagtacaaggccagctatgacgtgtcggactcaggccagctggaacatgtgcagccctggagtgtctgacccagtcccgcctgcatgtgcctgcagccaccgtggactgtctgtttttgtaacacttaagttattttatcagcactttatgcacgtattattgacattaatacctaatcggcgagtgcccatctgccccaccagctccagtgcgtgctgtctgtggagtgtgtctcatgctttcagatgtgcatatgagcagaattaattaaacatttgcctatgactccaa

SEQ ID NO: 333064 - DNA, 916 bp, Homo sapiens
tgcaatttaaaacttacatatttatttctggaattttccatttaatatttgtgggcctcagttgaccactggaccatgggtaacaaactgcagaaagcaaaaccgtgaactggagggactggtgttgatgtagaatcaccatagggttgggggatgcgggagtccagcctcccagggccatctccccaagcagggagccacgtgcccactgcacgctaaacaaagtgactccttctcgctcgtttcagaaatgagagctgcagtgaaaactacaccaccgacttcatttaccagctgtattcagaagagggcaaaggcgtgtttgactgcaggaagaacgtgctgggtcacatgcagcagggtggggcaccctctccatttgatagaaactttggaaccaaaatctctgccagagctatggagtggatcactgcaaaactcaaggaggcccggggcagaggaaaaaaatttaccaccgatgattccatttgtgtgctgggaataagcaaaagaaacgttatttttcaacctgtggcagagctgaagaagcaaacggattttgagcacaggattcccaaagaacagtggtggctcaagctacggcccctcatgaaaatcctggccaagtacaaggccagctatgacgtgtcggactcaggccagctggaacatgtgcagccctggagtgtctgacccagtcccgcctgcatgtgcctgcagccaccgtggactgtctgtttttgtaacacttaagttattttatcagcactttatgcacgtattattgacattaatacctaatcggcgagtgcccatctgccccaccagctccagtgcgtgctgtctgtggagtgtgtctcatgctttcagatgtgcatatgagcagaattaattaaacatttgcctatgactccaa

SEQ ID NO: 333065 - DNA, 1386 bp, Homo sapiens
ggcgggggcgcgggcggggcggcggttccgagtcaggcgcgcgcgggcagggtccccattgcctgctgcgcacccggacgtgcggctcccctcggcctcctcgccatggacgcggacgactcccgggcccccaagggctccttgcggaagttcctggagcacctctccggggccggcaaggccatcggcgtgctgaccagcggcggggatgctcaaggtatgaacgctgccgtccgtgccgtggtgcgcatgggtatctacgtgggggccaaggtgtacttcatctacgagggctaccagggcatggtggacggaggctcaaacatcgcagaggccgactgggagagtgtctccagcatcctgcaagtgggcgggacgatcattggcagtgcgcggtgccaggccttccgcacgcgggaaggccgcctgaaggctgcttgcaacctgctgcagcgcggcatcaccaacctgtgtgtgatcggcggggacgggagcctcaccggggccaacctcttccggaaggagtggagtgggctgctggaggagctggccaggaacggccagatcgataaggaggccgtgcagaagtacgcctacctcaacgtggtgggcatggtgggctccatcgacaatgatttctgcggcaccgacatgaccatcggcacggactccgccctgcacaggatcatcgaggtcgtcgacgccatcatgaccacggcccagagccaccagaggaccttcgttctggaggtgatgggacgacactgtgggccagccgcatgggagtggaggcagtcatcgccttgctagaggccaccccggacaccccagcttgcgtcgtgtcactgaacgggaaccacgccgtgcgcctgccgctgatggagtgcgtgcagatgactcaggatgtgcagaaggcgatggacgagaggagatttcaagatgcggttcgactccgagggaggagctttgcgggcaacctgaacacctacaagcgacttgccatcaagctgccggatgatcagatcccaaagaccaattgcaacgtagctgtcatcaacgtgggggcacccgcggctgggatgaacgcggccgtacgctcagctgtgcgcgtgggcattgccgacggccacaggatgctcgccatctatgatggctttgacggcttcgccaagggccagatcaaagaaatcggctggacagatgtcgggggctgaccggcaaggcgtccatctgggaaaacggggtcccgggagacttggaggaatcgtcaaagtgtgcgcggacacccgggcgggtactggggaacgcccggggccttgatgcacggaaaaaagttccccggtctccatggccacagtctcaggtaacgcaaaaggtaaaaccaag

SEQ ID NO: 333066 - DNA, 1169 bp, Homo sapiens
attccagtaaaaggaccccagcatcaacgttcttcctgcagggctgggttctcagagaaagaaaacgtgatgcagcagaggatgggattgaagaaacaggagagtgaagtggaaatagcctggcccgcgtgacttaaaccggcccggagatgtgcgggtatgaacgctgccgtccgtgccgtggtgcgcatgggtatctacgtgggggccaaggtgtacttcatctacgagggctaccagggcatggtggacggaggctcaaacatcgcagaggccgactgggagagtgtctccagcatcctgcaagtgggcgggacgatcattggcagtgcgcggtgccaggccttccgcacgcgggaaggccgcctgaaggctgcttgcaacctgctgcagcgcggcatcaccaacctgtgtgtgatcggcggggacgggagcctcaccggggccaacctcttccggaaggagtggagtgggctgctggaggagctggccaggaacggccagatcgataaggaggccgtgcagaagtacgcctacctcaacgtggtgggcatggtgggctccatcgacaatgatttctgcggcaccgacatgaccatcggcacggactccgccctgcacaggatcatcgaggtcgtcgacgccatcatgaccacggcccagagccaccagaggaccttcgttctggaggtgatgggacgacactgtgggtacctggccctggtgagtgccttggcctgcggtgcggactgggtgttccttccagaatctccaccagaggaaggctgggaggagcagatgtgtgtcaaactctcggagaaccgtgcccggaaaaaaaggctgaatattattattgtggctgaaggagcaattgatacccaaaataaacccatcacctctgagaaaatcaaagagctgtccgtccgcaggtgggctatgacacacgtgtgaccatctcgggccgtgcgatgggggccctttgctcgcaggttgggcgcgctgggtgggggggcttgctgttaaggcgccggacccgtgggttgtctatcggacacggtgcgcggtgggggggtgtccgtgcgggggggggggaagggcccgagggggcgcgcacgggcggcgggccacagcttgggcggggcggtgtggactggggggggcgcgggcgc

SEQ ID NO: 333067 - DNA, 280 bp, Homo sapiens
tggacagcacagaggaggtggacagcacagaggaggtggacagcctggagtgtctgacccagtcccgcctgcatgtgcctgcagccaccgtggactgtctgtttttgtaacacttaagttattttatcagcactttatgcacgtattattgacattaatacctaatcggcgagtgcccatctgccccaccagctccagtgcgtgctgtctgtggagtgtgtctcatgctttcagatgtgcatatgagcagaattaattaaacatttgcctatgactccaa

SEQ ID NO: 333068 - DNA, 593 bp, Homo sapiens
ggcgggggcgcgggcggggcggcggttccgagtcaggcgcgcgcgggcagggtccccattgcctgctgcgcacccggacgtgcggctcccctcggcctcctcgccatggacgcggacgactcccgggcccccaagggctccttgcggaagttcctggagcacctctccggggccggcaaggccatcggcgtgctgaccagcggcggggatgctcaaggtatgaacgctgccgtccgtgccgtggtgcgcatgggtatctacgtgggggccaaggtgtacttcatctacgagggctaccagggcatggtggacggaggctcaaacatcgcagaggccgactgggagagtgtctccagcatcctgcaagtggtaggtactgggctgcgtccacagggttctctgagttagagactcttttatgtctagtaaattcccagaacacttgagctcagatcagttgcgaaatagagattatgtggacagaacagactttgtgagcagctctttacttgtggtttgatttttagaaatgcatgtgttaatctgtgagtcactttgagtacttgttaatacaaataatccatatttcacca

SEQ ID NO: 333069 - DNA, 407 bp, Homo sapiens
ttagttgacttgttcggtttattaaaatcctcatcttactgagcggggggaacacttgatactttttcttaacaggccaagttcaggctacgggaatcacaggttttgttctgttccaactataaggacctagaaataaaaacatgaattctgcaaaatagaaattgtcatttctatttaacagcaaagtgttactgtataactggtatttcatataactctaaccaccaacagggtggggcaccctctccatttgatagaaactttggaaccaaaatctctgccagagctatggagtggatcactgcaaaactcaaggaggcccggggcagaggtaaggggtctggggagggaggccacagcctcgtgatgcaggccgtcctgccttggtgaaaatgctgtcctat

SEQ ID NO: 333070 - DNA, 560 bp, Homo sapiens
atggagtggatcactgcatagctctggcagagattttggaaccaaaatctctgccagagctatggagtggatcactgcaaaactcaaggaggcccggggcagaggaaaaaaatttaccaccgatgattccatttgtgtgctgggaataagcaaaagaaacgttatttttcaacctgtggcagagctgaagaagcaaacggattttgagcacaggattcccaaagaacagtggtggctcaagctacggcccctcatgaaaatcctggccaagtacaaggccagctatgacgtgtcggactcaggccagctggaacatgtgcagccctggagtgtctgacccagtcccgcctgcatgtgcctgcagccaccgtggactgtctgtttttgtaacacttaagttattttatcagcactttatgcacgtattattgacattaatacctaatcggcgagtgcccatctgccccaccagctccagtgcgtgctgtctgtggagtgtgtctcatgctttcagatgtgcatatgagcagaattaattaaacatttgcctatgactccaa

SEQ ID NO: 333071 - DNA, 1047 bp, Homo sapiens
ctttctgataccggagcgcatttcccagtggaaccccagagcagcaactcaggttcttgctcgcctgtgcggctttgtgtgcggcttgccgagggcagaaacggcagcttccgcccggagagcagagatgtggcgtggggctgagtgtggcccaccggtaatccagctgcatgcccccttccctgcctgcacctgggcgccgcctctgcacgatgaaggcgggcatttggtgtggtccttacagccgtgtgccccatcccactgatccttgcctgcctgcagaaagctacaggattggctttgcctttaagtgtcctgactgccctggcctcccttacctaccatgacacgccgagagctgagctgtcccactcgtgactaactcgccgttgcctgcaacctgctccgttgcctgcctcacacccaccccgctgtgctgcctgcaggcaccccctttcatgaggacctgggctgtgcccaggcggccccctgtgttgctggggcctgtgctgctctcgcacggcctccagagcctccctcggccccttgacccgcatgaaccggcttcccctggtgactcagtcccctcccgtcccttcctggacctcagcacaggccctggggctggcaggtgagcacccggcacccccgctaaccgcttggccctgctgcttcaggcttacaagagtgcgtgcgacatggccgaggcacgaggccgccaccaggagctttgcatccccctgtgtgtggtgccggccacgattagcaacaatgtcccaggcacagaaataagcctgggctccgacactggcctgaatgctgttgttgaggtaagagaaccccgtttcctctcattgcttttccgtcatttattttagcaacttgtttcttctgtgctaaggatgagccggatttattcttcttcttttctcccctttgttagcttggctttatgtcacactggccagaacagggtaaaatttttttagcttctctgccttagggagagcctgtctttattgattaaaagtgagatgatatatccag

SEQ ID NO: 333072 - DNA, 675 bp, Homo sapiens
ggcgggggcgcgggcggggcggcggttccgagtcaggcgcgcgcgggcagggtccccattgcctgctgcgcacccggacgtgcggctcccctcggcctcctcgccatggacgcggacgactcccgggcccccaagggctccttgcggaagttcctggagcacctctccggggccggcaaggccatcggcgtgctgaccagcggcggggatgctcaagggctgggttctcagagaaagaaaacgtgatgcagcagaggatgggattgaagaaacaggagagtgaagtggaaatagcctggcccgcgtgacttaaaccggcccggagatgtgcgggtacgaatggagccgccttggggtcgggataggacccagagtggcttctcagtcaaaggccttcagaagcagagggagcaccttgagtgaccttacctgggccgcgaaagacaagaaacctttggcacaggaagaggaactgatctctggaagccaccagggcgggtggaaagtcagggtttcaaggttattttggaatttaggtgctgtgggccttgtacggtggctcatgcttgtcatcccagtgctttgggaggccgaggcaggaggctcgcttgagccgaggagttccagagcatcctgggcaacatagtgagactctgtgtctacaaaaaaaaagaa

SEQ ID NO: 333073 - DNA, 776 bp, Homo sapiens
  misc_feature (761)..(761): n is a, c, g, or t
acttgtttccgtgggagagatccagccgtggctgtcgacagcagctgccgactgtgcccaatagagaaggtatctgggaaagagcccagcacggggccggggagtgtgagtgtgtcctggcacaggcaggcagaaggtgtccaacgtgcaactggagagcgcagaggtggctcaagtccccttcctcgcaggagtctggaaggctactgcatagcgtttgccttagtagaaaatggaccatttttgaagcctaggtccctgcaggcctcctggctaactcggctgtcaaagccccttttctctgctttctgagctgtttccaggactgagtgggtgctccctctgtttctctgctttctgagctgtgtccggggctccctctgtttctcttccagccaccagaggaccttcgttctggaggtgatgggacgacactgtgggggtacgtacctgcggtgggtccggtggacgcggttcaggtgggggaccctcagcatcatctccctgaggctgcaccccacatcctgaatgctcccgtggaaagtcttgaaggggccggcatcccgcttcatacctggcgttaggtacctggccctggtgagtgccttggcctgcggtgcggactgggtgttccttccagaatctccaccagaggaaggctgggaggagcagatgtgtgtcaaactctcggagaaccgtgcccggaaaaacaggtgaatatattattgtgctgcggaatcgggatctctagagtgactgangatgaagctggactg

SEQ ID NO: 333074 - DNA, 3035 bp, Homo sapiens
ggcgggggcgcgggcggggcggcggttccgagtcaggcgcgcgcgggcagggtccccattgcctgctgcgcacccggacgtgcggctcccctcggcctcctcgccatggacgcggacgactcccgggcccccaagggctccttgcggaagttcctggagcacctctccggggccggcaaggccatcggcgtgctgaccagcggcggggatgctcaaggtatgaacgctgccgtccgtgccgtggtgcgcatgggtatctacgtgggggccaaggtgtacttcatctacgagggctaccagggcatggtggacggaggctcaaacatcgcagaggccgactgggagagtgtctccagcatcctgcaagtgggcgggacgatcattggcagtgcgcggtgccaggccttccgcacgcgggaaggccgcctgaaggctgcttgcaacctgctgcagcgcggcatcaccaacctgtgtgtgatcggcggggacgggagcctcaccggggccaacctcttccggaaggagtggagtgggctgctggaggagctggccaggaacggccagatcgataaggaggccgtgcagaagtacgcctacctcaacgtggtgggcatggtgggctccatcgacaatgatttctgcggcaccgacatgaccatcggcacggactccgccctgcacaggatcatcgaggtcgtcgacgccatcatgaccacggcccagagccaccagaggaccttcgttctggaggtgatgggacgacactgtgggtacctggccctggtgagtgccttggcctgcggtgcggactgggtgttccttccagaatctccaccagaggaaggctgggaggagcagatgtgtgtcaaactctcggagaaccgtgcccggaaaaaaaggctgaatattattattgtggctgaaggagcaattgatacccaaaataaacccatcacctctgagaaaatcaaagagcttgtcgtcacgcagctgggctatgacacacgtgtgaccatcctcgggcacgtgcagagaggagggaccccttcggcattcgacaggatcttggccagccgcatgggagtggaggcagtcatcgccttgctagaggccaccccggacaccccagcttgcgtcgtgtcactgaacgggaaccacgccgtgcgcctgccgctgatggagtgcgtgcagatgactcaggatgtgcagaaggcgatggacgagaggagatttcaagatgcggttcgactccgagggaggagctttgcgggcaacctgaacacctacaagcgacttgccatcaagctgccggatgatcagatcccaaagaccaattgcaacgtagctgtcatcaacgtgggggcacccgcggctgggatgaacgcggccgtacgctcagctgtgcgcgtgggcattgccgacggccacaggatgctcgccatctatgatggctttgacggcttcgccaagggccagatcaaagaaatcggctggacagatgtcgggggctggaccggccaaggaggctccattcttgggacaaaacgcgttctcccggggaagtacttggaagagatcgccacacagatgcgcacgcacagcatcaacgcgctgctgatcatcggtggattcgaggcctacctgggactcctggagctgtcagccgcccgggagaagcacgaggagttctgtgtccccatggtcatggttcccgctactgtgtccaacaatgtgccgggttccgatttcagcatcggggcagacaccgccctgaacactatcaccgacacctgcgaccgcatcaagcagtccgccagcggaaccaagcggcgcgtgttcatcatcgagaccatgggcggctactgtggctacctggccaacatgggggggctcgcggccggagctgatgccgcatacattttcgaagagcccttcgacatcagggatctgcagtccaacgtggagcacctgacggagaaaatgaagaccaccatccagagaggccttgtgctcagaaatgagagctgcagtgaaaactacaccaccgacttcatttaccagctgtattcagaagagggcaaaggcgtgtttgactgcaggaagaacgtgctgggtcacatgcagcagggtggggcaccctctccatttgatagaaactttggaaccaaaatctctgccagagctatggagtggatcactgcaaaactcaaggaggcccggggcagaggaaaaaaatttaccaccgatgattccatttgtgtgctgggaataagcaaaagaaacgttatttttcaacctgtggcagagctgaagaagcaaacggattttgagcacaggattcccaaagaacagtggtggctcaagctacggcccctcatgaaaatcctggccaagtacaaggccagctatgacgtgtcggactcaggccagctggaacatgtgcagccctggagtgtctgacccagtcccgcctgcatgtgcctgcagccaccgtggactgtctgtttttgtaacacttaagttattttatcagcactttatgcacgtattattgacattaatacctaatcggcgagtgcccatctgccccaccagctccagtgcgtgctgtctgtggagtgtgtctcatgctttcagatgtgcatatgagcagaattaattaaacatttgcctatgactccaaaaaaaaaaacaaacaactcagggacacatagacggagacggaaaagagagtcagcacgtgaccggggcatagcgggaccccaacccactactgtgaccaagccgcacacagcggacacccaacaggagaagcgatacacgaaaccacgggtcaccgctagacacccggcgggcaacaaaacagcaagcaagacaagaacagacaaaggcacacaaatgacaagaaaagcgtaaagacacaccacaacgacacacaacagcacacgcagcccacagagagaaccaccaagaccacaacgcacaagcgaacgcgccacagcaaagaacacaaaaaagagcacacaacgaccaca

SEQ ID NO: 333075 - DNA, 3121 bp, Homo sapiens
ggcgggggcgcgggcggggcggcggttccgagtcaggcgcgcgcgggcagggtccccattgcctgctgcgcacccggacgtgcggctcccctcggcctcctcgccatggacgcggacgactcccgggcccccaagggctccttgcggaagttcctggagcacctctccggggccggcaaggccatcggcgtgctgaccagcggcggggatgctcaaggtatgaacgctgccgtccgtgccgtggtgcgcatgggtatctacgtgggggccaaggtgtacttcatctacgagggctaccagggcatggtggacggaggctcaaacatcgcagaggccgactgggagagtgtctccagcatcctgcaagtgggcgggacgatcattggcagtgcgcggtgccaggccttccgcacgcgggaaggccgcctgaaggctgcttgcaacctgctgcagcgcggcatcaccaacctgtgtgtgatcggcggggacgggagcctcaccggggccaacctcttccggaaggagtggagtgggctgctggaggagctggccaggaacggccagatcgataaggaggccgtgcagaagtacgcctacctcaacgtggtgggcatggtgggctccatcgacaatgatttctgcggcaccgacatgaccatcggcacggactccgccctgcacaggatcatcgaggtcgtcgacgccatcatgaccacggcccagagccaccagaggaccttcgttctggaggtgatgggacgacactgtgggtacctggccctggtgagtgccttggcctgcggtgcggactgggtgttccttccagaatctccaccagaggaaggctgggaggagcagatgtgtgtcaaactctcggagaaccgtgcccggaaaaaaaggctgaatattattattgtggctgaaggagcaattgatacccaaaataaacccatcacctctgagaaaatcaaagagcttgtcgtcacgcagctgggctatgacacacgtgtgaccatcctcgggcacgtgcagagaggagggaccccttcggcattcgacaggatcttggccagccgcatgggagtggaggcagtcatcgccttgctagaggccaccccggacaccccagcttgcgtcgtgtcactgaacgggaaccacgccgtgcgcctgccgctgatggagtgcgtgcagatgactcaggatgtgcagaaggcgatggacgagaggagatttcaagatgcggttcgactccgagggaggagctttgcgggcaacctgaacacctacaagcgacttgccatcaagctgccggatgatcagatcccaaagaccaattgcaacgtagctgtcatcaacgtgggggcacccgcggctgggatgaacgcggccgtacgctcagctgtgcgcgtgggcattgccgacggccacaggatgctcgccatctatgatggctttgacggcttcgccaagggccagatcaaagaaatcggctggacagatgtcgggggctggaccggccaaggaggctccattcttgggacaaaacgcgttctcccggggaagtacttggaagagatcgccacacagatgcgcacgcacagcatcaacgcgctgctgatcatcggtggattcgaggcctacctgggactcctggagctgtcagccgcccgggagaagcacgaggagttctgtgtccccatggtcatggttcccgctactgtgtccaacaatgtgccgggttccgatttcagcatcggggcagacaccgccctgaacactatcaccgacacctgcgaccgcatcaagcagtccgccagcggaaccaagcggcgcgtgttcatcatcgagaccatgggcggctactgtggctacctggccaacatgggggggctcgcggccggagctgatgccgcatacattttcgaagagcccttcgacatcagggatctgcagtccaacgtggagcacctgacggagaaaatgaagaccaccatccagagaggccttgtgctcagaaatgagagctgcagtgaaaactacaccaccgacttcatttaccagctgtattcagaagagggcaaaggcgtgtttgactgcaggaagaacgtgctgggtcacatgcagcagggtggggcaccctctccatttgatagaaactttggaaccaaaatctctgccagagctatggagtggatcactgcaaaactcaaggaggcccggggcagaggaaaaaaatttaccaccgatgattccatttgtgtgctgggaataagcaaaagaaacgttatttttcaacctgtggcagagctgaagaagcaaacggattttgagcacaggattcccaaagaacagtggtggctcaagctacggcccctcatgaaaatcctggccaagtacaaggccagctatgacgtgtcggactcaggccagctggaacatgtgcagccctggagtgtctgacccagtcccgcctgcatgtgcctgcagccaccgtggactgtctgtttttgtaacacttaagttattttatcagcactttatgcacgtattattgacattaatacctaatcggcgagtgcccatctgccccaccagctccagtgcgtgctgtctgtggagtgtgtctcatgctttcagatgtgcatatgagcagaattaattaaacatttgcctatgactccaaaaaaaaaaaaaaaaaaaaaaaaaaaaaaaaaaaaaaaaaaaagaggggggggcgccgccaaaaaaaacacccccgggggggcccccataaggggcccccctttttgtgtggaaaaaggggggccccccaggggggggggtataaagagggggggcagcgggccgcgcgggttaaaaaagggctggggagcgggggaaaaaaagcgtgggcatggcggggaatctttgggggagagagaacccatttcttcggggggcggggcgacatatagtggggcacaacaacatactccaagagagatatttaaagcgcctcggggggaacatatatcactttgcggggtgtaattggtgtgtcaaaccagacggtgactatgtaggtgccgtggtaaaaaaatttggcactagcgagatatgtattaccaaaaaatattagagg

SEQ ID NO: 333076 - DNA, 2530 bp, Homo sapiens
ggcgggggcgcgggcggggcggcggttccgagtcaggcgcgcgcgggcagggtccccattgcctgctgcgcacccggacgtgcggctcccctcggcctcctcgccatggacgcggacgactcccgggcccccaagggctccttgcggaagttcctggagcacctctccggggccggcaaggccatcggcgtgctgaccagcggcggggatgctcaaggtatgaacgctgccgtccgtgccgtggtgcgcatgggtatctacgtgggggccaaggtgtacttcatctacgagggctaccagggcatggtggacggaggctcaaacatcgcagaggccgactgggagagtgtctccagcatcctgcaagtgggcgggacgatcattggcagtgcgcggtgccaggccttccgcacgcgggaaggccgcctgaaggctgcttgcaacctgctgcagcgcggcatcaccaacctgtgtgtgatcggcggggacgggagcctcaccggggccaacctcttccggaaggagtggagtgggctgctggaggagctggccaggaacggccagatcgataaggaggccgtgcagaagtacgcctacctcaacgtggtgggcatggtgggctccatcgacaatgatttctgcggcaccgacatgaccatcggcacggactccgccctgcacaggatcatcgaggtcgtcgacgccatcatgaccacggcccagagccaccagaggaccttcgttctggaggtgatgggacgacactgtgggtacctggccctggtgagtgccttggcctgcggtgcggactgggtgttccttccagaatctccaccagaggaaggctgggaggagcagatgtgtgtcaaactctcggagaaccgtgcccggaaaaaaaggctgaatattattattgtggctgaaggagcaattgatacccaaaataaacccatcacctctgagaaaatcaaagagcttgtcgtcacgcagctgggctatgacacacgtgtgaccatcctcgggcacgtgcagagaggagggaccccttcggcattcgacaggatcttggccagccgcatgggagtggaggcagtcatcgccttgctagaggccaccccggacaccccagcttgcgtcgtgtcactgaacgggaaccacgccgtgcgcctgccgctgatggagtgcgtgcagatgactcaggatgtgcagaaggcgatggacgagaggagatttcaagatgcggttcgactccgagggaggagctttgcgggcaacctgaacacctacaagcgacttgccatcaagctgccggatgatcagatcccaaagaccaattgcaacgtagctgtcatcaacgtgggggcacccgcggctgggatgaacgcggccgtacgctcagctgtgcgcgtgggcattgccgacggccacaggatgctcgccatctatgatggctttgacggcttcgccaagggccagatcaaagaaatcggctggacagatgtcgggggctggaccggccaaggaggctccattcttgggacaaaacgcgttctcccggggaagtacttggaagagatcgccacacagatgcgcacgcacagcatcaacgcgctgctgatcatcggtggattcgagacctgcgaccgcatcaagcagtccgccagcggaaccaagcggcgcgtgttcatcatcgagaccatgggcggctactgtggctacctggccaacatgggggggctcgcggccggagctgatgccgcatacattttcgaagagcccttcgacatcagggatctgcagtccaacgtggagcacctgacggagaaaatgaagaccaccatccagagaggccttgtgctcagaaatgagagctgcagtgaaaactacaccaccgacttcatttaccagctgtattcagaagagggcaaaggcgtgtttgactgcaggaagaacgtgctgggtcacatgcagcagggtggggcaccctctccatttgatagaaactttggaaccaaaatctctgccagagctatggagtggatcactgcaaaactcaaggaggcccggggcagaggaaaaaaatttaccaccgatgattccatttgtgtgctgggaataagcaaaagaaacgttatttttcaacctgtggcagagctgaagaagcaaacggattttgagcacaggattcccaaagaacagtggtggctcaagctacggcccctcatgaaaatcctggccaagtacaaggccagctatgacgtgtcggactcaggccagctggaacatgtgcagccctggagtgtctgacccagtcccgcctgcatgtgcctgcagccaccgtggactgtctgtttttgtaacacttaagttattttatcagcactttatgcacgtattattgacattaatacctaatcggcgagtgcccatctgccccaccagctccagtgcgtgctgtctgtggagtgtgtctcatgctttcagatgtgcatatgagcagaattaattaaacatttgcctatgactccaa

SEQ ID NO: 333077 - DNA, 2537 bp, Homo sapiens
ttaaggaagttcacctccagatgtactcagagggcctggtcttagctgccacagatttacaaacccttacagtatgaacgctgccgtccgtgccgtggtgcgcatgggtatctacgtgggggccaaggtgtacttcatctacgagggctaccagggcatggtggacggaggctcaaacatcgcagaggccgactgggagagtgtctccagcatcctgcaagtgggcgggacgatcattggcagtgcgcggtgccaggccttccgcacgcgggaaggccgcctgaaggctgcttgcaacctgctgcagcgcggcatcaccaacctgtgtgtgatcggcggggacgggagcctcaccggggccaacctcttccggaaggagtggagtgggctgctggaggagctggccaggaacggccagatcgataaggaggccgtgcagaagtacgcctacctcaacgtggtgggcatggtgggctccatcgacaatgatttctgcggcaccgacatgaccatcggcacggactccgccctgcacaggatcatcgaggtcgtcgacgccatcatgaccacggcccagagccaccagaggaccttcgttctggaggtgatgggacgacactgtgggtacctggccctggtgagtgccttggcctgcggtgcggactgggtgttccttccagaatctccaccagaggaaggctgggaggagcagatgtgtgtcaaactctcggagaaccgtgcccggaaaaaaaggctgaatattattattgtggctgaaggagcaattgatacccaaaataaacccatcacctctgagaaaatcaaagagcttgtcgtcacgcagctgggctatgacacacgtgtgaccatcctcgggcacgtgcagagaggagggaccccttcggcattcgacaggatcttggccagccgcatgggagtggaggcagtcatcgccttgctagaggccaccccggacaccccagcttgcgtcgtgtcactgaacgggaaccacgccgtgcgcctgccgctgatggagtgcgtgcagatgactcaggatgtgcagaaggcgatggacgagaggagatttcaagatgcggttcgactccgagggaggagctttgcgggcaacctgaacacctacaagcgacttgccatcaagctgccggatgatcagatcccaaagaccaattgcaacgtagctgtcatcaacgtgggggcacccgcggctgggatgaacgcggccgtacgctcagctgtgcgcgtgggcattgccgacggccacaggatgctcgccatctatgatggctttgacggcttcgccaagggccagatcaaagaaatcggctggacagatgtcgggggctggaccggccaaggaggctccattcttgggacaaaacgcgttctcccggggaagtacttggaagagatcgccacacagatgcgcacgcacagcatcaacgcgctgctgatcatcggtggattcgaggcctacctgggactcctggagctgtcagccgcccgggagaagcacgaggagttctgtgtccccatggtcatggttcccgctactgtgtccaacaatgtgccgggttccgatttcagcatcggggcagacaccgccctgaacactatcaccgacacctgcgaccgcatcaagcagtccgccagcggaaccaagcggcgcgtgttcatcatcgagaccatgggcggctactgtggctacctggccaacatgggggggctcgcggccggagctgatgccgcatacattttcgaagagcccttcgacatcagggatctgcagtccaacgtggagcacctgacggagaaaatgaagaccaccatccagagaggccttgtgctcagaaatgagagctgcagtgaaaactacaccaccgacttcatttaccagctgtattcagaagagggcaaaggcgtgtttgactgcaggaagaacgtgctgggtcacatgcagcagggtggggcaccctctccatttgatagaaactttggaaccaaaatctctgccagagctatggagtggatcactgcaaaactcaaggaggcccggggcagaggaaaaaaatttaccaccgatgattccatttgtgtgctgggaataagcaaaagaaacgttatttttcaacctgtggcagagctgaagaagcaaacggattttgagcacaggattcccaaagaacagtggtggctcaagctacggcccctcatgaaaatcctggccaagtacaaggccagctatgacgtgtcggactcaggccagctggaacatgtgcagccctggagtgtctgacccagtcccgcctgcatgtgcctgcagccaccgtggactgtctgtttttgtaacacttaagttattttatcagcactttatgcacgtattattgacattaatacctaatcggcgagtgcccatctgccccaccagctccagtgcgtgctgtctgtggagtgtgtctcatgctttcagatgtgcatatgagcagaattaattaaacatttgcctatgactccaa

SEQ ID NO: 333078 - DNA, 2799 bp, Homo sapiens
ggcgggggcgcgggcggggcggcggttccgagtcaggcgcgcgcgggcagggtccccattgcctgctgcgcacccggacgtgcggctcccctcggcctcctcgccatggacgcggacgactcccgggcccccaagggctccttgcggaagttcctggagcacctctccggggccggcaaggccatcggcgtgctgaccagcggcggggatgctcaagggctgggttctcagagaaagaaaacgtgatgcagcagaggatgggattgaagaaacaggagagtgaagtggaaatagcctggcccgcgtgacttaaaccggcccggagatgtgcgggtatgaacgctgccgtccgtgccgtggtgcgcatgggtatctacgtgggggccaaggtgtacttcatctacgagggctaccagggcatggtggacggaggctcaaacatcgcagaggccgactgggagagtgtctccagcatcctgcaagtgggcgggacgatcattggcagtgcgcggtgccaggccttccgcacgcgggaaggccgcctgaaggctgcttgcaacctgctgcagcgcggcatcaccaacctgtgtgtgatcggcggggacgggagcctcaccggggccaacctcttccggaaggagtggagtgggctgctggaggagctggccaggaacggccagatcgataaggaggccgtgcagaagtacgcctacctcaacgtggtgggcatggtgggctccatcgacaatgatttctgcggcaccgacatgaccatcggcacggactccgccctgcacaggatcatcgaggtcgtcgacgccatcatgaccacggcccagagccaccagaggaccttcgttctggaggtgatgggacgacactgtgggtacctggccctggtgagtgccttggcctgcggtgcggactgggtgttccttccagaatctccaccagaggaaggctgggaggagcagatgtgtgtcaaactctcggagaaccgtgcccggaaaaaaaggctgaatattattattgtggctgaaggagcaattgatacccaaaataaacccatcacctctgagaaaatcaaagagcttgtcgtcacgcagctgggctatgacacacgtgtgaccatcctcgggcacgtgcagagaggagggaccccttcggcattcgacaggatcttggccagccgcatgggagtggaggcagtcatcgccttgctagaggccaccccggacaccccagcttgcgtcgtgtcactgaacgggaaccacgccgtgcgcctgccgctgatggagtgcgtgcagatgactcaggatgtgcagaaggcgatggacgagaggagatttcaagatgcggttcgactccgagggaggagctttgcgggcaacctgaacacctacaagcgacttgccatcaagctgccggatgatcagatcccaaagaccaattgcaacgtagctgtcatcaacgtgggggcacccgcggctgggatgaacgcggccgtacgctcagctgtgcgcgtgggcattgccgacggccacaggatgctcgccatctatgatggctttgacggcttcgccaagggccagatcaaagaaatcggctggacagatgtcgggggctggaccggccaaggaggctccattcttgggacaaaacgcgttctcccggggaagtacttggaagagatcgccacacagatgcgcacgcacagcatcaacgcgctgctgatcatcggtggattcgaggcctacctgggactcctggagctgtcagccgcccgggagaagcacgaggagttctgtgtccccatggtcatggttcccgctactgtgtccaacaatgtgccgggttccgatttcagcatcggggcagacaccgccctgaacactatcaccgacacctgcgaccgcatcaagcagtccgccagcggaaccaagcggcgcgtgttcatcatcgagaccatgggcggctactgtggctacctggccaacatgggggggctcgcggccggagctgatgccgcatacattttcgaagagcccttcgacatcagggatctgcagtccaacgtggagcacctgacggagaaaatgaagaccaccatccagagaggccttgtgctcagaaatgagagctgcagtgaaaactacaccaccgacttcatttaccagctgtattcagaagagggcaaaggcgtgtttgactgcaggaagaacgtgctgggtcacatgcagcagggtggggcaccctctccatttgatagaaactttggaaccaaaatctctgccagagctatggagtggatcactgcaaaactcaaggaggcccggggcagaggaaaaaaatttaccaccgatgattccatttgtgtgctgggaataagcaaaagaaacgttatttttcaacctgtggcagagctgaagaagcaaacggattttgagcacaggattcccaaagaacagtggtggctcaagctacggcccctcatgaaaatcctggccaagtacaaggccagctatgacgtgtcggactcaggccagctggaacatgtgcagccctggagtgtctgacccagtcccgcctgcatgtgcctgcagccaccgtggactgtctgtttttgtaacacttaagttattttatcagcactttatgcacgtattattgacattaatacctaatcggcgagtgcccatctgccccaccagctccagtgcgtgctgtctgtggagtgtgtctcatgctttcagatgtgcatatgagcagaattaattaaacatttgcctatgactccaa

SEQ ID NO: 333079 - DNA, 2416 bp, Homo sapiens
tcggctaggtacgaggctgggtttggctaccagggcatggtggacggaggctcaaacatcgcagaggccgactgggagagtgtctccagcatcctgcaagtgggcgggacgatcattggcagtgcgcggtgccaggccttccgcacgcgggaaggccgcctgaaggctgcttgcaacctgctgcagcgcggcatcaccaacctgtgtgtgatcggcggggacgggagcctcaccggggccaacctcttccggaaggagtggagtgggctgctggaggagctggccaggaacggccagatcgataaggaggccgtgcagaagtacgcctacctcaacgtggtgggcatggtgggctccatcgacaatgatttctgcggcaccgacatgaccatcggcacggactccgccctgcacaggatcatcgaggtcgtcgacgccatcatgaccacggcccagagccaccagaggaccttcgttctggaggtgatgggacgacactgtgggtacctggccctggtgagtgccttggcctgcggtgcggactgggtgttccttccagaatctccaccagaggaaggctgggaggagcagatgtgtgtcaaactctcggagaaccgtgcccggaaaaaaaggctgaatattattattgtggctgaaggagcaattgatacccaaaataaacccatcacctctgagaaaatcaaagagcttgtcgtcacgcagctgggctatgacacacgtgtgaccatcctcgggcacgtgcagagaggagggaccccttcggcattcgacaggatcttggccagccgcatgggagtggaggcagtcatcgccttgctagaggccaccccggacaccccagcttgcgtcgtgtcactgaacgggaaccacgccgtgcgcctgccgctgatggagtgcgtgcagatgactcaggatgtgcagaaggcgatggacgagaggagatttcaagatgcggttcgactccgagggaggagctttgcgggcaacctgaacacctacaagcgacttgccatcaagctgccggatgatcagatcccaaagaccaattgcaacgtagctgtcatcaacgtgggggcacccgcggctgggatgaacgcggccgtacgctcagctgtgcgcgtgggcattgccgacggccacaggatgctcgccatctatgatggctttgacggcttcgccaagggccagatcaaagaaatcggctggacagatgtcgggggctggaccggccaaggaggctccattcttgggacaaaacgcgttctcccggggaagtacttggaagagatcgccacacagatgcgcacgcacagcatcaacgcgctgctgatcatcggtggattcgaggcctacctgggactcctggagctgtcagccgcccgggagaagcacgaggagttctgtgtccccatggtcatggttcccgctactgtgtccaacaatgtgccgggttccgatttcagcatcggggcagacaccgccctgaacactatcaccgacacctgcgaccgcatcaagcagtccgccagcggaaccaagcggcgcgtgttcatcatcgagaccatgggcggctactgtggctacctggccaacatgggggggctcgcggccggagctgatgccgcatacattttcgaagagcccttcgacatcagggatctgcagtccaacgtggagcacctgacggagaaaatgaagaccaccatccagagaggccttgtgctcagaaatgagagctgcagtgaaaactacaccaccgacttcatttaccagctgtattcagaagagggcaaaggcgtgtttgactgcaggaagaacgtgctgggtcacatgcagcagggtggggcaccctctccatttgatagaaactttggaaccaaaatctctgccagagctatggagtggatcactgcaaaactcaaggaggcccggggcagaggaaaaaaatttaccaccgatgattccatttgtgtgctgggaataagcaaaagaaacgttatttttcaacctgtggcagagctgaagaagcaaacggattttgagcacaggattcccaaagaacagtggtggctcaagctacggcccctcatgaaaatcctggccaagtacaaggccagctatgacgtgtcggactcaggccagctggaacatgtgcagccctggagtgtctgacccagtcccgcctgcatgtgcctgcagccaccgtggactgtctgtttttgtaacacttaagttattttatcagcactttatgcacgtattattgacattaatacctaatcggcgagtgcccatctgccccaccagctccagtgcgtgctgtctgtggagtgtgtctcatgctttcagatgtgcatatgagcagaattaattaaacatttgcctatgactccaa

SEQ ID NO: 333080 - DNA, 2638 bp, Homo sapiens
ggcgggggcgcgggcggggcggcggttccgagtcaggcgcgcgcgggcagggtccccattgcctgctgcgcacccggacgtgcggctcccctcggcctcctcgccatggacgcggacgactcccgggcccccaagggctccttgcggaagttcctggagcacctctccggggccggcaaggccatcggcgtgctgaccagcggcggggatgctcaaggtatgaacgctgccgtccgtgccgtggtgcgcatgggtatctacgtgggggccaaggtgtacttcatctacgagggctaccagggcatggtggacggaggctcaaacatcgcagaggccgactgggagagtgtctccagcatcctgcaagtgggcgggacgatcattggcagtgcgcggtgccaggccttccgcacgcgggaaggccgcctgaaggctgcttgcaacctgctgcagcgcggcatcaccaacctgtgtgtgatcggcggggacgggagcctcaccggggccaacctcttccggaaggagtggagtgggctgctggaggagctggccaggaacggccagatcgataaggaggccgtgcagaagtacgcctacctcaacgtggtgggcatggtgggctccatcgacaatgatttctgcggcaccgacatgaccatcggcacggactccgccctgcacaggatcatcgaggtcgtcgacgccatcatgaccacggcccagaggtacctggccctggtgagtgccttggcctgcggtgcggactgggtgttccttccagaatctccaccagaggaaggctgggaggagcagatgtgtgtcaaactctcggagaaccgtgcccggaaaaaaaggctgaatattattattgtggctgaaggagcaattgatacccaaaataaacccatcacctctgagaaaatcaaagagcttgtcgtcacgcagctgggctatgacacacgtgtgaccatcctcgggcacgtgcagagaggagggaccccttcggcattcgacaggatcttggccagccgcatgggagtggaggcagtcatcgccttgctagaggccaccccggacaccccagcttgcgtcgtgtcactgaacgggaaccacgccgtgcgcctgccgctgatggagtgcgtgcagatgactcaggatgtgcagaaggcgatggacgagaggagatttcaagatgcggttcgactccgagggaggagctttgcgggcaacctgaacacctacaagcgacttgccatcaagctgccggatgatcagatcccaaagaccaattgcaacgtagctgtcatcaacgtgggggcacccgcggctgggatgaacgcggccgtacgctcagctgtgcgcgtgggcattgccgacggccacaggatgctcgccatctatgatggctttgacggcttcgccaagggccagatcaaagaaatcggctggacagatgtcgggggctggaccggccaaggaggctccattcttgggacaaaacgcgttctcccggggaagtacttggaagagatcgccacacagatgcgcacgcacagcatcaacgcgctgctgatcatcggtggattcgaggcctacctgggactcctggagctgtcagccgcccgggagaagcacgaggagttctgtgtccccatggtcatggttcccgctactgtgtccaacaatgtgccgggttccgatttcagcatcggggcagacaccgccctgaacactatcaccgacacctgcgaccgcatcaagcagtccgccagcggaaccaagcggcgcgtgttcatcatcgagaccatgggcggctactgtggctacctggccaacatgggggggctcgcggccggagctgatgccgcatacattttcgaagagcccttcgacatcagggatctgcagtccaacgtggagcacctgacggagaaaatgaagaccaccatccagagaggccttgtgctcagaaatgagagctgcagtgaaaactacaccaccgacttcatttaccagctgtattcagaagagggcaaaggcgtgtttgactgcaggaagaacgtgctgggtcacatgcagcagggtggggcaccctctccatttgatagaaactttggaaccaaaatctctgccagagctatggagtggatcactgcaaaactcaaggaggcccggggcagaggaaaaaaatttaccaccgatgattccatttgtgtgctgggaataagcaaaagaaacgttatttttcaacctgtggcagagctgaagaagcaaacggattttgagcacaggattcccaaagaacagtggtggctcaagctacggcccctcatgaaaatcctggccaagtacaaggccagctatgacgtgtcggactcaggccagctggaacatgtgcagccctggagtgtctgacccagtcccgcctgcatgtgcctgcagccaccgtggactgtctgtttttgtaacacttaagttattttatcagcactttatgcacgtattattgacattaatacctaatcggcgagtgcccatctgccccaccagctccagtgcgtgctgtctgtggagtgtgtctcatgctttcagatgtgcatatgagcagaattaattaaacatttgcctatgactccaa

SEQ ID NO: 333081 - DNA, 2353 bp, Homo sapiens
acttgtttccgtgggagagatccagccgtggctgtcgacagcagctgccgactgtgcccaatagagaaggtatctgggaaagagcccagcacggggccggggagtgtgagtgtgtcctggcacaggcaggcagaaggtgtccaacgtgcaactggagagcgcagaggtggctcaagtccccttcctcgcaggagtctggaaggctactgcatagcgtttgccttagtagaaaatggaccatttttgaagcctaggtccctgcaggcctcctggctaactcggctgtcaaagccccttttctctgctttctgagctgtttccaggactgagtgggtgctccctctgtttctctgctttctgagctgtgtccggggctccctctgtttctcttccagccaccagaggaccttcgttctggaggtgatgggacgacactgtgggtacctggccctggtgagtgccttggcctgcggtgcggactgggtgttccttccagaatctccaccagaggaaggctgggaggagcagatgtgtgtcaaactctcggagaaccgtgcccggaaaaaaaggctgaatattattattgtggctgaaggagcaattgatacccaaaataaacccatcacctctgagaaaatcaaagagcttgtcgtcacgcagctgggctatgacacacgtgtgaccatcctcgggcacgtgcagagaggagggaccccttcggcattcgacaggatcttggccagccgcatgggagtggaggcagtcatcgccttgctagaggccaccccggacaccccagcttgcgtcgtgtcactgaacgggaaccacgccgtgcgcctgccgctgatggagtgcgtgcagatgactcaggatgtgcagaaggcgatggacgagaggagatttcaagatgcggttcgactccgagggaggagctttgcgggcaacctgaacacctacaagcgacttgccatcaagctgccggatgatcagatcccaaagaccaattgcaacgtagctgtcatcaacgtgggggcacccgcggctgggatgaacgcggccgtacgctcagctgtgcgcgtgggcattgccgacggccacaggatgctcgccatctatgatggctttgacggcttcgccaagggccagatcaaagaaatcggctggacagatgtcgggggctggaccggccaaggaggctccattcttgggacaaaacgcgttctcccggggaagtacttggaagagatcgccacacagatgcgcacgcacagcatcaacgcgctgctgatcatcggtggattcgaggcctacctgggactcctggagctgtcagccgcccgggagaagcacgaggagttctgtgtccccatggtcatggttcccgctactgtgtccaacaatgtgccgggttccgatttcagcatcggggcagacaccgccctgaacactatcaccgacacctgcgaccgcatcaagcagtccgccagcggaaccaagcggcgcgtgttcatcatcgagaccatgggcggctactgtggctacctggccaacatgggggggctcgcggccggagctgatgccgcatacattttcgaagagcccttcgacatcagggatctgcagtccaacgtggagcacctgacggagaaaatgaagaccaccatccagagaggccttgtgctcagaaatgagagctgcagtgaaaactacaccaccgacttcatttaccagctgtattcagaagagggcaaaggcgtgtttgactgcaggaagaacgtgctgggtcacatgcagcagggtggggcaccctctccatttgatagaaactttggaaccaaaatctctgccagagctatggagtggatcactgcaaaactcaaggaggcccggggcagaggaaaaaaatttaccaccgatgattccatttgtgtgctgggaataagcaaaagaaacgttatttttcaacctgtggcagagctgaagaagcaaacggattttgagcacaggattcccaaagaacagtggtggctcaagctacggcccctcatgaaaatcctggccaagtacaaggccagctatgacgtgtcggactcaggccagctggaacatgtgcagccctggagtgtctgacccagtcccgcctgcatgtgcctgcagccaccgtggactgtctgtttttgtaacacttaagttattttatcagcactttatgcacgtattattgacattaatacctaatcggcgagtgcccatctgccccaccagctccagtgcgtgctgtctgtggagtgtgtctcatgctttcagatgtgcatatgagcagaattaattaaacatttgcctatgactccaa

SEQ ID NO: 333082 - DNA, 2125 bp, Homo sapiens
ggcgggggcgcgggcggggcggcggttccgagtcaggcgcgcgcgggcagggtccccattgcctgctgcgcacccggacgtgcggctcccctcggcctcctcgccatggacgcggacgactcccgggcccccaagggctccttgcggaagttcctggagcacctctccggggccggcaaggccatcggcgtgctgaccagcggcggggatgctcaaggtatgaacgctgccgtccgtgccgtggtgcgcatgggtatctacgtgggggccaaggtgtacttcatctacgagggctaccagggcatggtggacggaggctcaaacatcgcagaggccgactgggagagtgtctccagcatcctgcaagtgggcgggacgatcattggcagtgcgcggtgccaggccttccgcacgcgggaaggccgcctgaaggctgcttgcaacctgctgcagcgcggcatcaccaacctgtgtgtgatcggcggggacgggagcctcaccggggccaacctcttccggaaggagtggagtgggctgctggaggagctggccaggaacggccagatcgataaggaggccgtgcagaagtacgcctacctcaacgtggtgggcatggtgggctccatcgacaatgatttctgcggcaccgacatgaccatcggcacggactccgccctgcacaggatcatcgaggtcgtcgacgccatcatgaccacggcccagagccaccagaggaccttcgttctggaggtgatgggacgacactgtgggtacctggccctggtgagtgccttggcctgcggtgcggactgggtgttccttccagaatctccaccagaggaaggctgggaggagcagatgtgtgtcaaactctcggagaaccgtgcccggaaaaaaaggctgaatattattattgtggctgaaggagcaattgatacccaaaataaacccatcacctctgagaaaatcaaagagcttgtcgtcacgcagctgggctatgacacacgtgtgaccatcctcgggcacgtgcagagaggagggaccccttcggcattcgacaggatcttggccagccgcatgggagtggaggcagtcatcgccttgctagaggccaccccggacaccccagcttgcgtcgtgtcactgaacgggaaccacgccgtgcgcctgccgctgatggagtgcgtgcagatgactcaggatgtgcagaaggcgatggacgagaggagatttcaagatgcggttcgactccgagggaggagctttgcgggcaacctgaacacctacaagcgacttgccatcaagctgccggatgatcagatcccaaagaccaattgcaacgtagctgtcatcaacgtgggggcacccgcggctgggatgaacgcggccgtacgctcagctgtgcgcgtgggcattgccgacggccacaggatgctcgccatctatgatggctttgacggcttcgccaagggccagatcaaagaaatcggctggacagatgtcgggggctggaccggccaaggaggctccattcttgggacaaaacgcgttctcccggggaagtacttggaagagatcgccacacagatgcgcacgcacagcatcaacgcgctgctgatcatcggtggattcgaggcctacctgggactcctggagctgtcagccgcccgggagaagcacgaggagttctgtgtccccatggtcatggttcccgctactgtgtccaacaatgtgccgggttccgatttcagcatcggggcagacaccgccctgaacactatcaccgacgtaagtccgtgtgcgccctgccaggcgggcgccggctgacgctaaccccggggccccggcccttttttatctaccagtgcgctagaaatagccttttacaaataccctgaatgagagcttctcgttctttttttcccccagaaaagtatgttttaagactctgaaaatttttgaactcactcccagaaagttttaccacctctttttctgtgtggccaccagggggacgtagtgtggccgagactccaggggtgcccgtgagcacccgaggcgctgaggagggctgggtcgcagtctcctgtgattgtaccagcattaaaaatcgctttgtgtgtga

SEQ ID NO: 333083 - DNA, 1865 bp, Homo sapiens
ggcgggggcgcgggcggggcggcggttccgagtcaggcgcgcgcgggcagggtccccattgcctgctgcgcacccggacgtgcggctcccctcggcctcctcgccatggacgcggacgactcccgggcccccaagggctccttgcggaagttcctggagcacctctccggggccggcaaggccatcggcgtgctgaccagcggcggggatgctcaaggtatgaacgctgccgtccgtgccgtggtgcgcatgggtatctacgtgggggccaaggtgtacttcatctacgagggctaccagggcatggtggacggaggctcaaacatcgcagaggccgactgggagagtgtctccagcatcctgcaagtgggcgggacgatcattggcagtgcgcggtgccaggccttccgcacgcgggaaggccgcctgaaggctgcttgcaacctgctgcagcgcggcatcaccaacctgtgtgtgatcggcggggacgggagcctcaccggggccaacctcttccggaaggagtggagtgggctgctggaggagctggccaggaacggccagatcgataaggaggccgtgcagaagtacgcctacctcaacgtggtgggcatggtgggctccatcgacaatgatttctgcggcaccgacatgaccatcggcacggactccgccctgcacaggatcatcgaggtcgtcgacgccatcatgaccacggcccagagccaccagaggaccttcgttctggaggtgatgggacgacactgtgggtacctggccctggtgagtgccttggcctgcggtgcggactgggtgttccttccagaatctccaccagaggaaggctgggaggagcagatgtgtgtcaaactctcggagaaccgtgcccggaaaaaaaggctgaatattattattgtggctgaaggagcaattgatacccaaaataaacccatcacctctgagaaaatcaaagagcttgtcgtcacgcagctgggctatgacacacgtgtgaccatcctcgggcacgtgcagagaggagggaccccttcggcattcgacaggatcttggccagccgcatgggagtggaggcagtcatcgccttgctagaggccaccccggacaccccagcttgcgtcgtgtcactgaacgggaaccacgccgtgcgcctgccgctgatggagtgcgtgcagatgactcaggatgtgcagaaggcgatggacgagaggagatttcaagatgcggttcgactccgagggaggagctttgcgggcaacctgaacacctacaagcgacttgccatcaagctgccggatgatcagatcccaaagaccaattgcaacgtagctgtcatcaacgtgggggcacccgcggctgggatgaacgcggccgtacgctcagctgtgcgcgtgggcattgccgacggccacaggatgctcgccatctatgatggctttgacggcttcgccaagggccagatcaaagaaatcggctggacagatgtcgggggctggaccggccaaggaggctccattcttgggacaaaacgcgttctcccggggaagtacttggaagagatcgccacacagatgcgcacgcacagcatcaacgcgctgctgatcatcggtggattcgaggcttacaagagtgcgtgcgacatggccgaggcacgaggccgccaccaggagctttgcatccccctgtgtgtggtgccggccacgattagcaacaatgtcccaggcacagaaataagcctgggctccgacactggcctgaatgctgaggtgtgagccaccgcgcccagcccgttattaaatatttttacccaacaattttaacctattaagagctttaaaaaaatctgatt

SEQ ID NO: 333084 - DNA, 1416 bp, Homo sapiens
ggcgggggcgcgggcggggcggcggttccgagtcaggcgcgcgcgggcagggtccccattgcctgctgcgcacccggacgtgcggctcccctcggcctcctcgccatggacgcggacgactcccgggcccccaagggctccttgcggaagttcctggagcacctctccggggccggcaaggccatcggcgtgctgaccagcggcggggatgctcaaggtatgaacgctgccgtccgtgccgtggtgcgcatgggtatctacgtgggggccaaggtgtacttcatctacgagggctaccagggcatggtggacggaggctcaaacatcgcagaggccgactgggagagtgtctccagcatcctgcaagtgggcgggacgatcattggcagtgcgcggtgccaggccttccgcacgcgggaaggccgcctgaaggctgcttgcaacctgctgcagcgcggcatcaccaacctgtgtgtgatcggcggggacgggagcctcaccggggccaacctcttccggaaggagtggagtgggctgctggaggagctggccaggaacggccagatcgataaggaggccgtgcagaagtacgcctacctcaacgtggtgggcatggtgggctccatcgacaatgatttctgcggcaccgacatgaccatcggcacggactccgccctgcacaggatcatcgaggtcgtcgacgccatcatgaccacggcccagagccaccagaggaccttcgttctggaggtgatgggacgacactgtgggtacctggccctggtgagtgccttggcctgcggtgcggactgggtgttccttccagaatctccaccagaggaaggctgggaggagcagatgtgtgtcaaactctcggagaaccgtgcccggaaaaaaaggctgaatattattattgtggctgaaggagcaattgatacccaaaataaacccatcacctctgagaaaatcaaagagcttgtcgtcacgcagctgggctatgacacacgtgtgaccatcctcgggcacgtgcagagaggagggaccccttcggcattcgacaggatcttggccagccgcatgggagtggaggcagtcatcgccttgctagaggccaccccggacaccccagcttgcgtcgtgtcactgaacgggaaccacgccgtgcgcctgccgctgatggagtgcgtgcagatgactcaggatgtgcagaaggcgatggacgagaggagatttcaagatgcggttcgactccgagggaggagctttgcgggcaacctgaacacctacaagcgacttgccatcaagctgccggatgatcagatcccaaagacccattggcaacgtagctgtcatcaacgtgggggtccggctgtctaatcaagcttatagataccttgacctcgaggggggcccggt

SEQ ID NO: 333085 - DNA, 751 bp, Homo sapiens
cgcggcgcctgatgtcgaaggtccaacgtggagcacctgacggagaaaatgaagaccaccatccagagaggccttgtgctcagaaatgagagctgcagtgaaaactacaccaccgacttcatttaccagctgtattcagaagagggcaaaggcgtgtttgactgcaggaagaacgtgctgggtcacatgcagcagggtggggcaccctctccatttgatagaaactttggaaccaaaatctctgccagagctatggagtggatcactgcaaaactcaaggaggcccggggcagaggaaaaaaatttaccaccgatgattccatttgtgtgctgggaataagcaaaagaaacgttatttttcaacctgtggcagagctgaagaagcaaacggattttgagcacaggattcccaaagaacagtggtggctcaagctacggcccctcatgaaaatcctggccaagtacaaggccagctatgacgtgtcggactcaggccagctggaacatgtgcagccctggagtgtctgacccagtcccgcctgcatgtgcctgcagccaccgtggactgtctgtttttgtaacacttaagttattttatcagcactttatgcacgtattattgacattaatacctaatcggcgagtgcccatctgccccaccagctccagtgcgtgctgtctgtggagtgtgtctcatgctttcagatgtgcatatgagcagaattaattaaacatttgcctatgactccaa

SEQ ID NO: 333086 - DNA, 726 bp, Homo sapiens
tgtagttttcactgcagctctcatttctgagcacaaggcctctctggatggtggtcagaaatgagagctgcagtgaaaactacaccaccgacttcatttaccagctgtattcagaagagggcaaaggcgtgtttgactgcaggaagaacgtgctgggtcacatgcagcagggtggggcaccctctccatttgatagaaactttggaaccaaaatctctgccagagctatggagtggatcactgcaaaactcaaggaggcccggggcagaggaaaaaaatttaccaccgatgattccatttgtgtgctgggaataagcaaaagaaacgttatttttcaacctgtggcagagctgaagaagcaaacggattttgagcacaggattcccaaagaacagtggtggctcaagctacggcccctcatgaaaatcctggccaagtacaaggccagctatgacgtgtcggactcaggccagctggaacatgtgcagccctggagtgtctgacccagtcccgcctgcatgtgcctgcagccaccgtggactgtctgtttttgtaacacttaagttattttatcagcactttatgcacgtattattgacattaatacctaatcggcgagtgcccatctgccccaccagctccagtgcgtgctgtctgtggagtgtgtctcatgctttcagatgtgcatatgagcagaattaattaaacatttgcctatgactccaa

SEQ ID NO: 333087 - DNA, 505 bp, Homo sapiens
caggtggttgtgggtcggctttatcatctagttgattcagccgaccctacaaaccctgtgtttctggcaagaccgctcgctgtgctggccaggcggaggcatctcccgccagtgactgcaggcctcactgctgtctcctcttacctccacaggcacaggattcccaaagaacagtggtggctcaagctacggcccctcatgaaaatcctggccaagtacaaggccagctatgacgtgtcggactcaggccagctggaacatgtgcagccctggagtgtctgacccagtcccgcctgcatgtgcctgcagccaccgtggactgtctgtttttgtaacacttaagttattttatcagcactttatgcacgtattattgacattaatacctaatcggcgagtgcccatctgccccaccagctccagtgcgtgctgtctgtggagtgtgtctcatgctttcagatgtgcatatgagcagaattaattaaacatttgcctatgactccaa

SEQ ID NO: 333088 - DNA, 300 bp, Homo sapiens
tggggttaggatgcgttcgcatctgtttgcacttgtgaaaagaaaccgcaggaggatgaatgcattggcaacagtggggagctgagtcggtgagccacaggggagttctcggtgctgaaactattctggatgatgctgtgatgacagatacatgactccatttcccaaaagacattgaactttacagcacagggagccttaatgtgtgcgctttttttgttttttttgagacggagtttcgctcttgttgcccaggctgtagtgtaactgctcaatctcggctccccacaacctccgcat

SEQ ID NO: 333089 - DNA, 880 bp, Homo sapiens
agctgaagggcgcgcggtgccgacagggagcttccttggctggcatggcggcgagcgcgctgcgaggcctgccagtggctggcggaggcgagagtagcgagagcgaggatgatggctgggagattgggtatctcgaccggacgtctcagaaattgaaaaggctattacccattgaagaaaagaaagaaaaatttaagaaagcaatgaccatcggagatgtttcattggtccaggagctcctagattctggcattagtgtagattccaactttcagtatggatggactccccttatgtatgctgctagtgttgccaatgcagagctggttcgggtccttttggacagaggtgctaatgcaagctttgagaaggataagcaaagtattttgataactgcatgttctgctcatggctcagaggaacagatcttgaagtgtgtagaactactactttcaagaaatgctgatccaaatgttgcttgtaggagacttatgaccccaatcatgtatgctgctcgagatggtcacacccaggttgttgctctccttgttgctcatggagcagaagttaatacccaggatgagaatggttacactgctttaacgtgggcagcacgtcagggtcataaaaatatagttttgaagttgcttgaacttggagctaataaaatgctacaaaccaaagatggaaagatgccaagtgagattgcaaaaagaaacaaacatcatgagatcttcaacttactttcttttactttaaatccattggaaggaaaacttcaacagctaactaaagaagacactatttgtaacaatattgacaacagattctgatagagaaaaagatcacattttaggttcatatacatgttttagttcaa

SEQ ID NO: 333090 - DNA, 768 bp, Homo sapiens
agctgaagggcgcgcggtgccgacagggagcttccttggctggcatggcggcgagcgcgctgcgaggcctgccagtggctggcggaggcgagagtagcgagagcgaggatgatggctgggagattgggtatctcgaccggacgtctcagaaattgaaaaggctattacccattgaagaaaagaaagaaaaatttaagaaagcaatgaccatcggagatgtttcattggtccaggagctcctagattctggcattagtgtagattccaactttcagtatggatggactccccttatgtatgctgctagtgttgccaatgcagagctggttcgggtccttttggacagaggtgctaatgcaagctttgagaaggataagcaaagtattttgataactgcatgttctgctcatggctcagaggaacagatcttgaagtgtgtagaactactactttcaagaaatgctgatccaaatgttgcttgtaggctttaacgtgggcagcacgtcagggtcataaaaatatagttttgaagttgcttgaacttggagctaataaaatgctacaaaccaaagatggaaagatgccaagtgagattgcaaaaagaaacaaacatcatgagatcttcaacttactttcttttactttaaatccattggaaggaaaacttcaacagctaactaaagaagacactatttgtaacaatattgacaacagattctgatagagaaaaagatcacattttaggttcatatacatgttttagttcaa

SEQ ID NO: 333091 - DNA, 728 bp, Homo sapiens
agctgaagggcgcgcggtgccgacagggagcttccttggctggcatggcggcgagcgcgctgcgaggcctgccagtggctggcggaggcgagagtagcgagagcgaggatgatggctgggagattgggtatctcgaccggacgtctcagaaattgaaaaggctattacccattgaagaaaagaaagaaaaatttaagaaagcaatgaccatcggagatgtttcattggtccaggagctcctagattctggcattagtgtagattccaactttcagtatggatggactccccttatgtatgctgctagtgttgccaatgcagagctggttcgggtccttttggacagaggtgctaatgcaagctttgagaaggataagcaaagtattttgataactgcatgttctgctcatggctcagaggaacagatcttgaagtgtgtagaactactactttcaagaaatgctgatccaaatgttgcttgtaggctttaacgtgggcagcacgtcagggtcataaaaatatagttttgaagttgcttgaacttggagctaataaaatgctacaaaccaaagatggaaagatgccaagtgagattgcaaaaagaaacaaacatcatgaggaaaacttcaacagctaactaaagaagacactatttgtaacaatattgacaacagattctgatagagaaaaagatcacattttaggttcatatacatgttttagttcaa

SEQ ID NO: 333092 - DNA, 757 bp, Homo sapiens
agctgaagggcgcgcggtgccgacagggagcttccttggctggcatggcggcgagcgcgctgcgaggcctgccagtggctggcggaggcgagagtagcgagagcgaggatgatggctgggagattgggtatctcgaccggacgtctcagaaattgaaaaggctattacccattgaagaaaagaaagaaaaatttaagaaagcaatgaccatcggagatgtttcattggtccaggagctcctagattctgataagcaaagtattttgataactgcatgttctgctcatggctcagaggaacagatcttgaagtgtgtagaactactactttcaagaaatgctgatccaaatgttgcttgtaggagacttatgaccccaatcatgtatgctgctcgagatggtcacacccaggttgttgctctccttgttgctcatggagcagaagttaatacccaggatgagaatggttacactgctttaacgtgggcagcacgtcagggtcataaaaatatagttttgaagttgcttgaacttggagctaataaaatgctacaaaccaaagatggaaagatgccaagtgagattgcaaaaagaaacaaacatcatgagatcttcaacttactttcttttactttaaatccattggaaggaaaacttcaacagctaactaaagaagacactatttgtaacaatattgacaacagattctgatagagaaaaagatcacattttaggttcatatacatgttttagttcaa

SEQ ID NO: 333093 - DNA, 1046 bp, Homo sapiens
tcgagtgggcggatggacgcggctggagattggatagctcctattgcactgaaaggtgcattgcagtttgaggcccaggagtcagaagcttttctaggctgggacgtgggagggactgtgcagataattcaagaatgaggagagtctgacctggatatctgggagctctccctcctggcagcggaggcggggtattccggggtagaataccggtagagttcttagcttttctatctggattttatgtcagcgacacagcccgatggacagggcaaccccaaccaatccctgcaccctcccttccctccaccctcctgagaattacccacagaaccagggagacagacttgaaacccacgctgaaaccctcacctctgcctatacctccattcttagtctcaagcccccaccctggcagaagctgaggaacactgctcttgtgtagacagtagctctctctggtggggtggaatatttcctagggctactggctccaccgaggtgatgatgagaatggtctttgctttctgagtttgtttttccaactgtaaaatgtggatactatttcccagctgcttttcttgttgtgactatcaagagatggcactgtgttaatttatccattgattcaataaatactttttagcaccaagaatgagttaggactcagcagttctcagtccacactgttggaggtttctaaaatatactgaaacctgattcaatcccatgcttagcttggccgattaaatcagaatctctggggtggccctgggtgcccttaagggtcacaaagatgatctgatgtagactctgctctccaggaggttctgggcgtatttgccacggataatcctaatgtaaagtagaaagtgaaggacatgcagacagggagccctggaagtgcccgggtggtaagattgtctgtatttcacaaacaactggggtcaaagcaaggtgctgtgctatttatttatttttattttatttatttatttatttttgagacagagttttgctcttgttgcccaggctggagtgcaatg

SEQ ID NO: 333094 - DNA, 858 bp, Homo sapiens
cttgaactggacccctaccttttaccagagaaaaaaagtcaatttgagatgaaacaaagactttaatataagacctaaaactataaaatgtcatataagaaaacctagagaatacccttcttgacgtcagctttggcaaataattcataactaagtcctcaaaagcaatttcaaccaaaagaaaaatggataagttggacctgattaaattaaagggtttctgcacaataaaagaaactatcaacagggtaaacagacagagagaaaatatttgcaaactatgcatccaacagagatctaatatccactatctctaagaaacttgaacaaatcaacaagcaaaagatgaacagccctgttaagaagtgggcaaaaaacatgaacaggctcttctcagaagacatacatgtcgccaacaaacatatgaaaaactactcaaaatcacaagtcaggaaagaaatgcgaatgaaagccataatgaagtaccatcacacaccagtcagaatggctactattaaaaagtaaaaaaataacagatgttgacagggttgtggagaaaagggaatgcgtgttcattattggtgggaatgtaaactatttcagtgcctgtggaacgaaacttggagatatctcaaagaacttacaaaagaacgacgattcgacccagcaattccattactggctttatatccaaaggaaaataaattattctaccaaaaagacacatacattcatatgttcatcaaaacactattcacattaatgaggacatggaatcaatgtagatgtccatcagctatggactggataaagaaaatgtggtacaaacataacatggaatactatgcagccataaaa

SEQ ID NO: 333095 - DNA, 260 bp, Homo sapiens
tttgtctcaaaaaaaagtcattcaagtgactactccagaccagagaaagctgcaaattaacaaagggtgattctgggacaggcggaaatacatgtgggcactgggctggagtgatatcaccatgtctgagaatagcctcttctcagcagccccgaatcggaaatacatagttccagaagtcaaatacatcttgattttgatctcggctagactgcttacttttttttttttttttttaagctgtaaaatgagataatgcc

SEQ ID NO: 333096 - DNA, 811 bp, Homo sapiens
gactattcacaggcataatcataatgcaccatagcctcaaactcctgggctcaagcaatccaaaaggaggaaacttttaacttatgatcagtttctaccataaatcaagcaacttagaaaaaccttagaacagggtttctcaaaccaagcattgttagtatttggggttggttaagtctttgtttgtgggagcctatcctgtgcattgtaggatttctagcagcataattggcttatgcccacttgatgtcattagcaccactccccaccctacttccagttgtgacaacccaaaaatgtctccagacatagccaactgtccctgggtgttgcgagtataggaggcaaaattgcaccctgttgaaaaccaccaccttagatcatctaggttttacttttaggataagacacttgagggaaaggctgtgaaactgaacctctgttagaagcaacacacagtatcactgcaaaaagactaaaagaaataggtgatttggaaagaggaggcccaggattaaaatatgtttccaagaaagtcaaatcttacaggagactcttgacttcacatctgctgatccctttacccgataggacctagagcagccattataaatctctgtacctgcttgctgcttttctacctcattgttagccacacccagtttgaaacagatgaggtatgctatttcataactagtacatcttttaataagcattttttattgtgattaaatatgcatatcgaatcattcagcgctagagccggccttctagtgatcactgtctgcggcctgaagaaggagggaaaggc

SEQ ID NO: 333097 - DNA, 2099 bp, Homo sapiens
  misc_feature (2098)..(2098): n is a, c, g, or t
gactattcacaggcataatcataatgcaccatagcctcaaactcctgggctcaagcaatccaaaaggaggaaacttttaacttatgatcagtttctaccataaatcaagcaacttagaaaaaccttagaacagggtttctcaaaccaagcattgttagtatttggggttggttaagtctttgtttgtgggagcctatcctgtgcattgtaggatttctagcagcataattggcttatgcccacttgatgtcattagcaccactccccaccctacttccagttgtgacaacccaaaaatgtctccagacatagccaactgtccctgggtgttgcgagtataggaggcaaaattgcaccctgttgaaaaccaccaccttagatcatctaggttttacttttaggataagacacttgagggaaaggctgtgaaactgaacctctgttagaagcaacacacagtatcactgcaaaaagactaaaagaaataggtgatttggaaagaggaggcccaggattaaaatatgtttccaagaaagtcaaatcttacaggagactcttgacttcacatctgctgatccctttacccgataggacctagagcagccattataaatctctgtacctgcttgctgcttttctacctcattgttagccacacccagtttgaaacagatgaggtatgctatttcataactagtacatcttttaataagcattttttattgtgattaaatatgcatatcgtaaaattcaccactttaaccagttttaagtgttcaattctgtggcattaagtatattcatactattgtgcaaccaccaccaccatccgtctacagaactcttcatcttcccaaactgaaattatgtattcattaaacaataaccacccattacctcctctctcctcagcctctggtaaccagcattcagtctctatgcattgactactctagatatctaaatggattcattcttatttcatttaccataatgtcttcaaagttcattcatgttgtagcatgtattagaatttctttcctcttaaaggccaaatatgccgtagtatgtaaataccgtattttgtttatcagttcatccattaatggacactgggttgcttctgctttttggctattgtgaataatgcttctgtgaacgtgggtatacaaataactgtttgagtcctaataggcttgttatttttgagtgcacagatctgtatattcgcaattgaaatagggaaagtctttatattcatataaagataatttataatacaataagtcctcaatgttgttgataggttctgggaaactgcaagtttaagaaaaacaacatataatgaaatcaattttaccataggtgaactgatataaataagagttaagtccctatggcatatatttctggttacaaaaacactaccaaatttctaataaagacccaaaacacttctaaaattaaacattgagattaatatgagctttatatacatttaaaaaggataaaaacaagtaagaattggctggacatggtggcttacgcctgtaatctcaacactgggaagtcgaggtgggcagatggcttgacctcaggagttcggaaccagcctgggtaatatggtgaaacccgtctctacagaaaaattcaaaaattagccagaggtggtggcttgcacctgtagtcccagctactcgggagcctgatgtgggaggatcccttgagcctgggaggtcgaggctgcagtgagccatgatcacgctactgcactccagtctgggcaacagagcaaaatcctatctcaaaaaatatatatatattatccagccccaaatgtttatggggttgttattgataaaccctgcattaaacaatcccacagtcggtgctgcggtgagccgtgatggtaccactgcattccagcctgggtgacagaatgagaccctgtctcaaaaaaaaaagtaaaaattatttacccaatatttggcgaatcagtgagtgacagcagttgtagtgctagtgggttaaatcaaggaataactgttgggaagtgaaaattttaaggagcacctcctaccaccatgcagttcaaaanc

SEQ ID NO: 333098 - DNA, 1575 bp, Homo sapiens
gactattcacaggcataatcataatgcaccatagcctcaaactcctgggctcaagcaatccaaaaggaggaaacttttaacttatgatcagtttctaccataaatcaagcaacttagaaaaaccttagaacagggtttctcaaaccaagcattgttagtatttggggttggttaagtctttgtttgtgggagcctatcctgtgcattgtaggatttctagcagcataattggcttatgcccacttgatgtcattagcaccactccccaccctacttccagttgtgacaacccaaaaatgtctccagacatagccaactgtccctgggtgttgcgagtataggaggcaaaattgcaccctgttgaaaaccaccaccttagatcatctaggttttacttttaggataagacacttgagggaaaggctgtgaaactgaacctctgttagaagcaacacacagtatcactgcaaaaagactaaaagaaataggtgatttggaaagaggaggcccaggattaaaatatgtttccaagaaagtcaaatcttacaggagactcttgacttcacatctgctgatccctttacccgataggacctagagcagccattataaatctctgtacctgcttgctgcttttctacctcattgttagccacacccagtttgaaacagatgaggtatgctatttcataactagtacatcttttaataagcattttttattgtgattaaatatgcatatcgtaaaattcaccactttaaccagttttaagtgttcaattctgtggcattaagtatattcatactattgtgcaaccaccaccaccatccgtctacagaactcttcatcttcccaaactgaaattatgtattcattaaacaataaccacccattacctcctctctcctcagcctctggtaaccagcattcagtctctatgcattgactactctagatatctaaatggattcattcttatttcatttaccataatgtcttcaaagttcattcatgttgtagcatgtattagaatttctttcctcttaaaggccaaatatgccgtagtatgtaaataccgtattttgtttatcagttcatccattaatggacactgggttgcttctgctttttggctattgtgaataatgcttctgtgaacgtgggtatacaaataactgtttgagtcctaataggcttgttatttttgagtgcacagatctgtatattcgcaattgaaatagggaaagtctttatattcatataaagataatttataatacaaaaaaaaaaaaaaaaacaaaaaaaaaaaacaaagaaccaaaaaaagaaaaaagcaccaggaaaagaaacaaacaccgagaagtcacagacgaggtgcaaataacgccgtccacggaacgtagagaaagaacaaagaacgaaccaacacaaagacaacaagcacacaaaagaaacaaaaaagcaaacagcaaaacaacaaaggagaggagcgacagagaacagaacaaagaaagaagcaaaagaacagaaaagaaagaaaccaacaatgaagggacaaacaacagaaccacagc

SEQ ID NO: 333099 - DNA, 4396 bp, Homo sapiens
gagctcggcgcacctgggctgggcaggtaagggctggtgcgggacggggagaggaacctgcagtccctacttgggtagagccaggcgccccttggctaagacgtcgaggagcgtggtagcgacgggtgatcttcgctgcggacttggttcggagggacgtccgcttctggtggacagattgagcaaagaatctttgagcggtcaagggaaagacaagccgactcttcagatccctgtggacacactgcctgctcttccatatcatggccctccacccccgcagagtccggctaaagccctggctggtggcccaggtggatagtggcctctaccctgggctcatctggctacacagggactctaaacgcttccagattccctggaaacatgccacccggcatagccctcaacaagaagaggaaaataccatttttaaggcctgggctgtagagacagggaagtaccaggaaggggtggatgaccctgacccagctaaatggaaggcccagctgcgctgtgctctcaataagagcagagaattcaacctgatgtatgatggcaccaaggaggtgcccatgaacccagtgaagatatatcaagtgtgtgacatccctcagccccagggctcgatcattaacccaggatccacagggtctgctccctgggatgagaaggataatgatgtggatgaagaagatgaggaagatgagctggatcagtcgcagcaccatgttcccatccaggacaccttccccttcctgaacatcaatggttctcccatggcgccagccagtgtgggcaattgcagtgtgggcaactgcagcccggaggcagtgtggcccaaaactgaacccctggagatggaagtaccccaggcacctatacagcccttctatagctctccagaactgtggatcagctctctcccaatgactgacctggacatcaagtttcagtaccgtgggaaggagtacgggcagaccatgaccgtgagcaaccctcagggctgccgactcttctatggggacctgggtcccatgcctgaccaggaggagctctttggtcccgtcagcctggagcaggtcaaattcccaggtcctgagcatattaccaatgagaagcagaagctgttcactagcaagctgctggacgtcatggacagaggactgatcctggaggtcagcggtcatgccatttatgccatcaggctgtgccagtgcaaggtgtactggtctgggccatgtgccccatcacttgttgctcccaacctgattgagagacaaaagaaggtcaagctattttgtctggaaacattccttagcgatctcattgcccaccagaaaggacagatagagaagcagccaccgtttgagatctacttatgctttggggaagaatggccagatgggaaaccattggaaaggaaactcatcttggttcaggtcattccagtagtggctcggatgatctacgagatgttttctggtgatttcacacgatcctttgatagtggcagtgtccgcctgcagatctcaaccccagacatcaaggataacatcgttgctcagctgaagcagctgtaccgcatccttcaaacccaggagagctggcagcccatgcagcccacccccagcatgcaactgccccctgccctgcctccccagtaattgtgaatgccatcttcttccttctcttttttataatattgtacatatggatttttttattgtttagatttaaccagcttttaaatctctcttttctctaacagtgttagaagtttgtgattctccaaatatgcctagatttaaagctgatttaatttatggaaaaatcacccttcagactttgcttttctttttcaaatctcctaatggtagtatgatatagcatagtagaaggagatttggcctgggagtttggacaccaaagttctagctgcagctttgcttccaatgtgaccttgaacaagtcctttaacctctgggcttcagatttattgcttataaagtgaagagattggagtagtgcctgaaattgcatccagctttagaacggactcaatgaccttcttctacttgtacaaggctaaactgcctggaacagaatccttctgcattgttcttgtaccacatttttccttggttttgttaaagtttcctcaagcactgatttgtccaggatcgagctctgtttgacctgttctgctagtatagtaagctggctccctgatgggggaagtgagagggagaggagctggctggctggttgcttagaaactatgcttgatatctaaatagaaatgggtgccaaagtctgaaagtcacccagcctgtggagtgaaagctcacaaatttggcttctaaagggaagctgttgacacagaaagcctagggattctgtggaagaataggttgtcaggcatttaccttattaccactcaaataccagtgtgtgtgtgttgggggggcggcagggagagggggtaggtgacagtatgtgactcaggtgttagctttaagaggaaagagctctatttttcttgttttcttctctgagctagactgagctggggatctaagatgtacttctctgactacaaaagggacagtatcatttagattttttgcagttggaagaaatgggttgttgagtgtgttaaggctgggatgaagaagggctgggcagtactcttctggaaaggctcacctagcacgaacctgcttgtctcccttactagtggaggtatctgagtgtgaacagtgaaggtaaagagtggtatagaacaatgcagctgtatctgtcacaaactggtcttatctagaaacatctgctgagtctctaaccctttcagctttctcttcttttttgagacagagtcttgctttgttgcccaggctggagtgcagtggcaagtcaccacttactgcagctttaagctcctgggctcaagcaatcgtcctgccccagcctcctgagtagttgggacaacagtcgtgcactatgatgcttggctaattttttttttatttttgtagagatgaggtcttgctatgttgcccaggctggtcttgaactcctgggctcaagcaatctgggacctaaatggcaaataagatgctaatctgtggttgcaagccccagtcctcttgaatagtgatgcctatctgtctgtgtcgggacatagtaaggaagcccatgtctagtctggtacctttaaaccaggccatctccaacttttcaaaatgactcaaaagttgagctagccttattttaaaaactaaaagttcaaaatcagtggtgacatgaggacttatttatttaaagtgcttaagccttggttttagagtttctaagagacctagtggaatttgctattatgaaaagcatgaaaagattaagaaacctggctaaaggtcaggtgcccagcttcgaggaaaagttgggcttttagggaccgggaagcattaaaggcacagaaactttacattttgggggtcattttgttgagtaggtgaagtgagggatttgggcttgatatttggctgccccatctctatgtgggaactcaaagttaaaaacccactgtaggtaaattagaagggcagctcttgaatctgggccagtctatatcccttctgtgaagtgctaacagccaggctatctgtagcctgggtgggagcccagataatgtgagctggtaaagggtattggaaaagtgccaagaaatgccaagcttttggttcgtaaccactataaaaagtttatgaacatgtcagaggaatggatgagtgatttgtgaggtcttaactagataccccggtttcttccttgttttggcttcttttcagaatgccgggagagtacatgcagggattccatctaatcaccctcagcactctttctctggtcctgctggatagatttagatttcctttctttttttagggcctcagtctgctatctcctttggtggctaccaccactcactcccttgatatcttctactcccttgccttcaccttgcttaagactgagaagggagttagattttgtcactagctcttctttttcctcactgtgtaccccaccaaacaagattagttcaagttaaaaagaacctactggaggtaaactgggagagcaagtgttggatctgggctggtccctttcccataaaattaggtccctggttgtatgttcccatagcaccccatacttcctctctcagaataatcatttcccttgtaatgctcagcatccgcatcctgcttgactgcaaacttgctgaaggtagggactgtttgtcttggacttcgctgccagtccttagaacagtgtctgggacacagtgtgttctcaaatatttgttgctggaataaatgaatgaactaaa

SEQ ID NO: 333100 - DNA, 5073 bp, Homo sapiens
gagctcggcgcacctgggctgggcaggtaagggctggtgcgggacggggagaggaacctgcagtccctacttgggtagagccaggcgccccttggctaagacgtcgaggagcgtggtagcgacgggtgatcttcgctgcggacttggttcggagggacgtccgcttctggtggacagattgagcaaagaatctttgagcggtcaagggaaagacaagccgactcttcagatccctgtggacacactgcctgctcttccatatcatggccctccacccccgcagagtccggctaaagccctggctggtggcccaggtggatagtggcctctaccctgggctcatctggctacacagggactctaaacgcttccagattccctggaaacatgccacccggcatagccctcaacaagaagaggaaaataccatttttaaggcctgggctgtagagacagggaagtaccaggaaggggtggatgaccctgacccagctaaatggaaggcccagctgcgctgtgctctcaataagagcagagaattcaacctgatgtatgatggcaccaaggaggtgcccatgaacccagtgaagatatatcaagtgtgtgacatccctcagccccagggctcgatcattaacccaggatccacagggtctgctccctgggatgagaaggataatgatgtggatgaagaagatgaggaagatgagctggatcagtcgcagcaccatgttcccatccaggacaccttccccttcctgaacatcaatggttctcccatggcgccagccagtgtgggcaattgcagtgtgggcaactgcagcccggaggcagtgtggcccaaaactgaacccctggagatggaagtaccccaggcacctatacagcccttctatagctctccagaactgtggatcagctctctcccaatgactgacctggacatcaagtttcagtaccgtgggaaggagtacgggcagaccatgaccgtgagcaaccctcagggctgccgactcttctatggggacctgggtcccatgcctgaccaggaggagctctttggtcccgtcagcctggagcaggtcaaattcccaggtcctgagcatattaccaatgagaagcagaagctgttcactagcaagctgctggacgtcatggacagaggactgatcctggaggtcagcggtcatgccatttatgccatcaggctgtgccagtgcaaggtgtactggtctgggccatgtgccccatcacttgttgctcccaacctgattgagagacaaaagaaggtcaagctattttgtctggaaacattccttagcgatctcattgcccaccagaaaggacagatagagaagcagccaccgtttgagatctacttatgctttggggaagaatggccagatgggaaaccattggaaaggaaactcatcttggttcaggtcattccagtagtggctcggatgatctacgagatgttttctggtgatttcacacgatcctttgatagtggcagtgtccgcctgcagatctcaaccccagacatcaaggataacatcgttgctcagctgaagcagctgtaccgcatccttcaaacccaggagagctggcagcccatgcagcccacccccagcatgcaactgccccctgccctgcctccccagtaattgtgaatgccatcttcttccttctcttttttataatattgtacatatggatttttttattgtttagatttaaccagcttttaaatctctcttttctctaacagtgttagaagtttgtgattctccaaatatgcctagatttaaagctgatttaatttatggaaaaatcacccttcagactttgcttttctttttcaaatctcctaatggtagtatgatatagcatagtagaaggagatttggcctgggagtttggacaccaaagttctagctgcagctttgcttccaatgtgaccttgaacaagtcctttaacctctgggcttcagatttattgcttataaagtgaagagattggagtagtgcctgaaattgcatccagctttagaacggactcaatgaccttcttctacttgtacaaggctaaactgcctggaacagaatccttctgcattgttcttgtaccacatttttccttggttttgttaaagtttcctcaagcactgatttgtccaggatcgagctctgtttgacctgttctgctagtatagtaagctggctccctgatgggggaagtgagagggagaggagctggctggctggttgcttagaaactatgcttgatatctaaatagaaatgggtgccaaagtctgaaagtcacccagcctgtggagtgaaagctcacaaatttggcttctaaagggaagctgttgacacagaaagcctagggattctgtggaagaataggttgtcaggcatttaccttattaccactcaaataccagtgtgtgtgtgttgggggggcggcagggagagggggtaggtgacagtatgtgactcaggtgttagctttaagaggaaagagctctatttttcttgttttcttctctgagctagactgagctggggatctaagatgtacttctctgactacaaaagggacagtatcatttagattttttgcagttggaagaaatgggttgttgagtgtgttaaggctgggatgaagaagggctgggcagtactcttctggaaaggctcacctagcacgaacctgcttgtctcccttactagtggaggtatctgagtgtgaacagtgaaggtaaagagtggtatagaacaatgcagctgtatctgtcacaaactggtcttatctagaaacatctgctgagtctctaaccctttcagctttctcttcttttttgagacagagtcttgctttgttgcccaggctggagtgcagtggcaagtcaccacttactgcagctttaagctcctgggctcaagcaatcgtcctgccccagcctcctgagtagttgggacaacagtcgtgcactatgatgcttggctaattttttttttatttttgtagagatgaggtcttgctatgttgcccaggctggtcttgaactcctgggctcaagcaatctgggacctaaatggcaaataagatgctaatctgtggttgcaagccccagtcctcttgaatagtgatgcctatctgtctgtgtcgggacatagtaaggaagcccatgtctagtctggtacctttaaaccaggccatctccaacttttcaaaatgactcaaaagttgagctagccttattttaaaaactaaaagttcaaaatcagtggtgacatgaggacttatttatttaaagtgcttaagccttggttttagagtttctaagagacctagtggaatttgctattatgaaaagcatgaaaagattaagaaacctggctaaaggtcaggtgcccagcttcgaggaaaagttgggcttttagggaccgggaagcattaaaggcacagaaactttacattttgggggtcattttgttgagtaggtgaagtgagggatttgggcttgatatttggctgccccatctctatgtgggaactcaaagttaaaaacccactgtaggtaaattagaagggcagctcttgaatctgggccagtctatatcccttctgtgaagtgctaacagccaggctatctgtagcctgggtgggagcccagataatgtgagctggtaaagggtattggaaaagtgccaagaaatgccaagcttttggttcgtaaccactataaaaagtttatgaacatgtcagaggaatggatgagtgatttgtgaggtcttaactagataccccggtttcttccttgttttggcttcttttcagaatgccgggagagtacatgcagggattccatctaatcaccctcagcactctttctctggtcctgctggatagatttagatttcctttctttttttagggcctcagtctgctatctcctttggtggctaccaccactcactcccttgatatcttctactcccttgccttcaccttgcttaagactgagaagggagttagattttgtcactagctcttctttttcctcactgtgtaccccaccaaacaagattagttcaagttaaaaagaacctactggaggtaaactgggagagcaagtgttggatctgggctggtccctttcccataaaattaggtccctggttgtatgttcccatagcaccccatacttcctctctcagaataatcatttcccttgtaatgctcagcatccgcatcctgcttgactgcaaacttgctgaaggtagggactgtttgtcttggacttcgctgccagtccttagaacagtgtctgggacacagtgtgttctcaaatatttgttgctggaataaatgaatgaactaaatcagtcttttagggatttactgttaaccaccatgggaaaattaaataaatgcggggaaggaaaacgttctaaaattagaagactactttctactctcagcttctgattccctctgagctaagaaccagacagccttaggctggtaactcctataagctggtcctcctcccatgctgaccccatctttactgtacaattcacttttcatggactgaaggcaccaccaagatagatccaggagtgacaactccagtgtaggtgtccactgttcccttaatctctgtcctgctccaagtataaataaattggggccatttccttagatattggggttttctcaagaaatcctttcccttcgtggcatgggtcaaatcgctggtagttaaaaaggtgttaactcttacgtgaaataacactttttctttgtaatgacctggctggaaagcctctgtgtcatcacttctcatttcttatttgaaatcagcaaactggattcagtagacatgaacttaagccccatgaaagtgggggttttgtctgttttgctcactgcagtacctccagggcctagcagcatgactggcacatatttgttcaaagtgaatactcacaccttcacaccctccctagagagctgttgtaggcctctcaaatgtaggatttagggaagtcaagtt

SEQ ID NO: 333101 - DNA, 4037 bp, Homo sapiens
gagctcggcgcacctgggctgggcaggtaagggctggtgcgggacggggagaggaacctgcagtccctacttgggtagagccaggcgccccttggctaagacgtcgaggagcgtggtagcgacgggtgatcttcgctgcggacttggttcggagggacgtccgcttctggtggacagattgagcaaagaatctttgagcggtcaagggaaagacaagccgactcttcagatccctgtggacacactgcctgctcttccatatcatggccctccacccccgcagagtccggctaaagccctggctggtggcccaggtggatagtggcctctaccctgggctcatctggctacacagggactctaaacgcttccagattccctggaaacatgccacccggcatagccctcaacaagaagaggaaaataccatttttaaggcctgggctgtagagacagggaagtaccaggaaggggtggatgaccctgacccagctaaatggaaggcccagctgcgctgtgctctcaataagagcagagaattcaacctgatgtatgatggcaccaaggaggtgcccatgaacccagtgaagatatatcaagtgtgtgacatccctcagccccagggctcgatcattaacccaggatccacagggtctgctccctgggatgagaaggataatgatgtggatgaagaagatgaggaagatgagctggatcagtcgcagcaccatgttcccatccaggacaccttccccttcctgaacatcaatggttctcccatggcgccagccagtgtgggcaattgcagtgtgggcaactgcagcccggaggcagtgtggcccaaaactgaacccctggagatggaagtaccccaggcacctatacagcccttctatagctctccagaactgtggatcagctctctcccaatgactgacctggacatcaagtttcagtaccgtgggaaggagtacgggcagaccatgaccgtgagcaaccctcagggctgccgactcttctatggggacctgggtcccatgcctgaccaggaggagctctttggtcccgtcagcctggagcaggtcaaattcccaggtcctgagcatattaccaatgagaagcagaagctgttcactagcaagctgctggacgtcatggacagaggactgatcctggaggtcagcggtcatgccatttatgccatcaggctgtgccagtgcaaggtgtactggtctgggccatgtgccccatcacttgttgctcccaacctgattgagagacaaaagaaggtcaagctattttgtctggaaacattccttagcgatctcattgcccaccagaaaggacagatagagaagcagccaccgtttgagatctacttatgctttggggaagaatggccagatgggaaaccattggaaaggaaactcatcttggttcaggtcattccagtagtggctcggatgatctacgagatgttttctggtgatttcacacgatcctttgatagtggcagtgtccgcctgcagatctcaaccccagacatcaaggataacatcgttgctcagctgaagcagctgtaccgcatccttcaaacccaggagagctggcagcccatgcagcccacccccagcatgcaactgccccctgccctgcctccccagtaattgtgaatgccatcttcttccttctcttttttataatattgtacatatggatttttttattgtttagatttaaccagcttttaaatctctcttttctctaacagtgttagaagtttgtgattctccaaatatgcctagatttaaagctgatttaatttatggaaaaatcacccttcagactttgcttttctttttcaaatctcctaatggtagtatgatatagcatagtagaaggagatttggcctgggagtttggacaccaaagttctagctgcagctttgcttccaatgtgaccttgaacaagtcctttaacctctgggcttcagatttattgcttataaagtgaagagattggagtagtgcctgaaattgcatccagctttagaacggactcaatgaccttcttctacttgtacaaggctaaactgcctggaacagaatccttctgcattgttcttgtaccacattttatgtgactcaggtgttagctttaagaggaaagagctctatttttcttgttttcttctctgagctagactgagctggggatctaagatgtacttctctgactacaaaagggacagtatcatttagattttttgcagttggaagaaatgggttgttgagtgtgttaaggctgggatgaagaagggctgggcagtactcttctggaaaggctcacctagcacgaacctgcttgtctcccttactagtggaggtatctgagtgtgaacagtgaaggtaaagagtggtatagaacaatgcagctgtatctgtcacaaactggtcttatctagaaacatctgctgagtctctaaccctttcagctttctcttcttttttgagacagagtcttgctttgttgcccaggctggagtgcagtggcaagtcaccacttactgcagctttaagctcctgggctcaagcaatcgtcctgccccagcctcctgagtagttgggacaacagtcgtgcactatgatgcttggctaattttttttttatttttgtagagatgaggtcttgctatgttgcccaggctggtcttgaactcctgggctcaagcaatctgggacctaaatggcaaataagatgctaatctgtggttgcaagccccagtcctcttgaatagtgatgcctatctgtctgtgtcgggacatagtaaggaagcccatgtctagtctggtacctttaaaccaggccatctccaacttttcaaaatgactcaaaagttgagctagccttattttaaaaactaaaagttcaaaatcagtggtgacatgaggacttatttatttaaagtgcttaagccttggttttagagtttctaagagacctagtggaatttgctattatgaaaagcatgaaaagattaagaaacctggctaaaggtcaggtgcccagcttcgaggaaaagttgggcttttagggaccgggaagcattaaaggcacagaaactttacattttgggggtcattttgttgagtaggtgaagtgagggatttgggcttgatatttggctgccccatctctatgtgggaactcaaagttaaaaacccactgtaggtaaattagaagggcagctcttgaatctgggccagtctatatcccttctgtgaagtgctaacagccaggctatctgtagcctgggtgggagcccagataatgtgagctggtaaagggtattggaaaagtgccaagaaatgccaagcttttggttcgtaaccactataaaaagtttatgaacatgtcagaggaatggatgagtgatttgtgaggtcttaactagataccccggtttcttccttgttttggcttcttttcagaatgccgggagagtacatgcagggattccatctaatcaccctcagcactctttctctggtcctgctggatagatttagatttcctttctttttttagggcctcagtctgctatctcctttggtggctaccaccactcactcccttgatatcttctactcccttgccttcaccttgcttaagactgagaagggagttagattttgtcactagctcttctttttcctcactgtgtaccccaccaaacaagattagttcaagttaaaaagaacctactggaggtaaactgggagagcaagtgttggatctgggctggtccctttcccataaaattaggtccctggttgtatgttcccatagcaccccatacttcctctctcagaataatcatttcccttgtaatgctcagcatccgcatcctgcttgactgcaaacttgctgaaggtagggactgtttgtcttggacttcgctgccagtccttagaacagtgtctgggacacagtgtgttctcaaatatttgttgctggaataaatgaatgaactaaa

SEQ ID NO: 333102 - DNA, 3972 bp, Homo sapiens
acctgttggcaaacgtgcagttcgattcgagctcggaccttgcgaggaattgaccttgcgatggaattgacctccagagaaaactcacatgtctatgttaatcttcagcaaacaaaggtttttaaaactatgaatttgtgggagaaataatatgactaggaagcaggagcaggggaaccttatttcttattgcgttagttatgggaatcactgatgggctggaagatcacactgggtcagggttcagtgtttggttcttgtctactgaccttgtgagttctcagagcatcagcaagtgatgtgcacgtgtggtacccctgtctgctcaccatatgcttttgttttaggttctcccatggcgccagccagtgtgggcaattgcagtgtgggcaactgcagcccggaggcagtgtggcccaaaactgaacccctggagatggaagtaccccaggcacctatacagcccttctatagctctccagaactgtggatcagctctctcccaatgactgacctggacatcaagtttcagtaccgtgggaaggagtacgggcagaccatgaccgtgagcaaccctcagggctgccgactcttctatggggacctgggtcccatgcctgaccaggaggagctctttggtcccgtcagcctggagcaggtcaaattcccaggtcctgagcatattaccaatgagaagcagaagctgttcactagcaagctgctggacgtcatggacagaggactgatcctggaggtcagcggtcatgccatttatgccatcaggctgtgccagtgcaaggtgtactggtctgggccatgtgccccatcacttgttgctcccaacctgattgagagacaaaagaaggtcaagctattttgtctggaaacattccttagcgatctcattgcccaccagaaaggacagatagagaagcagccaccgtttgagatctacttatgctttggggaagaatggccagatgggaaaccattggaaaggaaactcatcttggttcaggtcattccagtagtggctcggatgatctacgagatgttttctggtgatttcacacgatcctttgatagtggcagtgtccgcctgcagatctcaaccccagacatcaaggataacatcgttgctcagctgaagcagctgtaccgcatccttcaaacccaggagagctggcagcccatgcagcccacccccagcatgcaactgccccctgccctgcctccccagtaattgtgaatgccatcttcttccttctcttttttataatattgtacatatggatttttttattgtttagatttaaccagcttttaaatctctcttttctctaacagtgttagaagtttgtgattctccaaatatgcctagatttaaagctgatttaatttatggaaaaatcacccttcagactttgcttttctttttcaaatctcctaatggtagtatgatatagcatagtagaaggagatttggcctgggagtttggacaccaaagttctagctgcagctttgcttccaatgtgaccttgaacaagtcctttaacctctgggcttcagatttattgcttataaagtgaagagattggagtagtgcctgaaattgcatccagctttagaacggactcaatgaccttcttctacttgtacaaggctaaactgcctggaacagaatccttctgcattgttcttgtaccacatttttccttggttttgttaaagtttcctcaagcactgatttgtccaggatcgagctctgtttgacctgttctgctagtatagtaagctggctccctgatgggggaagtgagagggagaggagctggctggctggttgcttagaaactatgcttgatatctaaatagaaatgggtgccaaagtctgaaagtcacccagcctgtggagtgaaagctcacaaatttggcttctaaagggaagctgttgacacagaaagcctagggattctgtggaagaataggttgtcaggcatttaccttattaccactcaaataccagtgtgtgtgtgttgggggggcggcagggagagggggtaggtgacagtatgtgactcaggtgttagctttaagaggaaagagctctatttttcttgttttcttctctgagctagactgagctggggatctaagatgtacttctctgactacaaaagggacagtatcatttagattttttgcagttggaagaaatgggttgttgagtgtgttaaggctgggatgaagaagggctgggcagtactcttctggaaaggctcacctagcacgaacctgcttgtctcccttactagtggaggtatctgagtgtgaacagtgaaggtaaagagtggtatagaacaatgcagctgtatctgtcacaaactggtcttatctagaaacatctgctgagtctctaaccctttcagctttctcttcttttttgagacagagtcttgctttgttgcccaggctggagtgcagtggcaagtcaccacttactgcagctttaagctcctgggctcaagcaatcgtcctgccccagcctcctgagtagttgggacaacagtcgtgcactatgatgcttggctaattttttttttatttttgtagagatgaggtcttgctatgttgcccaggctggtcttgaactcctgggctcaagcaatctgggacctaaatggcaaataagatgctaatctgtggttgcaagccccagtcctcttgaatagtgatgcctatctgtctgtgtcgggacatagtaaggaagcccatgtctagtctggtacctttaaaccaggccatctccaacttttcaaaatgactcaaaagttgagctagccttattttaaaaactaaaagttcaaaatcagtggtgacatgaggacttatttatttaaagtgcttaagccttggttttagagtttctaagagacctagtggaatttgctattatgaaaagcatgaaaagattaagaaacctggctaaaggtcaggtgcccagcttcgaggaaaagttgggcttttagggaccgggaagcattaaaggcacagaaactttacattttgggggtcattttgttgagtaggtgaagtgagggatttgggcttgatatttggctgccccatctctatgtgggaactcaaagttaaaaacccactgtaggtaaattagaagggcagctcttgaatctgggccagtctatatcccttctgtgaagtgctaacagccaggctatctgtagcctgggtgggagcccagataatgtgagctggtaaagggtattggaaaagtgccaagaaatgccaagcttttggttcgtaaccactataaaaagtttatgaacatgtcagaggaatggatgagtgatttgtgaggtcttaactagataccccggtttcttccttgttttggcttcttttcagaatgccgggagagtacatgcagggattccatctaatcaccctcagcactctttctctggtcctgctggatagatttagatttcctttctttttttagggcctcagtctgctatctcctttggtggctaccaccactcactcccttgatatcttctactcccttgccttcaccttgcttaagactgagaagggagttagattttgtcactagctcttctttttcctcactgtgtaccccaccaaacaagattagttcaagttaaaaagaacctactggaggtaaactgggagagcaagtgttggatctgggctggtccctttcccataaaattaggtccctggttgtatgttcccatagcaccccatacttcctctctcagaataatcatttcccttgtaatgctcagcatccgcatcctgcttgactgcaaacttgctgaaggtagggactgtttgtcttggacttcgctgccagtccttagaacagtgtctgggacacagtgtgttctcaaatatttgttgctggaataaatgaatgaactaaa

SEQ ID NO: 333103 - DNA, 2775 bp, Homo sapiens
gagctcggcgcacctgggctgggcaggtaagggctggtgcgggacggggagaggaacctgcagtccctacttgggtagagccaggcgccccttggctaagacgtcgaggagcgtggtagcgacgggtgatcttcgctgcggacttggttcggagggacgtccgcttctggtggacagattgagcaaagaatctttgagcggtcaagggaaagacaagccgactcttcagatccctgtggacacactgcctgctcttccatatcatggccctccacccccgcagagtccggctaaagccctggctggtggcccaggtggatagtggcctctaccctgggctcatctggctacacagggactctaaacgcttccagattccctggaaacatgccacccggcatagccctcaacaagaagaggaaaataccatttttaaggcctgggctgtagagacagggaagtaccaggaaggggtggatgaccctgacccagctaaatggaaggcccagctgcgctgtgctctcaataagagcagagaattcaacctgatgtatgatggcaccaaggaggtgcccatgaacccagtgaagatatatcaagtgtgtgacatccctcagccccagggctcgatcattaacccaggatccacagggtctgctccctgggatgagaaggataatgatgtggatgaagaagatgaggaagatgagctggatcagtcgcagcaccatgttcccatccaggacaccttccccttcctgaacatcaatggttctcccatggcgccagccagtgtgggcaattgcagtgtgggcaactgcagcccggaggcagtgtggcccaaaactgaacccctggagatggaagtaccccaggcacctatacagcccttctatagctctccagaactgtggatcagctctctcccaatgactgacctggacatcaagtttcagtaccgtgggaaggagtacgggcagaccatgaccgtgagcaaccctcagggctgccgactcttctatggggacctgggtcccatgcctgaccaggaggagctctttggtcccgtcagcctggagcaggtcaaattcccaggtcctgagcatattaccaatgagaagcagaagctgttcactagcaagctgctggacgtcatggacagaggactgatcctggaggtcagcggtcatgccatttatgccatcaggctgtgccagtgcaaggtgtactggtctgggccatgtgccccatcacttgttgctcccaacctgattgagagacaaaagaaggtcaagctattttgtctggaaacattccttagcgatctcattgcccaccagaaaggacagatagagaagcagccaccgtttgagatctacttatgctttggggaagaatggccagatgggaaaccattggaaaggaaactcatcttggttcaggtcattccagtagtggctcggatgatctacgagatgttttctggtgatttcacacgatcctttgatagtggcagtgtccgcctgcagatctcaaccccagacatcaaggataacatcgttgctcagctgaagcagctgtaccgcatccttcaaacccaggagagctggcagcccatgcagcccacccccagcatgcaactgccccctgccctgcctccccagtaattgtgaatgccatcttcttccttctcttttttataatattgtacatatggatttttttattgtttagatttaaccagcttttaaatctctcttttctctaacagtgttagaagtttgtgattctccaaatatgcctagatttaaagctgatttaatttatggaaaaatcacccttcagactttgcttttctttttcaaatctcctaatggtagtatgatatagcatagtagaaggagatttggcctgggagtttggacaccaaagttctagctgcagctttgcttccaatgtgaccttgaacaagtcctttaacctctgggcttcagatttattgcttataaagtgaagagattggagtagtgcctgaaattgcatccagctttagaacggactcaatgaccttcttctacttgtacaaggctaaactgcctggaacagaatccttctgcattgttcttgtaccacatttttccttggttttgttaaagtttcctcaagcactgatttgtccaggatcgagctctgtttgacctgttctgctagtatagtaagctggctccctgatgggggaagtgagagggagaggagctggctggctggttgcttagaaactatgcttgatatctaaatagaaatgggtgccaaagtctgaaagtcacccagcctgtggagtgaaagctcacaaatttggcttctaaagggaagctgttgacacagaaagcctagggattctgtggaagaataggttgtcaggcatttaccttattaccactcaaataccagtgtgtgtgtgttgggggggcggcagggagagggggtaggtgacagtatgtgactcaggtgttagctttaagaggaaagagctctatttttcttgttttcttctctgagctagactgagctggggatctaagatgtacttctctgactacaaaagggacaaataatcatttcccttgtaatgctcagcatccgcatcctgcttgactgcaaacttgctgaaggtagggactgtttgtcttggacttcgctgccagtccttagaacagtgtctgggacacagtgtgttctcaaatatttgttgctggaataaatgaatgaactaaa

SEQ ID NO: 333104 - DNA, 1424 bp, Homo sapiens
  misc_feature (20)..(20): n is a, c, g, or t
ggcttgttctagaggatccngggcaggtgctatgatgcttggctaattttttttttatttttgtagagatgaggtcttgctatgttgcccaggctggtcttgaactcctgggctcaagcaatctgggacctaaatggcaaataagatgctaatctgtggttgcaagccccagtcctcttgaatagtgatgcctatctgtctgtgtcgggacatagtaaggaagcccatgtctagtctggtacctttaaaccaggccatctccaacttttcaaaatgactcaaaagttgagctagccttattttaaaaactaaaagttcaaaatcagtggtgacatgaggacttatttatttaaagtgcttaagccttggttttagagtttctaagagacctagtggaatttgctattatgaaaagcatgaaaagattaagaaacctggctaaaggtcaggtgcccagcttcgaggaaaagttgggcttttagggaccgggaagcattaaaggcacagaaactttacattttgggggtcattttgttgagtaggtgaagtgagggatttgggcttgatatttggctgccccatctctatgtgggaactcaaagttaaaaacccactgtaggtaaattagaagggcagctcttgaatctgggccagtctatatcccttctgtgaagtgctaacagccaggctatctgtagcctgggtgggagcccagataatgtgagctggtaaagggtattggaaaagtgccaagaaatgccaagcttttggttcgtaaccactataaaaagtttatgaacatgtcagaggaatggatgagtgatttgtgaggtcttaactagataccccggtttcttccttgttttggcttcttttcagaatgccgggagagtacatgcagggattccatctaatcaccctcagcactctttctctggtcctgctggatagatttagatttcctttctttttttagggcctcagtctgctatctcctttggtggctaccaccactcactcccttgatatcttctactcccttgccttcaccttgcttaagactgagaagggagttagattttgtcactagctcttctttttcctcactgtgtaccccaccaaacaagattagttcaagttaaaaagaacctactggaggtaaactgggagagcaagtgttggatctgggctggtccctttcccataaaattaggtccctggttgtatgttcccatagcaccccatacttcctctctcagaataatcatttcccttgtaatgctcagcatccgcatcctgcttgactgcaaacttgctgaaggtagggactgtttgtcttggacttcgctgccagtccttagaacagtgtctgggacacagtgtgttctcaaatatttgttgctggaataaatgaatgaactaaa

SEQ ID NO: 333105 - DNA, 1505 bp, Homo sapiens
gagctcggcgcacctgggctgggcaggtaagggctggtgcgggacggggagaggaacctgcagtccctacttgggtagagccaggcgccccttggctaagacgtcgaggagcgtggtagcgacgggtgatcttcgctgcggacttggttcggagggacgtccgcttctggtggacagattgagcaaagaatctttgagcggtcaagggaaagacaagccgactcttcagatccctgtggacacactgcctgctcttccatatcatggccctccacccccgcagagtccggctaaagccctggctggtggcccaggtggatagtggcctctaccctgggctcatctggctacacagggactctaaacgcttccagattccctggaaacatgccacccggcatagccctcaacaagaagaggaaaataccatttttaaggcctgggctgtagagacagggaagtaccaggaaggggtggatgaccctgacccagctaaatggaaggcccagctgcgctgtgctctcaataagagcagagaattcaacctgatgtatgatggcaccaaggaggtgcccatgaacccagtgaagatatatcaagtgtgtgacatccctcagccccagggctcgatcattaacccaggatccacagggtctgctccctgggatgagaaggataatgatgtggatgaagaagatgaggaagatgagctggatcagtcgcagcaccatgttcccatccaggacaccttccccttcctgaacatcaatggttctcccatggcgccagccagtgtgggcaattgcagtgtgggcaactgcagcccggaggcagtgtggcccaaaactgaacccctggagatggaagtaccccaggcacctatacagcccttctatagctctccagaactgtggatcagctctctcccaatgactgacctggacatcaagtttcagtaccgtgggaaggagtacgggcagaccatgaccgtgagcaaccctcagggctgccgactcttctatggggacctgggtcccatgcctgaccaggaggagctctttggtcccgtcagcctggagcaggtcaaattcccaggtcctgagcatattaccaatgagaagcagaagctgttcactagcaagctgctggacgtcatggacagaggactgatcctggaggtcagcggtcatgccatttatgccatcaggctgtgccagtgcaaggtgtactggtctgggccatgtgccccatcacttgttgctcccaacctgattgagagacaaaagaaggtcaagctattttgtctggaaacattccttagcggtaagtcatttctcagaaagttgatcgtgggaatcactctctggaagtacattccttccactatccctgtctttcaccttcctgctttcctggcatggcaaagatcttaaaaaatttagtctggaggaggtcaagggagaacagaactttggttctaaaaattggaggtgacctaggcaaca

SEQ ID NO: 333106 - DNA, 806 bp, Homo sapiens
gagctcggcgcacctgggctgggcaggtaagggctggtgcgggacggggagaggaacctgcagtccctacttgggtagagccaggcgccccttggctaagacgtcgaggagcgtggtagcgacgggtgatcttcgctgcggacttggttcggagggacgtccgcttctggtggacagattgagcaaagaatctttgagcggtcaagggaaagacaagccgactcttcagatccctgtggacacactgcctgctcttccatatcatggccctccacccccgcagagtccggctaaagccctggctggtggcccaggtggatagtggcctctaccctgggctcatctggctacacagggactctaaacgcttccagattccctggaaacatgccacccggcatagccctcaacaagaagaggaaaataccatttttaaggcctgggctgtagagacagggaagtaccaggaaggggtggatgaccctgacccagctaaatggaaggcccagctgcgctgtgctctcaataagagcagagaattcaacctgatgtatgatggcaccaaggaggtgcccatgaacccagtgaagatatatcaagtgtgtgacatccctcagccccagggctcgatcattaacccaggatccacagggtctgctccctgggatgagaaggataatgatgtggatgaagaagatgaggaagatgagctggatcagtcgcagcaccatgttcccatccaggacaccttccccttcctgaacatcaatggtgagtggggatgatgggtggtacagagacatatg

SEQ ID NO: 333107 - DNA, 358 bp, Homo sapiens
ggaatataaatttattctaggaagtggcagcaaggccacttgggctttgcccctggagttgtgtagcaaggcaagcaatagatgatattttgtaaaaagtcttgcaaagtaagcagtcatttatttaggcctgtgatgtaatgttacatctaggttctttaccttcatttgaaccaacttccacagtgagccttggcagaaggatggtccagagagatgaaggcatatcctatatttagacatcagaatggggtcttcctcagggcctctttggtctgtccttcaatcttgggtccattgtgctatttaaaaataccttttcctcagaggatacacctgtgttctgtgtcctgaacag

SEQ ID NO: 333108 - DNA, 4447 bp, Homo sapiens
gagctcggcgcacctgggctgggcaggtaagggctggtgcgggacggggagaggaacctgcagtccctacttgggtagagccaggcgccccttggctaagacgtcgaggagcgtggtagcgacgggtgatcttcgctgcggacttggttcggagggacgtccgcttctggtggacagattgagcaaagaatctttgagcggtcaagggaaagacaagccgactcttcagatccctgtggacacactgcctgctcttccatatcatggccctccacccccgcagagtccggctaaagccctggctggtggcccaggtggatagtggcctctaccctgggctcatctggctacacagggactctaaacgcttccagattccctggaaacatgccacccggcatagccctcaacaagaagaggaaaataccatttttaaggcctgggctgtagagacagggaagtaccaggaaggggtggatgaccctgacccagctaaatggaaggcccagctgcgctgtgctctcaataagagcagagaattcaacctgatgtatgatggcaccaaggaggtgcccatgaacccagtgaagatatatcaagtgtgtgacatccctcagccccagggctcgatcattaacccaggatccacagggtctgctccctgggatgagaaggataatgatgtggatgaagaagatgaggaagatgagctggatcagtcgcagcaccatgttcccatccaggacaccttccccttcctgaacatcaatggttctcccatggcgccagccagtgtgggcaattgcagtgtgggcaactgcagcccggaggcagtgtggcccaaaactgaacccctggagatggaagtaccccaggcacctatacagcccttctatagctctccagaactgtggatcagctctctcccaatgactgacctggacatcaagtttcagtaccgtgggaaggagtacgggcagaccatgaccgtgagcaaccctcagggctgccgactcttctatggggacctgggtcccatgcctgaccaggaggagctctttggtcccgtcagcctggagcaggtcaaattcccaggtcctgagcatattaccaatgagaagcagaagctgttcactagcaagctgctggacgtcatggacagaggactgatcctggaggtcagcggtcatgccatttatgccatcaggctgtgccagtgcaaggtgtactggtctgggccatgtgccccatcacttgttgctcccaacctgattgagagacaaaagaaggtcaagctattttgtctggaaacattccttagcgatctcattgcccaccagaaaggacagatagagaagcagccaccgtttgagatctacttatgctttggggaagaatggccagatgggaaaccattggaaaggaaactcatcttggttcaggtcattccagtagtggctcggatgatctacgagatgttttctggtgatttcacacgatcctttgatagtggcagtgtccgcctgcagatctcaaccccagacatcaaggataacatcgttgctcagctgaagcagctgtaccgcatccttcaaacccaggagagctggcagcccatgcagcccacccccagcatgcaactgccccctgccctgcctccccagtaattgtgaatgccatcttcttccttctcttttttataatattgtacatatggatttttttattgtttagatttaaccagcttttaaatctctcttttctctaacagtgttagaagtttgtgattctccaaatatgcctagatttaaagctgatttaatttatggaaaaatcacccttcagactttgcttttctttttcaaatctcctaatggtagtatgatatagcatagtagaaggagatttggcctgggagtttggacaccaaagttctagctgcagctttgcttccaatgtgaccttgaacaagtcctttaacctctgggcttcagatttattgcttataaagtgaagagattggagtagtgcctgaaattgcatccagctttagaacggactcaatgaccttcttctacttgtacaaggctaaactgcctggaacagaatccttctgcattgttcttgtaccacatttttccttggttttgttaaagtttcctcaagcactgatttgtccaggatcgagctctgtttgacctgttctgctagtatagtaagctggctccctgatgggggaagtgagagggagaggagctggctggctggttgcttagaaactatgcttgatatctaaatagaaatgggtgccaaagtctgaaagtcacccagcctgtggagtgaaagctcacaaatttggcttctaaagggaagctgttgacacagaaagcctagggattctgtggaagaataggttgtcaggcatttaccttattaccactcaaataccagtgtgtgtgtgttgggggggcggcagggagagggggtaggtgacagtatgtgactcaggtgttagctttaagaggaaagagctctatttttcttgttttcttctctgagctagactgagctggggatctaagatgtacttctctgactacaaaagggacagtatcatttagattttttgcagttggaagaaatgggttgttgagtgtgttaaggctgggatgaagaagggctgggcagtactcttctggaaaggctcacctagcacgaacctgcttgtctcccttactagtggaggtatctgagtgtgaacagtgaaggtaaagagtggtatagaacaatgcagctgtatctgtcacaaactggtcttatctagaaacatctgctgagtctctaaccctttcagctttctcttcttttttgagacagagtcttgctttgttgcccaggctggagtgcagtggcaagtcaccacttactgcagctttaagctcctgggctcaagcaatcgtcctgccccagcctcctgagtagttgggacaacagtcgtgcactatgatgcttggctaattttttttttatttttgtagagatgaggtcttgctatgttgcccaggctggtcttgaactcctgggctcaagcaatctgggacctaaatggcaaataagatgctaatctgtggttgcaagccccagtcctcttgaatagtgatgcctatctgtctgtgtcgggacatagtaaggaagcccatgtctagtctggtacctttaaaccaggccatctccaacttttcaaaatgactcaaaagttgagctagccttattttaaaaactaaaagttcaaaatcagtggtgacatgaggacttatttatttaaagtgcttaagccttggttttagagtttctaagagacctagtggaatttgctattatgaaaagcatgaaaagattaagaaacctggctaaaggtcaggtgcccagcttcgaggaaaagttgggcttttagggaccgggaagcattaaaggcacagaaactttacattttgggggtcattttgttgagtaggtgaagtgagggatttgggcttgatatttggctgccccatctctatgtgggaactcaaagttaaaaacccactgtaggtaaattagaagggcagctcttgaatctgggccagtctatatcccttctgtgaagtgctaacagccaggctatctgtagcctgggtgggagcccagataatgtgagctggtaaagggtattggaaaagtgccaagaaatgccaagcttttggttcgtaaccactataaaaagtttatgaacatgtcagaggaatggatgagtgatttgtgaggtcttaactagataccccggtttcttccttgttttggcttcttttcagaatgccgggagagtacatgcagggattccatctaatcaccctcagcactctttctctggtcctgctggatagatttagatttcctttctttttttagggcctcagtctgctatctcctttggtggctaccaccactcactcccttgatatcttctactcccttgccttcaccttgcttaagactgagaagggagttagattttgtcactagctcttctttttcctcactgtgtaccccaccaaacaagattagttcaagttaaaaagaacctactggaggtaaactgggagagcaagtgttggatctgggctggtccctttcccataaaattaggtccctggttgtatgttcccatagcaccccatacttcctctctcagaataatcatttcccttgtaatgctcagcatccgcatcctgcttgactgcaaacttgctgaaggtagggactgtttgtcttggacttcgctgccagtccttagaacagtgtctgggacacagtgtgttctcaaatatttgttgctggaataaatgaatgaactaaaaaaaaaagaaggacaaagaataccaggatcaaagaaaaaagggggggcgcg

SEQ ID NO: 333109 - DNA, 4260 bp, Homo sapiens
gagctcggcgcacctgggctgggcaggtaagggctggtgcgggacggggagaggaacctgcagtccctacttgggtagagccaggcgccccttggctaagacgtcgaggagcgtggtagcgacgggtgatcttcgctgcggacttggttcggagggacgtccgcttctggtggacagattgagcaaagaatctttgagcggtcaagggaaagacaagccgacttctaaacgcttccagattccctggaaacatgccacccggcatagccctcaacaagaagaggaaaataccatttttaaggcctgggctgtagagacagggaagtaccaggaaggggtggatgaccctgacccagctaaatggaaggcccagctgcgctgtgctctcaataagagcagagaattcaacctgatgtatgatggcaccaaggaggtgcccatgaacccagtgaagatatatcaagtgtgtgacatccctcagccccagggctcgatcattaacccaggatccacagggtctgctccctgggatgagaaggataatgatgtggatgaagaagatgaggaagatgagctggatcagtcgcagcaccatgttcccatccaggacaccttccccttcctgaacatcaatggttctcccatggcgccagccagtgtgggcaattgcagtgtgggcaactgcagcccggaggcagtgtggcccaaaactgaacccctggagatggaagtaccccaggcacctatacagcccttctatagctctccagaactgtggatcagctctctcccaatgactgacctggacatcaagtttcagtaccgtgggaaggagtacgggcagaccatgaccgtgagcaaccctcagggctgccgactcttctatggggacctgggtcccatgcctgaccaggaggagctctttggtcccgtcagcctggagcaggtcaaattcccaggtcctgagcatattaccaatgagaagcagaagctgttcactagcaagctgctggacgtcatggacagaggactgatcctggaggtcagcggtcatgccatttatgccatcaggctgtgccagtgcaaggtgtactggtctgggccatgtgccccatcacttgttgctcccaacctgattgagagacaaaagaaggtcaagctattttgtctggaaacattccttagcgatctcattgcccaccagaaaggacagatagagaagcagccaccgtttgagatctacttatgctttggggaagaatggccagatgggaaaccattggaaaggaaactcatcttggttcaggtcattccagtagtggctcggatgatctacgagatgttttctggtgatttcacacgatcctttgatagtggcagtgtccgcctgcagatctcaaccccagacatcaaggataacatcgttgctcagctgaagcagctgtaccgcatccttcaaacccaggagagctggcagcccatgcagcccacccccagcatgcaactgccccctgccctgcctccccagtaattgtgaatgccatcttcttccttctcttttttataatattgtacatatggatttttttattgtttagatttaaccagcttttaaatctctcttttctctaacagtgttagaagtttgtgattctccaaatatgcctagatttaaagctgatttaatttatggaaaaatcacccttcagactttgcttttctttttcaaatctcctaatggtagtatgatatagcatagtagaaggagatttggcctgggagtttggacaccaaagttctagctgcagctttgcttccaatgtgaccttgaacaagtcctttaacctctgggcttcagatttattgcttataaagtgaagagattggagtagtgcctgaaattgcatccagctttagaacggactcaatgaccttcttctacttgtacaaggctaaactgcctggaacagaatccttctgcattgttcttgtaccacatttttccttggttttgttaaagtttcctcaagcactgatttgtccaggatcgagctctgtttgacctgttctgctagtatagtaagctggctccctgatgggggaagtgagagggagaggagctggctggctggttgcttagaaactatgcttgatatctaaatagaaatgggtgccaaagtctgaaagtcacccagcctgtggagtgaaagctcacaaatttggcttctaaagggaagctgttgacacagaaagcctagggattctgtggaagaataggttgtcaggcatttaccttattaccactcaaataccagtgtgtgtgtgttgggggggcggcagggagagggggtaggtgacagtatgtgactcaggtgttagctttaagaggaaagagctctatttttcttgttttcttctctgagctagactgagctggggatctaagatgtacttctctgactacaaaagggacagtatcatttagattttttgcagttggaagaaatgggttgttgagtgtgttaaggctgggatgaagaagggctgggcagtactcttctggaaaggctcacctagcacgaacctgcttgtctcccttactagtggaggtatctgagtgtgaacagtgaaggtaaagagtggtatagaacaatgcagctgtatctgtcacaaactggtcttatctagaaacatctgctgagtctctaaccctttcagctttctcttcttttttgagacagagtcttgctttgttgcccaggctggagtgcagtggcaagtcaccacttactgcagctttaagctcctgggctcaagcaatcgtcctgccccagcctcctgagtagttgggacaacagtcgtgcactatgatgcttggctaattttttttttatttttgtagagatgaggtcttgctatgttgcccaggctggtcttgaactcctgggctcaagcaatctgggacctaaatggcaaataagatgctaatctgtggttgcaagccccagtcctcttgaatagtgatgcctatctgtctgtgtcgggacatagtaaggaagcccatgtctagtctggtacctttaaaccaggccatctccaacttttcaaaatgactcaaaagttgagctagccttattttaaaaactaaaagttcaaaatcagtggtgacatgaggacttatttatttaaagtgcttaagccttggttttagagtttctaagagacctagtggaatttgctattatgaaaagcatgaaaagattaagaaacctggctaaaggtcaggtgcccagcttcgaggaaaagttgggcttttagggaccgggaagcattaaaggcacagaaactttacattttgggggtcattttgttgagtaggtgaagtgagggatttgggcttgatatttggctgccccatctctatgtgggaactcaaagttaaaaacccactgtaggtaaattagaagggcagctcttgaatctgggccagtctatatcccttctgtgaagtgctaacagccaggctatctgtagcctgggtgggagcccagataatgtgagctggtaaagggtattggaaaagtgccaagaaatgccaagcttttggttcgtaaccactataaaaagtttatgaacatgtcagaggaatggatgagtgatttgtgaggtcttaactagataccccggtttcttccttgttttggcttcttttcagaatgccgggagagtacatgcagggattccatctaatcaccctcagcactctttctctggtcctgctggatagatttagatttcctttctttttttagggcctcagtctgctatctcctttggtggctaccaccactcactcccttgatatcttctactcccttgccttcaccttgcttaagactgagaagggagttagattttgtcactagctcttctttttcctcactgtgtaccccaccaaacaagattagttcaagttaaaaagaacctactggaggtaaactgggagagcaagtgttggatctgggctggtccctttcccataaaattaggtccctggttgtatgttcccatagcaccccatacttcctctctcagaataatcatttcccttgtaatgctcagcatccgcatcctgcttgactgcaaacttgctgaaggtagggactgtttgtcttggacttcgctgccagtccttagaacagtgtctgggacacagtgtgttctcaaatatttgttgctggaataaatgaatgaactaaa

SEQ ID NO: 333110 - DNA, 3521 bp, Homo sapiens
tcattaagcggagcagaagctgttcactagcaagctgctggacgtcatggacagatgactgacctggacatcaagtttcagtaccgtgggaaggagtacgggcagaccatgaccgtgagcaaccctcagggctgccgactcttctatggggacctgggtcccatgcctgaccaggaggagctctttggtcccgtcagcctggagcaggtcaaattcccaggtcctgagcatattaccaatgagaagcagaagctgttcactagcaagctgctggacgtcatggacagaggactgatcctggaggtcagcggtcatgccatttatgccatcaggctgtgccagtgcaaggtgtactggtctgggccatgtgccccatcacttgttgctcccaacctgattgagagacaaaagaaggtcaagctattttgtctggaaacattccttagcgatctcattgcccaccagaaaggacagatagagaagcagccaccgtttgagatctacttatgctttggggaagaatggccagatgggaaaccattggaaaggaaactcatcttggttcaggtcattccagtagtggctcggatgatctacgagatgttttctggtgatttcacacgatcctttgatagtggcagtgtccgcctgcagatctcaaccccagacatcaaggataacatcgttgctcagctgaagcagctgtaccgcatccttcaaacccaggagagctggcagcccatgcagcccacccccagcatgcaactgccccctgccctgcctccccagtaattgtgaatgccatcttcttccttctcttttttataatattgtacatatggatttttttattgtttagatttaaccagcttttaaatctctcttttctctaacagtgttagaagtttgtgattctccaaatatgcctagatttaaagctgatttaatttatggaaaaatcacccttcagactttgcttttctttttcaaatctcctaatggtagtatgatatagcatagtagaaggagatttggcctgggagtttggacaccaaagttctagctgcagctttgcttccaatgtgaccttgaacaagtcctttaacctctgggcttcagatttattgcttataaagtgaagagattggagtagtgcctgaaattgcatccagctttagaacggactcaatgaccttcttctacttgtacaaggctaaactgcctggaacagaatccttctgcattgttcttgtaccacatttttccttggttttgttaaagtttcctcaagcactgatttgtccaggatcgagctctgtttgacctgttctgctagtatagtaagctggctccctgatgggggaagtgagagggagaggagctggctggctggttgcttagaaactatgcttgatatctaaatagaaatgggtgccaaagtctgaaagtcacccagcctgtggagtgaaagctcacaaatttggcttctaaagggaagctgttgacacagaaagcctagggattctgtggaagaataggttgtcaggcatttaccttattaccactcaaataccagtgtgtgtgtgttgggggggcggcagggagagggggtaggtgacagtatgtgactcaggtgttagctttaagaggaaagagctctatttttcttgttttcttctctgagctagactgagctggggatctaagatgtacttctctgactacaaaagggacagtatcatttagattttttgcagttggaagaaatgggttgttgagtgtgttaaggctgggatgaagaagggctgggcagtactcttctggaaaggctcacctagcacgaacctgcttgtctcccttactagtggaggtatctgagtgtgaacagtgaaggtaaagagtggtatagaacaatgcagctgtatctgtcacaaactggtcttatctagaaacatctgctgagtctctaaccctttcagctttctcttcttttttgagacagagtcttgctttgttgcccaggctggagtgcagtggcaagtcaccacttactgcagctttaagctcctgggctcaagcaatcgtcctgccccagcctcctgagtagttgggacaacagtcgtgcactatgatgcttggctaattttttttttatttttgtagagatgaggtcttgctatgttgcccaggctggtcttgaactcctgggctcaagcaatctgggacctaaatggcaaataagatgctaatctgtggttgcaagccccagtcctcttgaatagtgatgcctatctgtctgtgtcgggacatagtaaggaagcccatgtctagtctggtacctttaaaccaggccatctccaacttttcaaaatgactcaaaagttgagctagccttattttaaaaactaaaagttcaaaatcagtggtgacatgaggacttatttatttaaagtgcttaagccttggttttagagtttctaagagacctagtggaatttgctattatgaaaagcatgaaaagattaagaaacctggctaaaggtcaggtgcccagcttcgaggaaaagttgggcttttagggaccgggaagcattaaaggcacagaaactttacattttgggggtcattttgttgagtaggtgaagtgagggatttgggcttgatatttggctgccccatctctatgtgggaactcaaagttaaaaacccactgtaggtaaattagaagggcagctcttgaatctgggccagtctatatcccttctgtgaagtgctaacagccaggctatctgtagcctgggtgggagcccagataatgtgagctggtaaagggtattggaaaagtgccaagaaatgccaagcttttggttcgtaaccactataaaaagtttatgaacatgtcagaggaatggatgagtgatttgtgaggtcttaactagataccccggtttcttccttgttttggcttcttttcagaatgccgggagagtacatgcagggattccatctaatcaccctcagcactctttctctggtcctgctggatagatttagatttcctttctttttttagggcctcagtctgctatctcctttggtggctaccaccactcactcccttgatatcttctactcccttgccttcaccttgcttaagactgagaagggagttagattttgtcactagctcttctttttcctcactgtgtaccccaccaaacaagattagttcaagttaaaaagaacctactggaggtaaactgggagagcaagtgttggatctgggctggtccctttcccataaaattaggtccctggttgtatgttcccatagcaccccatacttcctctctcagaataatcatttcccttgtaatgctcagcatccgcatcctgcttgactgcaaacttgctgaaggtagggactgtttgtcttggacttcgctgccagtccttagaacagtgtctgggacacagtgtgttctcaaatatttgttgctggaataaatgaatgaactaaa

SEQ ID NO: 333111 - DNA, 1493 bp, Homo sapiens
gagctcggcgcacctgggctgggcaggtaagggctggtgcgggacggggagaggaacctgcagtccctacttgggtagagccaggcgccccttggctaagacgtcgaggagcgtggtagcgacgggtgatcttcgctgcggacttggttcggagggacgtccgcttctggtggacagattgagcaaagaatctttgagcggtcaagggaaagacaagccgactcttcagatccctgtggacacactgcctgctcttccatatcatggccctccacccccgcagagtccggctaaagccctggctggtggcccaggtggatagtggcctctaccctgggctcatctggctacacagggactctaaacgcttccagattccctggaaacatgccacccggcatagccctcaacaagaagaggaaaataccatttttaaggcctgggctgtagagacagggaagtaccaggaaggggtggatgaccctgacccagctaaatggaaggcccagctgcgctgtgctctcaataagagcagagaattcaacctgatgtatgatggcaccaaggaggtgcccatgaacccagtgaagatatatcaagtgtgtgacatccctcagccccagggctcgatcattaacccaggatccacagggtctgctccctgggatgagaaggataatgatgtggatgaagaagatgaggaagatgagctggatcagtcgcagcaccatgttcccatccaggacaccttccccttcctgaacatcaatggttctcccatggcgccagccagtgtgggcaattgcagtgtgggcaactgcagcccggaggcagtgtggcccaaaactgaacccctggagatggaagtaccccaggcacctatacagcccttctatagctctccagaactgtggatcagctctctcccaatgactgacctggacatcaagtttcagtaccgtgggaaggagtacgggcagaccatgaccgtgagcaaccctcagggctgccgactcttctatggggacctgggtcccatgcctgaccaggaggagctctttggtcccgtcagcctggagcaggtcaaattcccaggtcctgagcatattaccaatgagaagcagaagctgttcactagcaagctgctggacgtcatggacagaggactgatcctggaggtcagcggtcatgccatttatgccatcaggctgtgccagtgcaaggtgtactggtctgggccatgtgccccatcacttgttgctcacggtcatggtctgcccgtactccttcccacggtactgaaacttgatgtccaggtcagtcattgggagagagctgatccacagttctggagagctatagaagggctgtataggtgcctggggtacttccatctccaggggttcagttttgggccacactgcctccgggctgcagttgcccacactcaattcccacactggctgcgccatggagtaatgcaggtaccgagt

SEQ ID NO: 333112 - DNA, 244 bp, Homo sapiens
agaggggagatgagagaagcagatgagggaagggcagcagagtggtcagtgataataatgaattgacattcttaccagatacatttctgattacaagctaaaaagaataggatctctccagcctgtgtatgtctcctcttccctggaggagaggcaggagtcatattattcattaatctatgtcttagcccaagtttcctacaaaaaaaagaaaggattctgaggcaaagtttacatgctattg

SEQ ID NO: 333113 - DNA, 406 bp, Homo sapiens
gctgaggcaggaagattgcttgaaggtaggagttcgtgactgcctgggcaacatagtgagaccctgtctctaaaattttttaaaaaaaaatttagctgggcatggtggtgtgctcctgaggctaaggcaggaggatcccttgaggccaggagttcaaaaccaacctgggcacctacagaaaaacaagtgtttgtcaccttcctgccctttcacaggatacagataagaagggagtaacaccagcagctggtttttatgccgccctgtgtagctcatttgcttcatttctgttcaaagggtccttggaaattgcttattcctaccacctaaaactacacctgccatagttagtgctccaaatttgtcgaataattttccctttttaaattctggttcccactgctgc

SEQ ID NO: 333114 - DNA, 259 bp, Homo sapiens
ttaatgggtgcagcacaccaacatggcacatgtatacatatgtaacaaacttacacattgcgcacatgtaccctagaacttaaagtataattaaaaaaaaagaaatttaatctccaatgtagcagtattgacaagtggagcctttaagaggtaactcaatcatgaaagctctgtcctaatgaatgaattaatgggttaatgaattaatgaagcatcataggaggagaactagtggctgtataagagaagaaagacctga

SEQ ID NO: 333115 - DNA, 458 bp, Homo sapiens
tctttgtttttgtctcaaaatttgcacattgtccagttccatattaggtacttaagtcattattgaatgaataggattgatggggcagaggatcaaaggactgaatctttggggaagagtcaagcactattgaggggtaaaaggagaaagaaaactgcatactataaaagtttatggtctattctgacttctctccccctttgaaacttttttttttctccttgctgcattttcatccattatcctgagacctatttccacagtttatctcagtcagttaggataaagtttagtataatatcatctacatttctggagtcttattgcaaagaccctgtatgagatggtcacctgatcaggatcatttaattgcaactagattttcagctttttaggggtatgaacaacagtgcatgcactgttgttcatacctgtatcgggggtagggcaccaggttg

SEQ ID NO: 333116 - DNA, 551 bp, Homo sapiens
atcctatcacatgaataccttgcagttcacttcagcaatgcattatctttaggcttgtaagcagtttctaattattcaaacattttgttttctatacctggcatatagtgaatgcctaataaatatttaggaaacaaatatcattaagaacattcttacggttaaatctttaagcataccaattgacttatttgctttggatatattccttagaagtggaattgctgggtcaatctatgtgtgcatattaagaagccatgacacacagaaagatggggacaggacacttgctcctgtaggctagagaaagcctggcttcctgcagttttgaggaccagagtgtcctcctccaggaactcttgtagcctattatctccagaaagtggaactgggtctgctactcttttatctgttgagttttccaagagttacccaagagttcaacataactatactcctctggagctctgtccagcctgcctactgaattaggcttccccccatcaactgcctggtgcctgcttgatctgagcatttgtggccctctcaac

SEQ ID NO: 333117 - DNA, 462 bp, Homo sapiens
ccttcctctttctatatgtcatatggtgggaaatgccctttagtacttactcaggagttagttcctctgggaagccttctgttctagtttccttttgttacagcactttcacattgaattctgacgttctctgtacttatctgctttgtgagactgtgagcttccttaggcagtagctacttgtattcttagcaccttgcccagtgccaggaaacccttattaagtaaatgaaaagacagaactgacagactggaattagagctcaagcttgcctcaatctcaagccattaagatgaaggggagccgggcgtggtggctcacgcctctaatcccagcactttaggaggtagtttgcttgagcccaggagttcaagaccagcctgggcaacgtggcaaaaccccatttctacaaaaaatataaaaattagttgggcgtgggggtgtgtgcctgtactcaggat

SEQ ID NO: 333118 - DNA, 365 bp, Homo sapiens
ctcctgcacccgttggatttctttctaggctgccaattctgttctattaggatggataaagagggacaaagacacacagctatccatgtgccaagaccatagttttaatcatgatagctggtggtgaaagcttattcttgttcctcttcaaaattgtttttgttgggtcaggcacagtggctcacgcctgtaatcccaacaccttgggaggctgaggtgggtggatcacctgaggtcaggagttcaagaccagcctggccaacatgatgaaaccccgtctctgctaaaaatacaaaaatagcccggtatggtggcctgtgcttgtaatcccagctacttcggaggctgaggcacaagaatcgctt

SEQ ID NO: 333119 - DNA, 387 bp, Homo sapiens
ataaaacaaaaagagtatgggtaaaatcaaactgcagtaatgaggtctagtaaaataaagacaggaaaatcttgattggatttgacaatatggataaatcattggcaaacttcatcagaaattttagtgataaggaggagtgaaatacagatgacagcgggtaagagtgaatggaaagtgaaaatgtggagatgaactctttcaagaacttgtggctgagaaaggaataagggaactgaaagctaagggtaaaggcagtatttctttaaaaatgggggagaccacagaacattttcatatggaaagagccaggagaatataaaagttttgagattcaagagtaagggagagatggaaagtgatgggatctattgcacaggtggagga

SEQ ID NO: 333120 - DNA, 131 bp, Homo sapiens
ccctggctccagatgaacttaaagggttttacccaatctcattcatacaaacatttttattttactatgttaacattctaatattctttccatgggattctgatccaggatgctaaagtggttagtcgaat

SEQ ID NO: 333121 - DNA, 553 bp, Homo sapiens
tgaggagaaggtatcgagtagctccagtgtactgaactggaggtgtagtcatccattgtagacagaaggcatcaagagatgactgtggactgttcttccatactgtgctgcttgtgaatttatccatgatagaaccagaatataaaaacactgaatcgtgtgatgctaggtaagctgatgcctatgaatactttcatgattcagtttctaactattagtatgagttatataccttacacatagttccaacagatgaattcaattattttgttgtattaaaaaaattgattggggcttaaaatatttttcttaatatgtacattttattctggaattctcatttcatctgtttgtttttggtcagtttagtaaccagatgggataataaagatcctttctttttcttcttcttgaaaaaaaatcgtaacaattaatgtgatattcatgaagtgcttcaaatttcttgagagaatataatgttagtcatttttattcataattatgaataatgaaagcatacttaatattattgaaagcttatcttcagcctaga

SEQ ID NO: 333122 - DNA, 759 bp, Homo sapiens
ctggcacccggccagcgcgggcagggccacgggtgcccggctgtttcccgggtgtggaaggcgctcaaggtgcgcggcccggggcgcgctactgggggcgccctccgcggtgggcagcgcgccagggatcggcctgggcagccgcggggcgcgcgaaggctgcgctttccctacggcccccctcgcttcctccggcacggcggcaacggagatttcctctcggggaaactacgcggatccttttcggggatcctcgccccgccccagttctccgccccctcccctttgctggggcgcctgggctggcccgcgcaggggaggaggctctggcagcctgggcagggaggcggcggggggccgcggagccgctggccatcgattctccccgccatgtgacgccgtccttagccctgcgacccccagcgcgtcccgggcctgcgcctccgccccgccgcgcagcgcacgatgcttctgccgggacgcgcacgccaaccgccgacgccccagcccgtgcagcatcccggcctccgccggcaggtagagccgccggggcagctcctgcgcctcttctactgcactgtcctggtctgctccaaagagatctcagcgctcaccgacttctctgaacccatgtgatgcttcccacttcaaagtgcactaacgccagtcagcttgaaggcatcccctgagctgctggcaaacaaggcctttttacccacagattaacctcttatttgttttaataaatgatcaaaactt

SEQ ID NO: 333123 - DNA, 2063 bp, Homo sapiens
ctggcacccggccagcgcgggcagggccacgggtgcccggctgtttcccgggtgtggaaggcgctcaaggtgcgcggcccggggcgcgctactgggggcgccctccgcggtgggcagcgcgccagggatcggcctgggcagccgcggggcgcgcgaaggctgcgctttccctacggcccccctcgcttcctccggcacggcggcaacggagatttcctctcggggaaactacgcggatccttttcggggatcctcgccccgccccagttctccgccccctcccctttgctggggcgcctgggctggcccgcgcaggggaggaggctctggcagcctgggcagggaggcggcggggggccgcggagccgctggccatcgattctccccgccatgtgacgccgtccttagccctgcgacccccagcgcgtcccgggcctgcgcctccgccccgccgcgcagcgcacgatgcttctgccgggacgcgcacgccaaccgccgacgccccagcccgtgcagcatcccggcctccgccggcaggtagagccgccggggcagctcctgcgcctcttctactgcactgtcctggtctgctccaaagagatctcagcgctcaccgacttctctggttacctaaccaaactcctgcaaaaccacaccacctatgcctgtgatggggactatttgaatctacagtgccctcggcattctacgataagtgtccaatcggcattttatgggcaagattaccaaatgtgtagttcccagaagcctgcctcccagagggaagacagcttaacctgtgtggcagccaccaccttccagaaggtgctggacgaatgccagaaccagcgggcctgccacctcctggtcaatagccgtgtttttggacctgacctttgtccaggaagcagtaaatacctcctggtctcctttaaatgccaacctaatgaattaaaaaacaaaaccgtgtgtgaagaccaggagctgaaactgcactgccatgaatccaagttcctcaacatctactctgcgacctacggcaggaggacccaggaaagggacatctgctcctccaaggcagagcggctcccccctttcgattgcttgtcttactcagctttgcaagtcctatcccgaaggtgctatgggaagcagagatgcaaaatcatcgtcaacaatcaccattttggaagcccctgtttgccaggcgtgaaaaaatacctcactgtgacctacgcatgtgttcccaagaacatactcacagcgattgatccagccattgctaatctaaaaccttctttgaagcagaaagatggtgaatatggtataaacttcgacccaagcggatcgaaggttctgaggaaagatggaattcttgttagcaactctctggcagcctttgcttacattagagcccacccggagagagctgccctgctgttcgtgtccagtgtctgcatcggcctggccctcacactgtgcgccctggtcatcagagagtcctgtgccaaggacttccgcgacttgcagctggggagggagcagctggtgccaggaagtgacaaggtcgaggaggacagcgaggatgaagaagaggaggaggacccctctgagtctgatttcccaggggaactgtcggggttctgtaggacttcatatcctatatacagttccatagaagctgcagagctcgcagaaaggattgagcgcagggagcaaatcattcaggaaatatggatgaacagtggtttggacacctcgctcccaagaaacatgggccagttctactgaaaaccacatgcatcttgatgcgatcgcactttctgaagaaggaaggatcccaaatgcccctccagttctggttcacctgtaccttctatgaaggagaattcgtcatgtcattcaacactcgtgaggccaggaagctattaaagggatgtttcaagctgtttctagcacattccaaaataaatgaggagggaagagtcaaaaaaaacaaacaccacacaccaccacccaacccaaaaccacacacaccaccaccacacccaacaacgcaaaac

SEQ ID NO: 333124 - DNA, 1757 bp, Homo sapiens
caggtacccgcacccggcaagcagccacggagcccctcgcgcacttgtcctcgatacccttgagttggggctacgcaggccactcctaggccactggctgggcgtccgaacgtgggtcaccccgcgcacagtctagaggttcagaaagatgctgtggcccactttaaaacaaagcccaattattagcgctcggcggctgtttgcgccggtgcagtgtcagatcccccagcgctgcggacaaccagcacccaaaggaagccgagctggagctaaagatcccggctccggagccatctgaccggttttgagacctccagctcgtcgccgtcctggctgcgagagcttgggcacggcgccggggctcagtctcctcttctgtggaatggcgataactgttacctaaccaaactcctgcaaaaccacaccacctatgcctgtgatggggactatttgaatctacagtgccctcggcattctacgataagtgtccaatcggcattttatgggcaagattaccaaatgtgtagttcccagaagcctgcctcccagagggaagacagcttaacctgtgtggcagccaccaccttccagaaggtgctggacgaatgccagaaccagcgggcctgccacctcctggtcaatagccgtgtttttggacctgacctttgtccaggaagcagtaaatacctcctggtctcctttaaatgccaacctaatgaattaaaaaacaaaaccgtgtgtgaagaccaggagctgaaactgcactgccatgaatccaagttcctcaacatctactctgcgacctacggcaggaggacccaggaaagggacatctgctcctccaaggcagagcggctcccccctttcgattgcttgtcttactcagctttgcaagtcctatcccgaaggtgctatgggaagcagagatgcaaaatcatcgtcaacaatcaccattttggaagcccctgtttgccaggcgtgaaaaaatacctcactgtgacctacgcatgtgttcccaagaacatactcacagcgattgatccagccattgctaatctaaaaccttctttgaagcagaaagatggtgaatatggtataaacttcgacccaagcggatcgaaggttctgaggaaagatggaattcttgttagcaactctctggcagcctttgcttacattagagcccacccggagagagctgccctgctgttcgtgtccagtgtctgcatcggcctggccctcacactgtgcgccctggtcatcagagagtcctgtgccaaggacttccgcgacttgcagctggggagggagcagctggtgccaggaagtgacaaggtcgaggaggacagcgaggatgaagaagaggaggaggacccctctgagtctgatttcccaggggaactgtcggggttctgtaggacttcatatcctatatacagttccatagaagctgcagagctcgcagaaaggattgagcgcagggagcaaatcattcaggaaatatggatgaacagtggtttggacacctcgctcccaagaaacatgggccagttctactgaaaaccacatgcatcttgatgcgatcgcactttctgaagaaggaaggatcccaaatgcccctccagttctggttcacctgtaccttctatgaaggagaattcgtcatgtcattcaacactcgtgaggccaggaagctattaaagggatgtttcaagctgtttctagcacattccaaaataaatgaggagggaagagtc

SEQ ID NO: 333125 - DNA, 1934 bp, Homo sapiens
ctggcacccggccagcgcgggcagggccacgggtgcccggctgtttcccgggtgtggaaggcgctcaaggtgcgcggcccggggcgcgctactgggggcgccctccgcggtgggcagcgcgccagggatcggcctgggcagccgcggggcgcgcgaaggctgcgctttccctacggcccccctcgcttcctccggcacggcggcaacggagatttcctctcggggaaactacgcggatccttttcggggatcctcgccccgccccagttctccgccccctcccctttgctggggcgcctgggctggcccgcgcaggggaggaggctctggcagcctgggcagggaggcggcggggggccgcggagccgctggccatcgattctccccgccatgtgacgccgtccttagccctgcgacccccagcgcgtcccgggcctgcgcctccgccccgccgcgcagcgcacgatgcttctgccgggacgcgcacgccaaccgccgacgccccagcccgtgcagcatcccggcctccgccggcaggtagagccgccggggcagctcctgcgcctcttctactgcactgtcctggtctgctccaaagagatctcagcgctcaccgacttctctggttacctaaccaaactcctgcaaaaccacaccacctatgcctgtgatggggactatttgaatctacagtgccctcggcattctacgataagtgtccaatcggcattttatgggcaagattaccaaatgtgtagttcccagaagcctgcctcccagagggaagacagcttaacctgtgtggcagccaccaccttccagaaggtgctggacgaatgccagaaccagcgggcctgccacctcctggtcaatagccgtgtttttggacctgacctttgtccaggaagcagtaaatacctcctggtctcctttaaatgccaacctaatgaattaaaaaacaaaaccgtgtgtgaagaccaggagctgaaactgcactgccatgaatccaagttcctcaacatctactctgcgacctacggcaggaggacccaggaaagggacatctgctcctccaaggcagagcggctcccccctttcgattgcttgtcttactcagctttgcaagtcctatcccgaaggtgctatgggaagcagagatgcaaaatcatcgtcaacaatcaccattttggaagcccctgtttgccaggcgtgaaaaaatacctcactgtgacctacgcatgtgttcccaagaacatactcacagcgattgatccagccattgctaatctcggatcgaaggttctgaggaaagatggaattcttgttagcaactctctggcagcctttgcttacattagagcccacccggagagagctgccctgctgttcgtgtccagtgtctgcatcggcctggccctcacactgtgcgccctggtcatcagagagtcctgtgccaaggacttccgcgacttgcagctggggagggagcagctggtgccaggaagtgacaaggtcgaggaggacagcgaggatgaagaagaggaggaggacccctctgagtctgatttcccaggggaactgtcggggttctgtaggacttcatatcctatatacagttccatagaagctgcagagctcgcagaaaggattgagcgcagggagcaaatcattcaggaaatatggatgaacagtggtttggacacctcgctcccaagaaacatgggccagttctactgaaaaccacatgcatcttgatgcgatcgcactttctgaagaaggaaggatcccaaatgcccctccagttctggttcacctgtaccttctatgaaggagaattcgtcatgtcattcaacactcgtgaggccaggaagctattaaagggatgtttcaagctgtttctagcacattccaaaataaatgaggagggaagagtc

SEQ ID NO: 333126 - DNA, 1791 bp, Homo sapiens
ctggcacccggccagcgcgggcagggccacgggtgcccggctgtttcccgggtgtggaaggcgctcaaggtgcgcggcccggggcgcgctactgggggcgccctccgcggtgggcagcgcgccagggatcggcctgggcagccgcggggcgcgcgaaggctgcgctttccctacggcccccctcgcttcctccggcacggcggcaacggagatttcctctcggggaaactacgcggatccttttcggggatcctcgccccgccccagttctccgccccctcccctttgctggggcgcctgggctggcccgcgcaggggaggaggctctggcagcctgggcagggaggcggcggggggccgcggagccgctggccatcgattctccccgccatgtgacgccgtccttagccctgcgacccccagcgcgtcccgggcctgcgcctccgccccgccgcgcagcgcacgatgcttctgccgggacgcgcacgccaaccgccgacgccccagcccgtgcagcatcccggcctccgccggcaggtagagccgccggggcagctcctgcgcctcttctactgcactgtcctggtctgctccaaagagatctcagcgctcaccgacttctctgaaggtgctggacgaatgccagaaccagcgggcctgccacctcctggtcaatagccgtgtttttggacctgacctttgtccaggaagcagtaaatacctcctggtctcctttaaatgccaacctaatgaattaaaaaacaaaaccgtgtgtgaagaccaggagctgaaactgcactgccatgaatccaagttcctcaacatctactctgcgacctacggcaggaggacccaggaaagggacatctgctcctccaaggcagagcggctcccccctttcgattgcttgtcttactcagctttgcaagtcctatcccgaaggtgctatgggaagcagagatgcaaaatcatcgtcaacaatcaccattttggaagcccctgtttgccaggcgtgaaaaaatacctcactgtgacctacgcatgtgttcccaagaacatactcacagcgattgatccagccattgctaatctaaaaccttctttgaagcagaaagatggtgaatatggtataaacttcgacccaagcggatcgaaggttctgaggaaagatggaattcttgttagcaactctctggcagcctttgcttacattagagcccacccggagagagctgccctgctgttcgtgtccagtgtctgcatcggcctggccctcacactgtgcgccctggtcatcagagagtcctgtgccaaggacttccgcgacttgcagctggggagggagcagctggtgccaggaagtgacaaggtcgaggaggacagcgaggatgaagaagaggaggaggacccctctgagtctgatttcccaggggaactgtcggggttctgtaggacttcatatcctatatacagttccatagaagctgcagagctcgcagaaaggattgagcgcagggagcaaatcattcaggaaatatggatgaacagtggtttggacacctcgctcccaagaaacatgggccagttctactgaaaaccacatgcatcttgatgcgatcgcactttctgaagaaggaaggatcccaaatgcccctccagttctggttcacctgtaccttctatgaaggagaattcgtcatgtcattcaacactcgtgaggccaggaagctattaaagggatgtttcaagctgtttctagcacattccaaaataaatgaggagggaagagtc

SEQ ID NO: 333127 - DNA, 1338 bp, Homo sapiens
ctggcacccggccagcgcgggcagggccacgggtgcccggctgtttcccgggtgtggaaggcgctcaaggtgcgcggcccggggcgcgctactgggggcgccctccgcggtgggcagcgcgccagggatcggcctgggcagccgcggggcgcgcgaaggctgcgctttccctacggcccccctcgcttcctccggcacggcggcaacggagatttcctctcggggaaactacgcggatccttttcggggatcctcgccccgccccagttctccgccccctcccctttgctggggcgcctgggctggcccgcgcaggggaggaggctctggcagcctgggcagggaggcggcggggggccgcggagccgctggccatcgattctccccgccatgtgacgccgtccttagccctgcgacccccagcgcgtcccgggcctgcgcctccgccccgccgcgcagcgcacgatgcttctgccgggacgcgcacgccaaccgccgacgccccagcccgtgcagcatcccggcctccgccggcaggtagagccgccggggcagctcctgcgcctcttctactgcactgtcctggtctgctccaaagagatctcagcgctcaccgacttctctggttacctaaccaaactcctgcaaaaccacaccacctatgcctgtgatggggactatttgaatctacagtgccctcggcattctacgataagtgtccaatcggcattttatgggcaagattaccaaatgtgtagttcccagaagcctgcctcccagagggaagacagcttaacctgtgtggcagccaccaccttccagaaggtgctggacgaatgccagaaccagcgggcctgccacctcctggtcaatagccgtgtttttggacctgacctttgtccaggaagcagtaaatacctcctggtctcctttaaatgccaacctaatgaattaaaaaacaaaaccgtgtgtgaagaccaggagctgaaactgcactgccatgaatccaagttcctcaacatctactctgcgacctacggcaggaggacccaggaaagggacatctgctcctccaaggcagagcggctcccccctttcggtatgtgcttttgtgtgtgtattagccagggttctctagagggacagaattaatagaatatatatatatatatcctatatatatcctatatgattgtgaaagtcaatacttaacacaatcacgatcttgtgatcgtgtaagttaatacttaataaactcccgtgtgtgtgtgtatgtatatatatataaatgcttgtaaacagtaatctgccaaaaataaataagtaaaagaacaagaa

SEQ ID NO: 333128 - DNA, 759 bp, Homo sapiens
caggtacccgcacccggcaagcagccacggagcccctcgcgcacttgtcctcgatacccttgagttggggctacgcaggccactcctaggccactggctgggcgtccgaacgtgggtcaccccgcgcacagtctagaggttcagaaagatgctgtggcccactttaaaacaaagcccaattattagcgctcggcggctgtttgcgccggtgcagtgtcagatcccccagcgctgcggacaaccagcacccaaaggaagccgagctggagctaaagatcccggctccggagccatctgaccggttttgagacctccagctcgtcgccgtcctggctgcgagagcttgggcacggcgccggggctcagtctcctcttctgtggaatggcgataactgttacctaaccaaactcctgcaaaaccacaccacctatgcctgtgatggggactatttgaatctacagtgccctcggcattctacgataagtgtccaatcggcattttatgggcaagattaccaaatgtgtagttcccagaagcctgcctcccagagggaagacagcttaacctgtgtggcagccaccaccttccaggtataaacttcgacccaagcggatcgaaggttctgaggaaagatggaattcttgttagcaactctctggcagcctttgcttacattagagataggtcaatgaatcaaagcttcctagaaagctgatggatttactaaagtcttgttaataaatgtgctgttcaattat

SEQ ID NO: 333129 - DNA, 282 bp, Homo sapiens
atgacaggcatgagccaccacgcccacctctgtcttttctcttgggattaatgacttccacattagctccaggaataatttctgttaaggtgatgcctggcttgacacttctggtaactcctgctgtttatctattgcttatctccagaacccatgtgatgcttcccacttcaaagtgcactaacgccagtcagcttgaaggcatcccctgagctgctggcaaacaaggcctttttacccacagattaacctcttatttgttttaataaatgatcaaaactt

SEQ ID NO: 333130 - DNA, 970 bp, Homo sapiens
ctggcacccggccagcgcgggcagggccacgggtgcccggctgtttcccgggtgtggaaggcgctcaaggtgcgcggcccggggcgcgctactgggggcgccctccgcggtgggcagcgcgccagggatcggcctgggcagccgcggggcgcgcgaaggctgcgctttccctacggcccccctcgcttcctccggcacggcggcaacggagatttcctctcggggaaactacgcggatccttttcggggatcctcgccccgccccagttctccgccccctcccctttgctggggcgcctgggctggcccgcgcaggggaggaggctctggcagcctgggcagggaggcggcggggggccgcggagccgctggccatcgattctccccgccatgtgacgccgtccttagccctgcgacccccagcgcgtcccgggcctgcgcctccgccccgccgcgcagcgcacgatgcttctgccgggacgcgcacgccaaccgccgacgccccagcccgtgcagcatcccggcctccgccggcaggtagagccgccggggcagctcctgcgcctcttctactgcactgtcctggtctgctccaaagagatctcagcgctcaccgacttctctggttacctaaccaaactcctgcaaaaccacaccacctatgcctgtgatggggactatttgaatctacagtgccctcggcattctacgataagtgtccaatcggcattttatgggcaagattaccaaatgtgtagttcccagaagcctgcctcccagagggaagacagcttaacctgtgtggcagccaccaccttccagaaggtgctggacgaatgccagaaccagcgggcctgccacctcctggtcaatagccgtgtttttggacctgacctttgccaggaagctattaaagggatgtttcaagctgtttctagcacattccaaaataaatgaggagggaagagtc

SEQ ID NO: 333131 - DNA, 1988 bp, Homo sapiens
ctggcacccggccagcgcgggcagggccacgggtgcccggctgtttcccgggtgtggaaggcgctcaaggtgcgcggcccggggcgcgctactgggggcgccctccgcggtgggcagcgcgccagggatcggcctgggcagccgcggggcgcgcgaaggctgcgctttccctacggcccccctcgcttcctccggcacggcggcaacggagatttcctctcggggaaactacgcggatccttttcggggatcctcgccccgccccagttctccgccccctcccctttgctggggcgcctgggctggcccgcgcaggggaggaggctctggcagcctgggcagggaggcggcggggggccgcggagccgctggccatcgattctccccgccatgtgacgccgtccttagccctgcgacccccagcgcgtcccgggcctgcgcctccgccccgccgcgcagcgcacgatgcttctgccgggacgcgcacgccaaccgccgacgccccagcccgtgcagcatcccggcctccgccggcaggtagagccgccggggcagctcctgcgcctcttctactgcactgtcctggtctgctccaaagagatctcagcgctcaccgacttctctggttacctaaccaaactcctgcaaaaccacaccacctatgcctgtgatggggactatttgaatctacagtgccctcggcattctacgataagtgtccaatcggcattttatgggcaagattaccaaatgtgtagttcccagaagcctgcctcccagagggaagacagcttaacctgtgtggcagccaccaccttccagaaggtgctggacgaatgccagaaccagcgggcctgccacctcctggtcaatagccgtgtttttggacctgacctttgtccaggaagcagtaaatacctcctggtctcctttaaatgccaacctaatgaattaaaaaacaaaaccgtgtgtgaagaccaggagctgaaactgcactgccatgaatccaagttcctcaacatctactctgcgacctacggcaggaggacccaggaaagggacatctgctcctccaaggcagagcggctcccccctttcgattgcttgtcttactcagctttgcaagtcctatcccgaaggtgctatgggaagcagagatgcaaaatcatcgtcaacaatcaccattttggaagcccctgtttgccaggcgtgaaaaaatacctcactgtgacctacgcatgtgttcccaagaacatactcacagcgattgatccagccattgctaatctaaaaccttctttgaagcagaaagatggtgaatatggtataaacttcgacccaagcggatcgaaggttctgaggaaagatggaattcttgttagcaactctctggcagcctttgcttacattagagcccacccggagagagctgccctgctgttcgtgtccagtgtctgcatcggcctggccctcacactgtgcgccctggtcatcagagagtcctgtgccaaggacttccgcgacttgcagctggggagggagcagctggtgccaggaagtgacaaggtcgaggaggacagcgaggatgaagaagaggaggaggacccctctgagtctgatttcccaggggaactgtcggggttctgtaggacttcatatcctatatacagttccatagaagctgcagagctcgcagaaaggattgagcgcagggagcaaatcattcaggaaatatggatgaacagtggtttggacacctcgctcccaagaaacatgggccagttctactgaaaaccacatgcatcttgatgcgatcgcactttctgaagaaggaaggatcccaaatgcccctccagttctggttcacctgtaccttctatgaaggagaattcgtcatgtcattcaacactcgtgaggccaggaagctattaaagggatgtttcaagctgtttctagcacattccaaaataaatgaggagggaagagtc

SEQ ID NO: 333132 - DNA, 1907 bp, Homo sapiens
ctggcacccggccagcgcgggcagggccacgggtgcccggctgtttcccgggtgtggaaggcgctcaaggtgcgcggcccggggcgcgctactgggggcgccctccgcggtgggcagcgcgccagggatcggcctgggcagccgcggggcgcgcgaaggctgcgctttccctacggcccccctcgcttcctccggcacggcggcaacggagatttcctctcggggaaactacgcggatccttttcggggatcctcgccccgccccagttctccgccccctcccctttgctggggcgcctgggctggcccgcgcaggggaggaggctctggcagcctgggcagggaggcggcggggggccgcggagccgctggccatcgattctccccgccatgtgacgccgtccttagccctgcgacccccagcgcgtcccgggcctgcgcctccgccccgccgcgcagcgcacgatgcttctgccgggacgcgcacgccaaccgccgacgccccagcccgtgcagcatcccggcctccgccggcaggtagagccgccggggcagctcctgcgcctcttctactgcactgtcctggtctgctccaaagagatctcagcgctcaccgacttctctggttacctaaccaaactcctgcaaaaccacaccacctatgcctgtgatggggactatttgaatctacagtgccctcggcattctacgataagtgtccaatcggcattttatgggcaagattaccaaatgtgtagttcccagaagcctgcctcccagagggaagacagcttaacctgtgtggcagccaccaccttccagaaggtgctggacgaatgccagaaccagcgggcctgccacctcctggtcaatagccgtgtttttggacctgacctttgtccaggaagcagtaaatacctcctggtctcctttaaatgccaacctaatgaattaaaaaacaaaaccgtgtgtgaagaccaggagctgaaactgcactgccatgaatccaagttcctcaacatctactctgcgacctacggcaggaggacccaggaaagggacatctgctcctccaaggcagagcggctcccccctttcgattgcttgtcttactcagctttgcaagtcctatcccgaaggtgctatgggaagcagagatgcaaaatcatcgtcaacaatcaccattttggaagcccctgtttgccaggcgtgaaaaaatacctcactgtgacctacgcatgtggtataaacttcgacccaagcggatcgaaggttctgaggaaagatggaattcttgttagcaactctctggcagcctttgcttacattagagcccacccggagagagctgccctgctgttcgtgtccagtgtctgcatcggcctggccctcacactgtgcgccctggtcatcagagagtcctgtgccaaggacttccgcgacttgcagctggggagggagcagctggtgccaggaagtgacaaggtcgaggaggacagcgaggatgaagaagaggaggaggacccctctgagtctgatttcccaggggaactgtcggggttctgtaggacttcatatcctatatacagttccatagaagctgcagagctcgcagaaaggattgagcgcagggagcaaatcattcaggaaatatggatgaacagtggtttggacacctcgctcccaagaaacatgggccagttctactgaaaaccacatgcatcttgatgcgatcgcactttctgaagaaggaaggatcccaaatgcccctccagttctggttcacctgtaccttctatgaaggagaattcgtcatgtcattcaacactcgtgaggccaggaagctattaaagggatgtttcaagctgtttctagcacattccaaaataaatgaggagggaagagtc

SEQ ID NO: 333133 - DNA, 1633 bp, Homo sapiens
caggtacccgcacccggcaagcagccacggagcccctcgcgcacttgtcctcgatacccttgagttggggctacgcaggccactcctaggccactggctgggcgtccgaacgtgggtcaccccgcgcacagtctagaggttcagaaagatgctgtggcccactttaaaacaaagcccaattattagcgctcggcggctgtttgcgccggtgcagtgtcagatcccccagcgctgcggacaaccagcacccaaaggaagccgagctggagctaaagatcccggctccggagccatctgaccggttttgagacctccagctcgtcgccgtcctggctgcgagagcttgggcacggcgccggggctcagtctcctcttctgtggaatggcgataactgttacctaaccaaactcctgcaaaaccacaccacctatgcctgtgatggggactatttgaatctacagtgccctcggcattctacgataagtgtccaatcggcattttatgggcaagattaccaaatgtgtagttcccagaagcctgcctcccagagggaagacagcttaacctgtgtggcagccaccaccttccagatgaattaaaaaacaaaaccgtgtgtgaagaccaggagctgaaactgcactgccatgaatccaagttcctcaacatctactctgcgacctacggcaggaggacccaggaaagggacatctgctcctccaaggcagagcggctcccccctttcgattgcttgtcttactcagctttgcaagtcctatcccgaaggtgctatgggaagcagagatgcaaaatcatcgtcaacaatcaccattttggaagcccctgtttgccaggcgtgaaaaaatacctcactgtgacctacgcatgtgttcccaagaacatactcacagcgattgatccagccattgctaatctaaaaccttctttgaagcagaaagatggtgaatatggtataaacttcgacccaagcggatcgaaggttctgaggaaagatggaattcttgttagcaactctctggcagcctttgcttacattagagcccacccggagagagctgccctgctgttcgtgtccagtgtctgcatcggcctggccctcacactgtgcgccctggtcatcagagagtcctgtgccaaggacttccgcgacttgcagctggggagggagcagctggtgccaggaagtgacaaggtcgaggaggacagcgaggatgaagaagaggaggaggacccctctgagtctgatttcccaggggaactgtcggggttctgtaggacttcatatcctatatacagttccatagaagctgcagagctcgcagaaaggattgagcgcagggagcaaatcattcaggaaatatggatgaacagtggtttggacacctcgctcccaagaaacatgggccagttctactgaaaaccacatgcatcttgatgcgatcgcactttctgaagaaggaaggatcccaaatgcccctccagttctggttcacctgtaccttctatgaaggagaattcgtcatgtcattcaacactcgtgaggccaggaagctattaaagggatgtttcaagctgtttctagcacattccaaaataaatgaggagggaagagtc

SEQ ID NO: 333134 - DNA, 1535 bp, Homo sapiens
ctggcacccggccagcgcgggcagggccacgggtgcccggctgtttcccgggtgtggaaggcgctcaaggtgcgcggcccggggcgcgctactgggggcgccctccgcggtgggcagcgcgccagggatcggcctgggcagccgcggggcgcgcgaaggctgcgctttccctacggcccccctcgcttcctccggcacggcggcaacggagatttcctctcggggaaactacgcggatccttttcggggatcctcgccccgccccagttctccgccccctcccctttgctggggcgcctgggctggcccgcgcaggggaggaggctctggcagcctgggcagggaggcggcggggggccgcggagccgctggccatcgattctccccgccatgtgacgccgtccttagccctgcgacccccagcgcgtcccgggcctgcgcctccgccccgccgcgcagcgcacgatgcttctgccgggacgcgcacgccaaccgccgacgccccagcccgtgcagcatcccggcctccgccggcaggtagagccgccggggcagctcctgcgcctcttctactgcactgtcctggtctgctccaaagagatctcagcgctcaccgacttctctggttacctaaccaaactcctgcaaaaccacaccacctatgcctgtgatggggactatttgaatctacagtgccctcggcattctacgataagtgtccaatcggcattttatgggcaagattaccaaatgtgtagttcccagaagcctgcctcccagagggaagacagcttaacctgtgtggcagccaccaccttccagaaggtgctggacgaatgccagaaccagcgggcctgccacctcctggtcaatagccgtgtttttggacctgacctttgtccaggaagcagtaaatacctcctggtctcctttaaatgccaacctaatgaattaaaaaacaaaaccgtgtgtgaagaccaggagctgaaactgcactgccatgaatccaagttcctcaacatctactctgcgacctacggcaggaggacccaggaaagggacatctgctcctccaaggcagagcggctcccccctttcgattgcttgtcttactcagctttgcaagtcctatcccgaaggtgctatgggaagcagagatgcaaaatcatcgtcaacaatcaccattttggaagcccctgtttgccaggcgtgaaaaaatacctcactgtgacctacgcatgtgttcccaagaacatactcacagcgattgatccagccattgctaatctaaaaccttctttgaagcagaaagatggtgaatatggtaatttttatggcttagtaccagcatttctctttaagtaaaggtataaacttcgacccaagcggatcgaaggttctgaggaaagatggaattcttgttagcaactctctggcagcctttgcttacattagagataggtcaatgaatcaaagcttcctagaaagctgatggatttactaaagtcttgttaataaatgtgctgttcaattat

SEQ ID NO: 333135 - DNA, 280 bp, Homo sapiens
  misc_feature (176)..(177): n is a, c, g, or t
  misc_feature (182)..(182): n is a, c, g, or t
  misc_feature (187)..(187): n is a, c, g, or t
  misc_feature (195)..(195): n is a, c, g, or t
  misc_feature (208)..(208): n is a, c, g, or t
  misc_feature (224)..(224): n is a, c, g, or t
gtgtgtacgagtaagaagtgagctcactcatttacaccaaccacccaactatctataaacctagccatggccatccccttatgagcgggcgcagtgattataggctttcgctctaagattaaaaatgccctagcccacttcttaccacaaggcacacctctcctgtgcagcagcgnncagcntcccnattacganatgtcaggaggancaggaagtggtatgcnggggcgccccacaacgtgctcccccgacgtacaccgtatccacatccgcagcgagc

SEQ ID NO: 333136 - DNA, 285 bp, Homo sapiens
accgaagacccctactgtatttcgactgctagaagggagagccctcaaacccctagacggagccgtcctcgggcccctgctcctgtcccccaacccttttctcacccgaagactcactcatttacaccaaccacccaactatctataaacctagccatggccatccccttatgagcgggcgcagtgattataggctttcgctctaagattaaaaatgccctagcccacttcttaccacaaggcacaccccatgctggactccgacggctccttcttcctctacag

SEQ ID NO: 333137 - DNA, 287 bp, Homo sapiens
catttatcctgctatgtcatcgcagatccaaatacgaccatgttttccataccaccaccaaagggcccctccattcctcccattttatttattccaaatcctagccatggccatccccttatgagcgggcgcagtgattataggctttcgctctaagattaaaaatgccctagcccacttcttaccacatgacccaccataattacccccatactccttacactattcctcatcacccaactaaaaatattaaatacaaattaccacctacctccctcaccaaagcc

SEQ ID NO: 333138 - DNA, 309 bp, Homo sapiens
aaaatcgctcattgcatactcttcaatcagccacatagccctcgtagtaacagccattctcatccaaaccccctgaggcttcaccggcgcagtcattctcataatcgcccacggacttacatcctcattactattctgcctagcaaacattattataataaacaccctcaccactacaatcttcctaggaacaacatatgacgcactctcccctgaactctacacaacatatttttgttcctatgaagattgtagtggtgagggttgtttattataataatgttttgtgaattcggctatgaatgatag

SEQ ID NO: 333139 - DNA, 773 bp, Homo sapiens
ggaggtaggtggtagtttgtgtttaatatttttatttgggtgatgaggaatagtgtaaggagtatgggggtaattatggtgggccatacggtagtatttagttggggcatttttaatcttatgagcgggcgcagtgattataggctttcgctctaagattaaaaatgccctagcccacttctagcccacttcttaccacaaggcacacctgcaccccttatccccacctccaaatatctcatcaacaaccgactaatcaccacccaacaatgactaatcaaactaacctcaaaacaaatgatagccatacacaacactaaaggacgaacctgatctcttatactagtatccttaatcatttttattgccacaactaacctcctcggactcctgcctcactcatttacaccaaccacccaactatctataaacctagccatggccatccccttatgagcgggcgcagtgattataggctttcgctctaagattaaaaatgccctagcccacttcttaccacaaggcacacctacaccccttatccccatactagttattatcgaaaccatcagcctactcattcaaccaatagccctggccgtacgcctaaccgctaacattactgcaggccacctactcatgcacctaattggaagcgccaccctagcaatatcaaccattaaccttccctctacacttatcatcttcacaattctaattctactgactatcctagaaatcgctgtcgccttaatccaagcctacgtttttac

SEQ ID NO: 333140 - DNA, 1191 bp, Homo sapiens
  misc_feature (47)..(47): n is a, c, g, or t
cactcatttacaccaaccacccaactatctataaacctagccatggncatcctcctactcctcattgtacccattctaatcgcaatggcattcctaatgcttaccgaacgaaaaattctaggctatatacaactacgcaaaggccccaacgttgtaggcccctacgggctactacaacccttcgctgacgccataaaactcttcaccaaagagcccctaaaacccgccacatctaccatcaccctctacatcaccgccccgaccttagctctcaccatcgctcttctactatgaacccccctccccatacccaaccccctggtcaacctcaacctaggcctcctatttattctagccacctctagcctagccgtttactcaatcctctgatcagggtgagcatcaaactcaaactacgccctgatcggcgcactgcgagcagtagcccaaacaatctcatatgaagtcaccctagccatcattctactatcaacattactaataagtggctcctttaacctctccacccttatcacaacacaagaacacctctgattactcctgccatcatgacccttggccataatatgatttatctccacactagcagagaccaaccgaacccccttcgaccttgccgaagggagtccgaactagtctcaggcttcaacatcgaatacgccgcaggccccttcgccctattcttcatagccgaatacacaaacattattataataaacaccctcaccactacaatcttcctaggaacaacatatgacgcactctcccctgaactctacacaacatattttctcactcatttacaccaaccacccaactatctataaacctagccatggccatccccttatgagcgggcgcagtgattataggctttcgctctaagattaaaaatgccctagcccacttcttaccacaaggcacacctacaccccttatccccatactagttattatcgaaaccatcagcctactcattcaaccaatagccctggccgtacgcctaaccgctaacattactgcaggccacctactcatgcacctaattggaagcgccaccctagcaatatcaaccattaaccttccctctacacttatcatcttcacaattctaattctactgactatcctagaaatcgctgtcgccttaatccaagcctacgtttttac

SEQ ID NO: 333141 - DNA, 957 bp, Homo sapiens
gaccaactcatacacctcctatgaaaaaacttcctaccactcaccctagcattacttatatgatatgtctccatacccaaccccctggtcaacctcaacctaggcctcctatttattctagccacctctagcctagccgtttactcaatcctctgatcagggtgagcatcaaactcaaactacgccctgatcggcgcactgcgagcagtagcccaaacaatctcatatgaagtcaccctagccatcattctactatcaacattactaataagtggctcctttaacctctccacccttatcacaacacaagaacacctctgattactcctgccatcatgacccttggccataatatgatttatctccacactagcagagaccaaccgaacccccttcgaccttgccgaagggagtccgaactagtctcaggcttcaacatcgaatacgccgcaggccccttcgccctattcttcatagccgaatacacaaacattattataataaacaccctcaccactacaatcttcctaggaacaacatatgacgcactctcccctgaactctacacaacatattttctcactcatttacaccaaccacccaactatctataaacctagccatggccatccccttatgagcgggcgcagtgattataggctttcgctctaagattaaaaatgccctagcccacttcttaccacaaggcacacctacaccccttatccccatactagttattatcgaaaccatcagcctactcattcaaccaatagccctggccgtacgcctaaccgctaacattactgcaggccacctactcatgcacctaattggaagcgccaccctagcaatatcaaccattaaccttccctctacacttatcatcttcacaattctaattctactgactatcctagaaatcgctgtcgccttaatccaagcctacgtttttac

SEQ ID NO: 333142 - DNA, 1277 bp, Homo sapiens
  misc_feature (47)..(47): n is a, c, g, or t
cactcatttacaccaaccacccaactatctataaacctagccatggncatcctcctactcctcattgtacccattctaatcgcaatggcattcctaatgcttaccgaacgaaaaattctaggctatatacaactacgcaaaggccccaacgttgtaggcccctacgggctactacaacccttcgctgacgccataaaactcttcaccaaagagcccctaaaacccgccacatctaccatcaccctctacatcaccgccccgaccttagctctcaccatcgctcttctactatgaacccccctccccatacccaaccccctggtcaacctcaacctaggcctcctatttattctagccacctctagcctagccgtttactcaagtctccttcattgattcgagggatgagtcagtcgaagctcaatagcgtagcgcccggatgcggcgtcacctgtcgagcgagtgtaggcccagaaacaagtgcgtcatagtgaaaggtcatgcctagcccagtcgagttctactattcaaccagttacgtaataaggtggtctcctggttaagctgcgtcgccaccgcttgatcacgagacagcagaggagacagcgctgctgagttcactgcctgccgattcgatgacgcctttgggcccagtgagatatcgatttatctaccggcagctacgcagtagacgcaagccgaaacccccttgcgaggcttgccgacaggggagtccgaactagtctcaggcttcaacatcgaatacgccgcaggccccttcgccctattcttcatagccgaatacacaaacattattataataaacaccctcaccactacaatcttcctaggaacaacatatgacgcactctcccctgaactctacacaacatattttctcactcatttacaccaaccacccaactatctataaacctagccatggccatccccttatgagcgggcgcagtgattataggctttcgctctaagattaaaaatgccctagcccacttcttaccacaaggcacacctacaccccttatccccatactagttattatcgaaaccatcagcctactcattcaaccaatagccctggccgtacgcctaaccgctaacattactgcaggccacctactcatgcacctaattggaagcgccaccctagcaatatcaaccattaaccttccctctacacttatcatcttcacaattctaattctactgactatcctagaaatcgctgtcgccttaatccaagcctacgtttttac

SEQ ID NO: 333143 - DNA, 844 bp, Homo sapiens
ctattatgtttaataagtatgaagtttaaaatattttaaaatatgaatgaaacccacctctaaactctctataaggatctattccagaatttatacaaattgttcattttttcttattgaacttgtattaagccaagggtcagcaactatgccttcaagcccaatccaacccccacctccatttttataaatgaagttttactggaagacagccactattcatttatgtattatctatggttatttgtaggccacactagcagagaccaaccgaacccccttcgaccttgccgaagggagtccgaactagtctcaggcttcaacatcgaatacgccgcaggccccttcgccctattcttcatagccgaatacacaaacattattataataaacaccctcaccactacaatcttcctaggaacaacatatgacgcactctcccctgaactctacacaacatattttctcactcatttacaccaaccacccaactatctataaacctagccatggccatccccttatgagcgggcgcagtgattataggctttcgctctaagattaaaaatgccctagcccacttcttaccacaaggcacacctacaccccttatccccatactagttattatcgaaaccatcagcctactcattcaaccaatagccctggccgtacgcctaaccgctaacattactgcaggccacctactcatgcacctaattggaagcgccaccctagcaatatcaaccattaaccttccctctacacttatcatcttcacaattctaattctactgactatcctagaaatcgctgtcgccttaatccaagcctacgtttttac

SEQ ID NO: 333144 - DNA, 449 bp, Homo sapiens
tctgaggatcactcaggactgaagcctaacggacaccacatgacacctccagaccggccagccgctccacctcactcatttacaccaaccacccaactatctataaacctagccatggccatccccttatgagcgggcgcagtgattataggctttcgctctaagattaaaaatgccctagcccacttcttaccacaaggcacacctacaccccttatccccatactagttattatcgaaaccatcagcctactcattcaaccaatagccctggccgtacgcctaaccgctaacattactgcaggccacctactcatgcacctaattggaagcgccaccctagcaatatcaaccattaaccttccctctacacttatcatcttcacaattctaattctactgactatcctagaaatcgctgtcgccttaatccaagcctacgtttttac

SEQ ID NO: 333145 - DNA, 424 bp, Homo sapiens
ctcggccccaattatgctgcgtacagtgaataaggcatttacacactcactcatttacaccaaccacccaactatctataaacctagccatggccatccccttatgagcgggcgcagtgattataggctttcgctctaagattaaaaatgccctagcccacttcttaccacaaggcacacctacaccccttatccccatactagttattatcgaaaccatcagcctactcattcaaccaatagccctggccgtacgcctaaccgctaacattactgcaggccacctactcatgcacctaattggaagcgccaccctagcaatatcaaccattaaccttccctctacacttatcatcttcacaattctaattctactgactatcctagaaatcgctgtcgccttaatccaagcctacgtttttac

SEQ ID NO: 333146 - DNA, 603 bp, Homo sapiens
aggtcgctctacgacgatccctctactcgcgggtgctcgcggatatctgttactccctgaacacacctccaagccttccttctggctgctcctgtctggaagattccttttgaccctcaaatatcaactcaacagcgttctgttttctaccactgtcatggttctcccaggcagagttaggtcttcttttttttgaattcccaggcacccgtcgtactcgcgggctcactcatttacaccaaccacccaactatctataaacctagccatggccatccccttatgagcgggcgcagtgattataggctttcgctctaagattaaaaatgccctagcccacttcttaccacaaggcacacctacaccccttatccccatactagttattatcgaaaccatcagcctactcattcaaccaatagccctggccgtacgcctaaccgctaacattactgcaggccacctactcatgcacctaattggaagcgccaccctagcaatatcaaccattaaccttccctctacacttatcatcttcacaattctaattctactgactatcctagaaatcgctgtcgccttaatccaagcctacgtttttac

SEQ ID NO: 333147 - DNA, 495 bp, Homo sapiens
  misc_feature (47)..(47): n is a, c, g, or t
cactcatttacaccaaccacccaactatctataaacctagccatggncatccttatgagcgggcgcagtgattataggctttcgctctaagattaaaaatgccctagcccacttctctcactcatttacaccaaccacccaactatctataaacctagccatggccatccccttatgagcgggcgcagtgattataggctttcgctctaagattaaaaatgccctagcccacttcttaccacaaggcacacctacaccccttatccccatactagttattatcgaaaccatcagcctactcattcaaccaatagccctggccgtacgcctaaccgctaacattactgcaggccacctactcatgcacctaattggaagcgccaccctagcaatatcaaccattaaccttccctctacacttatcatcttcacaattctaattctactgactatcctagaaatcgctgtcgccttaatccaagcctacgtttttac

SEQ ID NO: 333148 - DNA, 474 bp, Homo sapiens
ataataactagtatggggataaggggtgtaggtgtgccttgtggtaagaagtgggctagggcatttttaatcttagagcgaaagcctataatcacctcactcatttacaccaaccacccaactatctataaacctagccatggccatccccttatgagcgggcgcagtgattataggctttcgctctaagattaaaaatgccctagcccacttcttaccacaaggcacacctacaccccttatccccatactagttattatcgaaaccatcagcctactcattcaaccaatagccctggccgtacgcctaaccgctaacattactgcaggccacctactcatgcacctaattggaagcgccaccctagcaatatcaaccattaaccttccctctacacttatcatcttcacaattctaattctactgactatcctagaaatcgctgtcgccttaatccaagcctacgtttttac

SEQ ID NO: 333149 - DNA, 471 bp, Homo sapiens
atacacggatccccgtgggacatatttacccccacctccaagacgatctcatcatacaaccgagctacatcaccacccaagcaatgactaatctcactcatttacaccaaccacccaactatctataaacctagccatggccatccccttatgagcgggcgcagtgattataggctttcgctctaagattaaaaatgccctagcccacttcttaccacaaggcacacctacaccccttatccccatactagttattatcgaaaccatcagcctactcattcaaccaatagccctggccgtacgcctaaccgctaacattactgcaggccacctactcatgcacctaattggaagcgccaccctagcaatatcaaccattaaccttccctctacacttatcatcttcacaattctaattctactgactatcctagaaatcgctgtcgccttaatccaagcctacgtttttac

SEQ ID NO: 333150 - DNA, 443 bp, Homo sapiens
gtgctctagagtatcccactagtccacggttggctaaaacccaccacaaccaagatggcaatgactcactcatttacaccaaccacccaactatctataaacctagccatggccatccccttatgagcgggcgcagtgattataggctttcgctctaagattaaaaatgccctagcccacttcttaccacaaggcacacctacaccccttatccccatactagttattatcgaaaccatcagcctactcattcaaccaatagccctggccgtacgcctaaccgctaacattactgcaggccacctactcatgcacctaattggaagcgccaccctagcaatatcaaccattaaccttccctctacacttatcatcttcacaattctaattctactgactatcctagaaatcgctgtcgccttaatccaagcctacgtttttac

SEQ ID NO: 333151 - DNA, 591 bp, Homo sapiens
  misc_feature (584)..(584): n is a, c, g, or t
ggaggtaggtggtagtttgtgtttaatatttttatttgggtgatgaggaatagtgtaaggagtatgggggtaattatggtgggccatacggtagtatttagttggggcatttttaatcttatgagcgggcgcagtgattataggctttcgctctaagattaaaaatgccctagcccacttctagcccacttcttaccacaaggcacacctgcaccccttatccccacctccaaatatctcatcaacaaccgactaatcaccacccaacaatgactaatcaaactaacctcaaaacaaatgatagccatacacaacactaaaggacgaacctgatctcttatactagtatccttaatcatttttattgccacaactaacctcctcggactcctgcctcactcatttacaccaaccacccaactatctataaacctagccatggccatccccttatgagcgggcgcagtgattataggctttcgctctaagattaaaaatgccctagcccacttcttaccacaaggcacaccacctccaaatatctcatcaacaaccgattaatacccgcacaagctgaagagggntactcta

SEQ ID NO: 333152 - DNA, 555 bp, Homo sapiens
ggaggtaggtggtagtttgtgtttaatatttttatttgggtgatgaggaatagtgtaaggagtatgggggtaattatggtgggccatacggtagtatttagttggggcatttttaatcttatgagcgggcgcagtgattataggctttcgctctaagattaaaaatgccctagcccacttctagcccacttcttaccacaaggcacacctgcaccccttatccccacctccaaatatctcatcaacaaccgactaatcaccacccaacaatgactaatcaaactaacctcaaaacaaatgatagccatacacaacactaaaggacgaacctgatctcttatactagtatccttaatcatttttattgccacaactaacctcctcggactcctgcctcactcatttacaccaaccacccaactatctataaacctagccatggccatccccttatgagcgggcgcagtgattataggctttcgctctaagattaaaaatgccctagcccacttcttaccacaaggcacacggagattgtaagcggagtgttcatcg

SEQ ID NO: 333153 - DNA, 580 bp, Homo sapiens
  misc_feature (580)..(580): n is a, c, g, or t
ggaggtaggtggtagtttgtgtttaatatttttatttgggtgatgaggaatagtgtaaggagtatgggggtaattatggtgggccatacggtagtatttagttggggcatttttaatcttatgagcgggcgcagtgattataggctttcgctctaagattaaaaatgccctagcccacttctagcccacttcttaccacaaggcacacctgcaccccttatccccacctccaaatatctcatcaacaaccgactaatcaccacccaacaatgactaatcaaactaacctcaaaacaaatgatagccatacacaacactaaaggacgaacctgatctcttatactagtatccttaatcatttttattgccacaactaacctcctcggactcctgcctcactcatttacaccaaccacccaactatctataaacctagccatggccatccccttatgagcgggcgcagtgattataggctttcgctctaagattaaaaatgccctagcccacttcttaccacaaggcacacgagcgggcgcagtgatataggctttcgctctaagattaaaaatccctaggn

SEQ ID NO: 333154 - DNA, 569 bp, Homo sapiens
ggaggtaggtggtagtttgtgtttaatatttttatttgggtgatgaggaatagtgtaaggagtatgggggtaattatggtgggccatacggtagtatttagttggggcatttttaatcttatgagcgggcgcagtgattataggctttcgctctaagattaaaaatgccctagcccacttctagcccacttcttaccacaaggcacacctgcaccccttatccccacctccaaatatctcatcaacaaccgactaatcaccacccaacaatgactaatcaaactaacctcaaaacaaatgatagccatacacaacactaaaggacgaacctgatctcttatactagtatccttaatcatttttattgccacaactaacctcctcggactcctgcctcactcatttacaccaaccacccaactatctataaacctagccatggccatccccttatgagcgggcgcagtgattataggctttcgctctaagattaaaaatgccctagcccacttcttaccacaaggcacacaggctcacaaggagctcggatcctcagaatgaccgcaggc

SEQ ID NO: 333155 - DNA, 560 bp, Homo sapiens
ggaggtaggtggtagtttgtgtttaatatttttatttgggtgatgaggaatagtgtaaggagtatgggggtaattatggtgggccatacggtagtatttagttggggcatttttaatcttatgagcgggcgcagtgattataggctttcgctctaagattaaaaatgccctagcccacttctagcccacttcttaccacaaggcacacctgcaccccttatccccacctccaaatatctcatcaacaaccgactaatcaccacccaacaatgactaatcaaactaacctcaaaacaaatgatagccatacacaacactaaaggacgaacctgatctcttatactagtatccttaatcatttttattgccacaactaacctcctcggactcctgcctcactcatttacaccaaccacccaactatctataaacctagccatggccatccccttatgagcgggcgcagtgattataggctttcgctctaagattaaaaatgccctagcccacttcttaccacaaggcacacggccccagtcccgagagtaggtccgagcgta

SEQ ID NO: 333156 - DNA, 563 bp, Homo sapiens
ggaggtaggtggtagtttgtgtttaatatttttatttgggtgatgaggaatagtgtaaggagtatgggggtaattatggtgggccatacggtagtatttagttggggcatttttaatcttatgagcgggcgcagtgattataggctttcgctctaagattaaaaatgccctagcccacttctagcccacttcttaccacaaggcacacctgcaccccttatccccacctccaaatatctcatcaacaaccgactaatcaccacccaacaatgactaatcaaactaacctcaaaacaaatgatagccatacacaacactaaaggacgaacctgatctcttatactagtatccttaatcatttttattgccacaactaacctcctcggactcctgcctcactcatttacaccaaccacccaactatctataaacctagccatggccatccccttatgagcgggcgcagtgattataggctttcgctctaagattaaaaatgccctagcccacttcttaccacaaggcacactggccactttcctcgtaaggtcggagatgtcacg

SEQ ID NO: 333157 - DNA, 817 bp, Homo sapiens
ggaggtaggtggtagtttgtgtttaatatttttatttgggtgatgaggaatagtgtaaggagtatgggggtaattatggtgggccatacggtagtatttagttggggcatttttaatcttatgagcgggcgcagtgattataggctttcgctctaagattaaaaatgccctagcccacttctagcccacttcttaccacaaggcacacctgcaccccttatccccacctccaaatatctcatcaacaaccgactaatcaccacccaacaatgactaatcaaactaacctcaaaacaaatgatagccatacacaacactaaaggacgaacctgatctcttatactagtatccttaatcatttttattgccacaactaacctcctcggactcctgcctcactcatttacaccaaccacccaactatctataaacctagccatggccatccccttatgagcgggcgcagtgattataggctttcgctctaagattaaaaatgccctagcccacttcttaccacaaggcacaccataaggggatggccatggactaggtttatagatagttgggtggttggtgtaaatgagtgaggcaggagtccgaggaggttagttgtggcaataaaaatgattaaggatactagtataagagatcaggttcgtcctttagtgttgtgtatggttatcatttgttttgaggttagtttgattagtcattgttgggtggtgattagtcggttgttgatgagatatttgtatggtggggatcaatagagggggagatagagtcgagcggctcgttaatttagtagtagtag

SEQ ID NO: 333158 - DNA, 563 bp, Homo sapiens
ggaggtaggtggtagtttgtgtttaatatttttatttgggtgatgaggaatagtgtaaggagtatgggggtaattatggtgggccatacggtagtatttagttggggcatttttaatcttatgagcgggcgcagtgattataggctttcgctctaagattaaaaatgccctagcccacttctagcccacttcttaccacaaggcacacctgcaccccttatccccacctccaaatatctcatcaacaaccgactaatcaccacccaacaatgactaatcaaactaacctcaaaacaaatgatagccatacacaacactaaaggacgaacctgatctcttatactagtatccttaatcatttttattgccacaactaacctcctcggactcctgcctcactcatttacaccaaccacccaactatctataaacctagccatggccatccccttatgagcgggcgcagtgattataggctttcgctctaagattaaaaatgccctagcccacttcttaccacaaggcacacataccataaggtcggagtaagtcggagataatcg

SEQ ID NO: 333159 - DNA, 1157 bp, Homo sapiens
  misc_feature (47)..(47): n is a, c, g, or t
cactcatttacaccaaccacccaactatctataaacctagccatggncatcctcctactcctcattgtacccattctaatcgcaatggcattcctaatgcttaccgaacgaaaaattctaggctatatacaactacgcaaaggccccaacgttgtaggcccctacgggctactacaacccttcgctgacgccataaaactcttcaccaaagagcccctaaaacccgccacatctaccatcaccctctacatcaccgccccgaccttagctctcaccatcgctcttctactatgaacccccctccccatacccaaccccctggtcaacctcaacctaggcctcctatttattctagccacctctagcctagccgtttactcaatcctctgatcagggtgagcatcaaactcaaactacgccctgatcggcgcactgcgagcagtagcccaaacaatctcatatgaagtcaccctagccatcattctactatcaacattactaataagtggctcctttaacctctccacccttatcacaacacaagaacacctctgattactcctgccatcatgacccttggccataatatgatttatctccacactagcagagaccaaccgaacccccttcgaccttgccgaagggagtccgaactagtctcaggcttcaacatcgaatacgccgcaggccccttcgccctattcttcatagccgaatacacaaacattattataataaacaccctcaccactacaatcttcctaggaacaacatatgacgcactctcccctgaactctacacaacatattttctcactcatttacaccaaccacccaactatctataaacctagccatggccatccccttatgagcgggcgcagtgattataggctttcgcatagttgggtggttggtgtaaatgagtgaggcaggagtccgaggaggttagttgtggcaataaaaatgattaaggatactagtataagagatcaggttcgtcctttagtgttgtgtatggttatcatttgttttgaggttagtttgattagtcattgttgggtggtgattagtcggttgttgatgagatatttgtatggtggggatcaatagagggggagatagagtcgagcggctcgttaatttagtagtagtag

SEQ ID NO: 333160 - DNA, 727 bp, Homo sapiens
ggaggtaggtggtagtttgtgtttaatatttttatttgggtgatgaggaatagtgtaaggagtatgggggtaattatggtgggccatacggtagtatttagttggggcatttttaatcttatgagcgggcgcagtgattataggctttcgctctaagattaaaaatgccctagcccacttctagcccacttcttaccacaaggcacacctgcaccccttatccccacctccaaatatctcatcaacaaccgactaatcaccacccaacaatgactaatcaaactaacctcaaaacaaatgatagccatacacaacactaaaggacgaacctgatctcttatactagtatccttaatcatttttattgccacaactaacctcctcggactcctgcctcactcatttacaccaaccacccaactatctataaacctagccatggccatccccttatgagcgggcgcagtgattataggctttcgcctacaccccttatccccatactagttattatcgaaaccatcagcctactcattcaaccaatagccctggccgtacgcctaaccgctaacattactgcaggccacctactcatgcacctaattggaagcgccaccctagcaatatcaaccattaaccttccctctacacttatcatcttcacaattctaattctactgactatcctagaaatcgctgtcgccttaatccaagcctacgtttttac

SEQ ID NO: 333161 - DNA, 339 bp, Homo sapiens
gaccaactcatacacctcctatgaaaaaacttcctaccactcaccctagcattacttatatgatatgtctccatacccaaccccctggtcaacctcaacctaggcctcctatttattctagccacctctagcctagccgtttactcaatcctctgatcagggtgagcatcaaactcaaactacgccctgatcggcgcactgcgagcagtagcccaaacaatctcatatgaagtcaccctagccatcattctacgaccaactcatacacctcctatgaaaaaacttcctaccactcaccctagcattacttatatgatatgtctccatacccattacaat

SEQ ID NO: 333162 - DNA, 346 bp, Homo sapiens
ggtcgtcacagtcgcttgtatagtaagatacctctgtacggactccacttatgactccctaaagcccagtgtcgaagcccccatcgcgtgggtcaatagtacttgccgcagtactcttaaaactaggcggctatggtataatacgcctcacactcattctcatctcccctgaactctacacaacatattttgtcaccaagaccctacttctaacctccctgttcttatgaattcgaacagcatacccccgattccgctacgaccaactcatacacctcctatgaaaaaacttcctaccactcaccctagcattacttatatgatatgtctccatacccattacaat

SEQ ID NO: 333163 - DNA, 319 bp, Homo sapiens
  misc_feature (59)..(59): n is a, c, g, or t
tgccatagcaaccccctgacaaaacacatagcccaccccttccttgtactatccctatnaggcataattataacaagctccatctgcctacgacaaacagacctaaaatcgctcattgcctactcattcaaccaatagccctggccgtacgcctaaccgctaacattactgcaggccacctactcatgcacctaattggaagcgccaccctagcaatatcaaccattaaccttccctctacacttatcatcttcacaattctaattctactgactatcctagaaatcgctgtcgccttaatccaagcctacgtttttac

SEQ ID NO: 333164 - DNA, 1112 bp, Homo sapiens
  misc_feature (47)..(47): n is a, c, g, or t
cactcatttacaccaaccacccaactatctataaacctagccatggncatcctcctactcctcattgtacccattctaatcgcaatggcattcctaatgcttaccgaacgaaaaattctaggctatatacaactacgcaaaggccccaacgttgtaggcccctacgggctactacaacccttcgctgacgccataaaactcttcaccaaagagcccctaaaacccgccacatctaccatcaccctctacatcaccgccccgaccttagctctcaccatcgctcttctactatgaacccccctccccatacccaaccccctggtcaacctcaacctaggcctcctatttattctagccacctctagcctagccgtttactcaatcctctgatcagggtgagcatcaaactcaaactacgccctgatcggcgcactgcgagcagtagcccaaacaatctcatatgaagtcaccctagccatcattctactatcaacattactaataagtggctcctttaacctctccacccttatcacaacacaagaacacctctgattactcctgccatcatgacccttggccataatatgatttatctccacactagcagagaccaaccgaacccccttcgaccttgccgaagggagtccgaactagtctcaggcttcaacatcgaatacgccgcaggccccttcgccctattcttcatagccgaatacacaaacattattataataaacaccctcaccactacaatcttcctaggaacaacatatgacgcactctcccctgaactctacacaacatattttgtcaccaagaccctacttctaacctccctgttcttatgaattcgaacagcatacccccgattccgctacgaccaactcatacacctcctatgaaaaaacttcctaccactcaccctagcattacttaagagctcaagtgactagtaggtctcctgccatttccacgaagtgactcttcaagcccttggagaagacgaaacaacattagaatctgtgattgcagtggaaagtttactgcatgggtaaaaatggagttgcgttgcgtgacatgtggtccacaacttgaggtatcgtcaacgg

SEQ ID NO: 333165 - DNA, 253 bp, Homo sapiens
ttagatttgaccttcagcaaggtcaaggagtccgaactagtctcaggcttcaacatcgaatacgccgcaggccccttcgccctattcttcatagccgaatacacaaacattattataataaacaccctcaccactacaatcttcctaggaacaacatatgacgcactctcccctgaactctacacaacatattttgtcaccaagaccctacttctaacctccctgttcttatgaattcgaacagcataccccc

SEQ ID NO: 333166 - DNA, 1548 bp, Homo sapiens
tgcgcaggcgcgcggggcaagaggctggcagtgcgcctgcgccgcgtcggcgtgcggaacgccgcggtgtctcggcgcctctgcgcgcgggaagatggcggaacaggctaccaagtccgtgctgtttgtgtgtctgggtaacatttgtcgatcacccattgcagaagcagttttcaggaaacttgtaaccgatcaaaacatctcagagaattggagggtagacagcgcggcaacttccgggtatgagatagggaacccccctgactaccgagggcagagctgcatgaagaggcacggcattcccatgagccacgttgcccggcagattaccaaagaagattttgccacatttgattatatactatgtatggatgaaagcaatctgagagatttgaatagaaaaagtaatcaagttaaaacctgcaaagctaaaattgaactacttgggagctatgatccacaaaaacaacttattattgaagatccctattatgggaatgactctgactttgagacggtgtaccagcagtgtgtcaggtgctgcagagcgttcttggagaaggcccactgaggcaggttcgtgccctgctgcggccagcctgactagaccccaccctgaggtcctgcatttctcagtcggtgtgtaatcacgttccagggcccaaagcccagctctttgttcagttgacttactgtttcttaccttaaaaagtaattgtagatggaaatcagttgtgtttggcaggagaatcaataaaaatctttgattcagacagcttatggggtattttaagcattcttagactagttgaacatctcactttgccccagttacaaaaatagtagaacaagcaacataaaacaatgaaggaaaacctcacttgaaggcccaggtcaacatctaagcctgttgagacttagataatcgagtctacctcttcagtaggtttgtgtggatggcctggagggcaggtgccctctgctccccagtgctacctctctcttccctagggccttttgtggattgacagtagtcccctccgtaggagctcacagtctagattagaagtgttttaatttctacacacccatagtgcacacttgtatattgaaaagatagggaagagagaaacatttatggaatcagtcgttggcaccttcaatacttcatgatttttgtcgagtttacttcatgaggaggtcagcccattggctcccatctgaaccactttgcctctgaaacttaattacatccagaaagaaggacacttgtatgctagtctatggtcagttgaggaatatgactgtttttatatgcacatgtaacccaaatgtccaatataaattggcttattttttaaaataattttaaaagttgggaaaagtgttattatttggcatgcttaaatattgaataagtattcttcatcagcatttaataaatgtataggcagatgtaaggtaatttctgtgtattttgagataatgtcaaaatcatgaatatttcaaaataaactggggagttataaaaatacaactagagatata

SEQ ID NO: 333167 - DNA, 1458 bp, Homo sapiens
tgcgcaggcgcgcggggcaagaggctggcagtgcgcctgcgccgcgtcggcgtgcggaacgccgcggtgtctcggcgcctctgcgcgcgggaagatggcggaacaggctaccaagtccgtgctgtttgtgtgtctgggtaacatttgtcgatcacccattgcagaagcagttttcaggaaacttgtaaccgatcaaaacatctcagagaattgggtcattgacagcggtgctgtttctgactggaacgtgggccggtccccagacccaagagctgtgagctgcctaagaaatcatggcattcacacagcccataaagcaagacagattaccaaagaagattttgccacatttgattatatactatgtatggatgaaagcaatctgagagatttgaatagaaaaagtaatcaagttaaaacctgcaaagctaaaattgaactacttgggagctatgatccacaaaaacaacttattattgaagatccctattatgggaatgactctgactttgagacggtgtaccagcagtgtgtcaggtgctgcagagcgttcttggagaaggcccactgaggcaggttcgtgccctgctgcggccagcctgactagaccccaccctgaggtcctgcatttctcagtcggtgtgtaatcacgttccagggcccaaagcccagctctttgttcagttgacttactgtttcttaccttaaaaagtaattgtagatggaaatcagttgtgtttggcaggagaatcaataaaaatctttgattcagacagcttatggggtattttaagcattcttagactagttgaacatctcactttgccccagttacaaaaatagtagaacaagcaacataaaacaatgaaggaaaacctcacttgaaggcccaggtcaacatctaagcctgttgagacttagataatcgagtctacctcttcagtaggtttgtgtggatggcctggagggcaggtgccctctgctccccagtgctacctctctcttccctagggccttttgtggattgacagtagtcccctccgtaggagctcacagtctagattagaagtgttttaatttctacacacccatagtgcacacttgtatattgaaaagatagggaagagagaaacatttatggaatcagtcgttggcaccttcaatacttcatgatttttgtcgagtttacttcatgaggaggtcagcccattggctcccatctgaaccactttgcctctgaaacttaattacatccagaaagaaggacacttgtatgctagtctatggtcagttgaggaatatgactgtttttatatgcacatgtaacccaaatgtccaatataaattggcttattttttaaaataattttaaaagttgggaaaagtgttattatttggcatgcttaaatattgaataagtattcttcatcagcatttaataaatgtataggcagatgt

SEQ ID NO: 333168 - DNA, 809 bp, Homo sapiens
tgcgcaggcgcgcggggcaagaggctggcagtgcgcctgcgccgcgtcggcgtgcggaacgccgcggtgtctcggcgcctctgcgcgcgggaagatggcggaacaggctaccaagtccgtgctgtttgtgtgtctgggtaacatttgtcgatcacccattgcagaagcagttttcaggaaacttgtaaccgatcaaaacatctcagagaattggagggtagacagcgcggcaacttccgggtatgagatagggaacccccctgactaccgagggcagagctgcatgaagaggcacggcattcccatgagccacgttgcccggcagattaccaaagaagattttgccacatttgattatatactatgtatggatgaaagcaatctgagagatttgaatagaaaaagtaatcaagttaaaacctgcaaagctaaaattgaactacttgggagctatgatccacaaaaacaacttattattgaagatccctattatgggaatgactctgactttgagacggtgtaccagcagtgtgtcaggtgctgcagagcgttcttggagaaggcccactgaggcaggttcgtgccctgctgcggccagcctgactagaccccaccctgaggtcctgcatttctcagtcggtgtgtaatcacgttccagggcccaaagcccagctctttgttcagttgacttactgtttcttaccttaaaaagtaattgtagatggaaatcagttgtgtttggcaggagaatcaataaaaatctttgattcagacaaaaaaaagtcgacgcggccgcgaatttagtagta

SEQ ID NO: 333169 - DNA, 803 bp, Homo sapiens
tgcgcaggcgcgcggggcaagaggctggcagtgcgcctgcgccgcgtcggcgtgcggaacgccgcggtgtctcggcgcctctgcgcgcgggaagatggcggaacaggctaccaagtccgtgctgtttgtgtgtctgggtaacatttgtcgatcacccattgcagaagcagttttcaggaaacttgtaaccgatcaaaacatctcagagaattggagggtagacagcgcggcaacttccggtgggtcattgacagcggtgctgtttctgactggaacgtgggccggtccccagacccaagagctgtgagctgcctaagaaatcatggcattcacacagcccataaagcaagacagattaccaaagaagattttgccacatttgattatatactatgtatggatgaaagcaatctgagagatttgaatagaaaaagtaatcaagttaaaacctgcaaagctaaaattgaactacttgggagctatgatccacaaaaacaacttattattgaagatccctattatgggaatgactctgactttgagacggtgtaccagcagtgtgtcaggtgctgcagagcgttcttggagaaggcccactgaggcaggttcgtgccctgctgcggccagcctgactagaccccaccctgaggtcctgcatttctcagtcggtgtgtaatcacgttccagggcccaaagcccagctctttgttcagttgacttactgtttcttaccttaaaaagtaattgtagatggaaatcagttgtgtttggcaggagaatcaataaaaatctttgattcagac

SEQ ID NO: 333170 - DNA, 786 bp, Homo sapiens
aataatgaaggggattaaatatgtgacattttagtatgttgactgtattatacactgctactaaggaattgaagccgatgtataaacattgtgtctacacattatactattttatgattattgtatggaactttataatacaaaatttctttgcagtacaattttgagaaataggttaactctattttaacttaaaagtaccctaaaaattatttaattgtttattagtgagtaacaggctcaaatacagcagttttttttttcttttagtattgctttgcatcctctaggcttgaatggtataaacactgtgttttgacttcttattcaattttagattaccaaagaagattttgccacatttgattatatactatgtatggatgaaagcaatctgagagatttgaatagaaaaagtaatcaagttaaaacctgcaaagctaaaattgaactacttgggagctatgatccacaaaaacaacttattattgaagatccctattatgggaatgactctgactttgagacggtgtaccagcagtgtgtcaggtgctgcagagcgttcttggagaaggcccactgaggcaggttcgtgccctgctgcggccagcctgactagaccccaccctgaggtcctgcatttctcagtcggtgtgtaatcacgttccagggcccaaagcccagctctttgttcagttgacttactgtttcttaccttaaaaagtaattgtagatggaaatcagttgtgtttggcaggagaatcaataaaaatctttgattcagac

SEQ ID NO: 333171 - DNA, 712 bp, Homo sapiens
tgcgcaggcgcgcggggcaagaggctggcagtgcgcctgcgccgcgtcggcgtgcggaacgccgcggtgtctcggcgcctctgcgcgcgggaagatggcggaacaggctaccaagtccgtgctgtttgtgtgtctgggtaacatttgtcgatcacccattgcagaagcagttttcaggaaacttgtaaccgatcaaaacatctcagagaattggagggtagacagcgcggcaacttccgggtatgagatagggaacccccctgactaccgagggcagagctgcatgaagaggcacggcattcccatgagccacgttgcccggcagagatttgaatagaaaaagtaatcaagttaaaacctgcaaagctaaaattgaactacttgggagctatgatccacaaaaacaacttattattgaagatccctattatgggaatgactctgactttgagacggtgtaccagcagtgtgtcaggtgctgcagagcgttcttggagaaggcccactgaggcaggttcgtgccctgctgcggccagcctgactagaccccaccctgaggtcctgcatttctcagtcggtgtgtaatcacgttccagggcccaaagcccagctctttgttcagttgacttactgtttcttaccttaaaaagtaattgtagatggaaatcagttgtgtttggcaggagaatcaataaaaatctttgattcagac

SEQ ID NO: 333172 - DNA, 935 bp, Homo sapiens
tgcgcaggcgcgcggggcaagaggctggcagtgcgcctgcgccgcgtcggcgtgcggaacgccgcggtgtctcggcgcctctgcgcgcgggaagatggcggaacaggctaccaagtccgtgctgtttgtgtgtctgggtaacatttgtcgatcacccattgcagaagcagttttcaggaaacttgtaaccgatcaaaacatctcagagaattggagggtagacagcgcggcaacttccggtgggtcattgacagcggtgctgtttctgactggaacgtgggccggtccccagacccaagagctgtgagctgcctaagaaatcatggcattcacacagcccataaagcaagacaggtagacaagctcttgttcaatttctaatatatagagtccagtaacttgagaagtagcgaaaggattaaccagacttgtatattaatgaatgtgtttatttagggtgagcttaaccagctatggtgtgtccattttgtttcacttctggttgcacggtgttgaaagacttgcctgactttggaatttacttattaaaatgcacataaaagctaggtaatttataatgagagagcctgactgtgagctggggctgagcggtgctctgtcttctgttccttcctgcataatttttattaaacatttaggccatagtaatcatcctgctgatattgcaagtttgttgctagaatgaggttatataatatatacaaaaacattttttcaactgtaaagtgccttagtaatatagggtaataccagcaacattatggatatataattatagtctattgggccacacttaagtttggagtctaataaagtcacaatcaaattctgcaatttcaattgaagataaccttgtctttatattatgaattagaagctaaagttgatttttctaagagttctttatttaaatg

SEQ ID NO: 333173 - DNA, 497 bp, Homo sapiens
gttgtatttcattttaaaataagctggttgcaacccacttcattttcgtgattcactcctggatcattagtagcaactctttaaacaataatttttgttgaaattgtttttctgatatctttgtcatctgtacttggagtacttggctggttggtgtcaaatcactgaacttgagcctgataggctgttctccagcagggtctaccctcactggttggacaaaggcgtcaaaggatagtgttggcctttgtttttcctgagggatagcacagcccccgtgtgtcaggtgtgtaaagaaggggagctggcatgtgcccttccatccaacctaaccctgtttccccacccctccctttttttaaaggtaacatttgtcgatcacccattgcagaagcagttttcaggaaacttgtaaccgatcaaaacatctcagagaatgtaagtaccattcattatcttaaagaggccaacctgaactcctctgggcaggaaattgc

SEQ ID NO: 333174 - DNA, 1548 bp, Homo sapiens
tgcgcaggcgcgcggggcaagaggctggcagtgcgcctgcgccgcgtcggcgtgcggaacgccgcggtgtctcggcgcctctgcgcgcgggaagatggcggaacaggctaccaagtccgtgctgtttgtgtgtctgggtaacatttgtcgatcacccattgcagaagcagttttcaggaaacttgtaaccgatcaaaacatctcagagaattgggtcattgacagcggtgctgtttctgactggaacgtgggccggtccccagacccaagagctgtgagctgcctaagaaatcatggcattcacacagcccataaagcaagacagattaccaaagaagattttgccacatttgattatatactatgtatggatgaaagcaatctgagagatttgaatagaaaaagtaatcaagttaaaacctgcaaagctaaaattgaactacttgggagctatgatccacaaaaacaacttattattgaagatccctattatgggaatgactctgactttgagacggtgtaccagcagtgtgtcaggtgctgcagagcgttcttggagaaggcccactgaggcaggttcgtgccctgctgcggccagcctgactagaccccaccctgaggtcctgcatttctcagtcggtgtgtaatcacgttccagggcccaaagcccagctctttgttcagttgacttactgtttcttaccttaaaaagtaattgtagatggaaatcagttgtgtttggcaggagaatcaataaaaatctttgattcagacagcttatggggtattttaagcattcttagactagttgaacatctcactttgccccagttacaaaaatagtagaacaagcaacataaaacaatgaaggaaaacctcacttgaaggcccaggtcaacatctaagcctgttgagacttagataatcgagtctacctcttcagtaggtttgtgtggatggcctggagggcaggtgccctctgctccccagtgctacctctctcttccctagggccttttgtggattgacagtagtcccctccgtaggagctcacagtctagattagaagtgttttaatttctacacacccatagtgcacacttgtatattgaaaagatagggaagagagaaacatttatggaatcagtcgttggcaccttcaatacttcatgatttttgtcgagtttacttcatgaggaggtcagcccattggctcccatctgaaccactttgcctctgaaacttaattacatccagaaagaaggacacttgtatgctagtctatggtcagttgaggaatatgactgtttttatatgcacatgtaacccaaatgtccaatataaattggcttattttttaaaataattttaaaagttgggaaaagtgttattatttggcatgcttaaatattgaataagtattcttcatcagcatttaataaatgtataggcagatgtaaggtaatttctgtgtattttgagataatgtcaaaatcatgaatatttcaaaataaactggggagttataaaaatacaactagagatata

SEQ ID NO: 333175 - DNA, 1488 bp, Homo sapiens
tcgaattcccgcgcagagcccgcaagtccgtgctgtttgtgtgtctgggtaacatttgtcgatcacccattgcagaagcagttttcaggaaacttgtaaccgatcaaaacatctcagagaattggagggtagacagcgcggcaacttccggtgggtcattgacagcggtgctgtttctgactggaacgtgggccggtccccagacccaagagctgtgagctgcctaagaaatcatggcattcacacagcccataaagcaagacagattaccaaagaagattttgccacatttgattatatactatgtatggatgaaagcaatctgagagatttgaatagaaaaagtaatcaagttaaaacctgcaaagctaaaattgaactacttgggagctatgatccacaaaaacaacttattattgaagatccctattatgggaatgactctgactttgagacggtgtaccagcagtgtgtcaggtgctgcagagcgttcttggagaaggcccactgaggcaggttcgtgccctgctgcggccagcctgactagaccccaccctgaggtcctgcatttctcagtcggtgtgtaatcacgttccagggcccaaagcccagctctttgttcagttgacttactgtttcttaccttaaaaagtaattgtagatggaaatcagttgtgtttggcaggagaatcaataaaaatctttgattcagacagcttatggggtattttaagcattcttagactagttgaacatctcactttgccccagttacaaaaatagtagaacaagcaacataaaacaatgaaggaaaacctcacttgaaggcccaggtcaacatctaagcctgttgagacttagataatcgagtctacctcttcagtaggtttgtgtggatggcctggagggcaggtgccctctgctccccagtgctacctctctcttccctagggccttttgtggattgacagtagtcccctccgtaggagctcacagtctagattagaagtgttttaatttctacacacccatagtgcacacttgtatattgaaaagatagggaagagagaaacatttatggaatcagtcgttggcaccttcaatacttcatgatttttgtcgagtttacttcatgaggaggtcagcccattggctcccatctgaaccactttgcctctgaaacttaattacatccagaaagaaggacacttgtatgctagtctatggtcagttgaggaatatgactgtttttatatgcacatgtaacccaaatgtccaatataaattggcttattttttaaaataattttaaaagttgggaaaagtgttattatttggcatgcttaaatattgaataagtattcttcatcagcatttaataaatgtataggcagatgtaaggtaatttctgtgtattttgagataatgtcaaaatcatgaatatttcaaaataaactggggagttataaaaatacaactagagatata

SEQ ID NO: 333176 - DNA, 2170 bp, Homo sapiens
attttttaatttttatttttcagtccttattctgttctcattgtttttgctgacaccatagcccataggcatcgtaaaaacacctttttaggagaccccatttgctttgactggcactgagcaccgtgtttctttgcgtgtggggcaagtggagttcctgcagcctcacatttgcacgtgctgttcctctgcctggaagctcctccttgcttcttgggtcattcggctcctatttgcccctcgtgggtcagcttaaattcatttcttgatagaggtattctgctgccctgtcattaggccagattgtgcattagacttaggcctgcctgcagttctcattcctgcacctaatcctgagctgtaaaacttcgtgcatgggagctcttggctgttccgttcccacataaagcacgtacctgactcatcaactcatctgtcgcaggtgctcagtcgaaatttgttaaataaatggaggcgcttagttaagtttgcctttttcttttgtagcaatgtgaaagctaagggtggaagtctagagtgaagctgagttttcagcttgggcagaggcttaaggaataaaagatggaagagtaattaaggagtgggtcgtgctgtgggaagtgctgtgtcaagacacctgaggatggaattggtagccctctgttttgggactggttcagatggtgttttgggttcctttctatgacctttatctctgaaacttgattgtcttaaaatgtattttgtgggagaaaatataattattgtatattttgtgtaacagaatcagtgagaataagctgctgtcgcaaactgtcttgcctagagagagggcagtggcatacagctgcagaaggggccacacgggcctgctgagtgttccgtttcatttcaaattaggtcattctgtcttgattttgatatggatgtttcagaagaccctagcagatgtccctgtttaacttgaaaccatagatcagaaaactaagttcatatttcaattttacagagatttgaatagaaaaagtaatcaagttaaaacctgcaaagctaaaattgaactacttgggagctatgatccacaaaaacaacttattattgaagatccctattatgggaatgactctgactttgagacggtgtaccagcagtgtgtcaggtgctgcagagcgttcttggagaaggcccactgaggcaggttcgtgccctgctgcggccagcctgactagaccccaccctgaggtcctgcatttctcagtcggtgtgtaatcacgttccagggcccaaagcccagctctttgttcagttgacttactgtttcttaccttaaaaagtaattgtagatggaaatcagttgtgtttggcaggagaatcaataaaaatctttgattcagacagcttatggggtattttaagcattcttagactagttgaacatctcactttgccccagttacaaaaatagtagaacaagcaacataaaacaatgaaggaaaacctcacttgaaggcccaggtcaacatctaagcctgttgagacttagataatcgagtctacctcttcagtaggtttgtgtggatggcctggagggcaggtgccctctgctccccagtgctacctctctcttccctagggccttttgtggattgacagtagtcccctccgtaggagctcacagtctagattagaagtgttttaatttctacacacccatagtgcacacttgtatattgaaaagatagggaagagagaaacatttatggaatcagtcgttggcaccttcaatacttcatgatttttgtcgagtttacttcatgaggaggtcagcccattggctcccatctgaaccactttgcctctgaaacttaattacatccagaaagaaggacacttgtatgctagtctatggtcagttgaggaatatgactgtttttatatgcacatgtaacccaaatgtccaatataaattggcttattttttaaaataattttaaaagttgggaaaagtgttattatttggcatgcttaaatattgaataagtattcttcatcagcatttaataaatgtataggcagatgtaaggtaatttctgtgtattttgagataatgtcaaaatcatgaatatttcaaaataaactggggagttataaaaatacaactagagatata

SEQ ID NO: 333177 - DNA, 1560 bp, Homo sapiens
aataatgaaggggattaaatatgtgacattttagtatgttgactgtattatacactgctactaaggaattgaagccgatgtataaacattgtgtctacacattatactattttatgattattgtatggaactttataatacaaaatttctttgcagtacaattttgagaaataggttaactctattttaacttaaaagtaccctaaaaattatttaattgtttattagtgagtaacaggctcaaatacagcagttttttttttcttttagtattgctttgcatcctctaggcttgaatggtataaacactgtgttttgacttcttattcaattttagattaccaaagaagattttgccacatttgattatatactatgtatggatgaaagcaatctgagagatttgaatagaaaaagtaatcaagttaaaacctgcaaagctaaaattgaactacttgggagctatgatccacaaaaacaacttattattgaagatccctattatgggaatgactctgactttgagacggtgtaccagcagtgtgtcaggtgctgcagagcgttcttggagaaggcccactgaggcaggttcgtgccctgctgcggccagcctgactagaccccaccctgaggtcctgcatttctcagtcggtgtgtaatcacgttccagggcccaaagcccagctctttgttcagttgacttactgtttcttaccttaaaaagtaattgtagatggaaatcagttgtgtttggcaggagaatcaataaaaatctttgattcagacagcttatggggtattttaagcattcttagactagttgaacatctcactttgccccagttacaaaaatagtagaacaagcaacataaaacaatgaaggaaaacctcacttgaaggcccaggtcaacatctaagcctgttgagacttagataatcgagtctacctcttcagtaggtttgtgtggatggcctggagggcaggtgccctctgctccccagtgctacctctctcttccctagggccttttgtggattgacagtagtcccctccgtaggagctcacagtctagattagaagtgttttaatttctacacacccatagtgcacacttgtatattgaaaagatagggaagagagaaacatttatggaatcagtcgttggcaccttcaatacttcatgatttttgtcgagtttacttcatgaggaggtcagcccattggctcccatctgaaccactttgcctctgaaacttaattacatccagaaagaaggacacttgtatgctagtctatggtcagttgaggaatatgactgtttttatatgcacatgtaacccaaatgtccaatataaattggcttattttttaaaataattttaaaagttgggaaaagtgttattatttggcatgcttaaatattgaataagtattcttcatcagcatttaataaatgtataggcagatgtaaggtaatttctgtgtattttgagataatgtcaaaatcatgaatatttcaaaataaactggggagttataaaaatacaactagagatata

SEQ ID NO: 333178 - DNA, 1486 bp, Homo sapiens
tgcgcaggcgcgcggggcaagaggctggcagtgcgcctgcgccgcgtcggcgtgcggaacgccgcggtgtctcggcgcctctgcgcgcgggaagatggcggaacaggctaccaagtccgtgctgtttgtgtgtctgggtaacatttgtcgatcacccattgcagaagcagttttcaggaaacttgtaaccgatcaaaacatctcagagaattggagggtagacagcgcggcaacttccgggtatgagatagggaacccccctgactaccgagggcagagctgcatgaagaggcacggcattcccatgagccacgttgcccggcagagatttgaatagaaaaagtaatcaagttaaaacctgcaaagctaaaattgaactacttgggagctatgatccacaaaaacaacttattattgaagatccctattatgggaatgactctgactttgagacggtgtaccagcagtgtgtcaggtgctgcagagcgttcttggagaaggcccactgaggcaggttcgtgccctgctgcggccagcctgactagaccccaccctgaggtcctgcatttctcagtcggtgtgtaatcacgttccagggcccaaagcccagctctttgttcagttgacttactgtttcttaccttaaaaagtaattgtagatggaaatcagttgtgtttggcaggagaatcaataaaaatctttgattcagacagcttatggggtattttaagcattcttagactagttgaacatctcactttgccccagttacaaaaatagtagaacaagcaacataaaacaatgaaggaaaacctcacttgaaggcccaggtcaacatctaagcctgttgagacttagataatcgagtctacctcttcagtaggtttgtgtggatggcctggagggcaggtgccctctgctccccagtgctacctctctcttccctagggccttttgtggattgacagtagtcccctccgtaggagctcacagtctagattagaagtgttttaatttctacacacccatagtgcacacttgtatattgaaaagatagggaagagagaaacatttatggaatcagtcgttggcaccttcaatacttcatgatttttgtcgagtttacttcatgaggaggtcagcccattggctcccatctgaaccactttgcctctgaaacttaattacatccagaaagaaggacacttgtatgctagtctatggtcagttgaggaatatgactgtttttatatgcacatgtaacccaaatgtccaatataaattggcttattttttaaaataattttaaaagttgggaaaagtgttattatttggcatgcttaaatattgaataagtattcttcatcagcatttaataaatgtataggcagatgtaaggtaatttctgtgtattttgagataatgtcaaaatcatgaatatttcaaaataaactggggagttataaaaatacaactagagatata

SEQ ID NO: 333179 - DNA, 2311 bp, Homo sapiens
attttttaatttttatttttcagtccttattctgttctcattgtttttgctgacaccatagcccataggcatcgtaaaaacacctttttaggagaccccatttgctttgactggcactgagcaccgtgtttctttgcgtgtggggcaagtggagttcctgcagcctcacatttgcacgtgctgttcctctgcctggaagctcctccttgcttcttgggtcattcggctcctatttgcccctcgtgggtcagcttaaattcatttcttgatagaggtattctgctgccctgtcattaggccagattgtgcattagacttaggcctgcctgcagttctcattcctgcacctaatcctgagctgtaaaacttcgtgcatgggagctcttggctgttccgttcccacataaagcacgtacctgactcatcaactcatctgtcgcaggtgctcagtcgaaatttgttaaataaatggaggcgcttagttaagtttgcctttttcttttgtagcaatgtgaaagctaagggtggaagtctagagtgaagctgagttttcagcttgggcagaggcttaaggaataaaagatggaagagtaattaaggagtgggtcgtgctgtgggaagtgctgtgtcaagacacctgaggatggaattggtagccctctgttttgggactggttcagatggtgttttgggttcctttctatgacctttatctctgaaacttgattgtcttaaaatgtattttgtgggagaaaatataattattgtatattttgtgtaacagaatcagtgagaataagctgctgtcgcaaactgtcttgcctagagagagggcagtggcatacagctgcagaaggggccacacgggcctgctgagtgttccgtttcatttcaaattaggtcattctgtcttgattttgatatggatgtttcagaagaccctagcagatgtccctgtttaacttgaaaccatagatcagaaaactaagttcatatttcaattttacagagatttgaatagaaaaagtaatcaagttaaaacctgcaaagctaaaattgaactacttgggagctatgatccacaaaaacaacttattattgaagatccctattatgtaagtacagttcacgttttagggctaatatgaagacccaacacatttgtatcctgccatattaaataacagatgagattgtgttaaggatgtttttgttatgcaggttttgccattttcttctttttcctgtccatttaggggaatgactctgactttgagacggtgtaccagcagtgtgtcaggtgctgcagagcgttcttggagaaggcccactgaggcaggttcgtgccctgctgcggccagcctgactagaccccaccctgaggtcctgcatttctcagtcggtgtgtaatcacgttccagggcccaaagcccagctctttgttcagttgacttactgtttcttaccttaaaaagtaattgtagatggaaatcagttgtgtttggcaggagaatcaataaaaatctttgattcagacagcttatggggtattttaagcattcttagactagttgaacatctcactttgccccagttacaaaaatagtagaacaagcaacataaaacaatgaaggaaaacctcacttgaaggcccaggtcaacatctaagcctgttgagacttagataatcgagtctacctcttcagtaggtttgtgtggatggcctggagggcaggtgccctctgctccccagtgctacctctctcttccctagggccttttgtggattgacagtagtcccctccgtaggagctcacagtctagattagaagtgttttaatttctacacacccatagtgcacacttgtatattgaaaagatagggaagagagaaacatttatggaatcagtcgttggcaccttcaatacttcatgatttttgtcgagtttacttcatgaggaggtcagcccattggctcccatctgaaccactttgcctctgaaacttaattacatccagaaagaaggacacttgtatgctagtctatggtcagttgaggaatatgactgtttttatatgcacatgtaacccaaatgtccaatataaattggcttattttttaaaataattttaaaagttgggaaaagtgttattatttggcatgcttaaatattgaataagtattcttcatcagcatttaataaatgtataggcagatgtaaggtaatttctgtgtattttgagataatgtcaaaatcatgaatatttcaaaataaactggggagttataaaaatacaactagagatata

SEQ ID NO: 333180 - DNA, 1458 bp, Homo sapiens
tgcgcaggcgcgcggggcaagaggctggcagtgcgcctgcgccgcgtcggcgtgcggaacgccgcggtgtctcggcgcctctgcgcgcgggaagatggcggaacaggctaccaagtccgtgctgtttgtgtgtctgggtaacatttgtcgatcacccattgcagaagcagttttcaggaaacttgtaaccgatcaaaacatctcagagaattggagggtagacagcgcggcaacttccgggtatgagatagggaacccccctgactaccgagggcagagctgcatgaagaggcacggcattcccatgagccacgttgcccggcagattaccaaagaagattttgccacatttgattatatactatgtatggatgaaagcaatctgagagatttgaatagaaaaagtaatcaagttaaaacctgcaaagctaaaattgaactacttgggagctatgatccacaaaaacaacttattattgaagatccctattatgggaatgactctgactttgagacggtgtaccagcagtgtgtcaggtgctgcagagcgttcttggagaaggcccactgaggcaggttcgtgccctgctgcggccagcctgactagaccccaccctgaggtcctgcatttctcagtcggtgtgtaatcacgttccagggcccaaagcccagctctttgttcagttgacttactgtttcttaccttaaaaagtaattgtagatggaaatcagttgtgtttggcaggagaatcaataaaaatctttgattcagacagcttatggggtattttaagcattcttagactagttgaacatctcactttgccccagttacaaaaatagtagaacaagcaacataaaacaatgaaggaaaacctcacttgaaggcccaggtcaacatctaagcctgttgagacttagataatcgagtctacctcttcagtaggtttgtgtggatggcctggagggcaggtgccctctgctccccagtgctacctctctcttccctagggccttttgtggattgacagtagtcccctccgtaggagctcacagtctagattagaagtgttttaatttctacacacccatagtgcacacttgtatattgaaaagatagggaagagagaaacatttatggaatcagtcgttggcaccttcaatacttcatgatttttgtcgagtttacttcatgaggaggtcagcccattggctcccatctgaaccactttgcctctgaaacttaattacatccagaaagaaggacacttgtatgctagtctatggtcagttgaggaatatgactgtttttatatgcacatgtaacccaaatgtccaatataaattggcttattttttaaaataattttaaaagttgggaaaagtgttattatttggcatgcttaaatattgaataagtattcttcatcagcatttaataaatgtataggcagatgt

SEQ ID NO: 333181 - DNA, 453 bp, Homo sapiens
tgcgcaggcgcgcggggcaagaggctggcagtgcgcctgcgccgcgtcggcgtgcggaacgccgcggtgtctcggcgcctctgcgcgcgggaagatggcggaacaggctaccaagtccgtgctgtttgtgtgtctgggtaacatttgtcgatcacccattgcagaagcagttttcaggaaacttgtaaccgatcaaaacatctcagagaattggagggtagacagcgcggcaacttccgggtatgagatagggaacccccctgactgctgcggccagcctgactagaccccaccctgaggtcctgcatttctcagtcggtgtgtaatcacgttccagggcccaaagcccagctctttgttcagttgacttactgtttcttaccttaaaaagtaattgtagatggaaatcagttgtgtttggcaggagaatcaataaaaatctttgattcagac

SEQ ID NO: 333182 - DNA, 1459 bp, Homo sapiens
tcgaattcccgcgcagagcccgcaagtccgtgctgtttgtgtgtctgggtaacatttgtcgatcacccattgcagaagcagttttcaggaaacttgtaaccgatcaaaacatctcagagaattgggtcattgacagcggtgctgtttctgactggaacgtgggccggtccccagacccaagagctgtgagctgcctaagaaatcatggcattcacacagcccataaagcaagacagattaccaaagaagattttgccacatttgattatatactatgtatggatgaaagcaatctgagagatttgaatagaaaaagtaatcaagttaaaacctgcaaagctaaaattgaactacttgggagctatgatccacaaaaacaacttattattgaagatccctattatgggaatgactctgactttgagacggtgtaccagcagtgtgtcaggtgctgcagagcgttcttggagaaggcccactgaggcaggttcgtgccctgctgcggccagcctgactagaccccaccctgaggtcctgcatttctcagtcggtgtgtaatcacgttccagggcccaaagcccagctctttgttcagttgacttactgtttcttaccttaaaaagtaattgtagatggaaatcagttgtgtttggcaggagaatcaataaaaatctttgattcagacagcttatggggtattttaagcattcttagactagttgaacatctcactttgccccagttacaaaaatagtagaacaagcaacataaaacaatgaaggaaaacctcacttgaaggcccaggtcaacatctaagcctgttgagacttagataatcgagtctacctcttcagtaggtttgtgtggatggcctggagggcaggtgccctctgctccccagtgctacctctctcttccctagggccttttgtggattgacagtagtcccctccgtaggagctcacagtctagattagaagtgttttaatttctacacacccatagtgcacacttgtatattgaaaagatagggaagagagaaacatttatggaatcagtcgttggcaccttcaatacttcatgatttttgtcgagtttacttcatgaggaggtcagcccattggctcccatctgaaccactttgcctctgaaacttaattacatccagaaagaaggacacttgtatgctagtctatggtcagttgaggaatatgactgtttttatatgcacatgtaacccaaatgtccaatataaattggcttattttttaaaataattttaaaagttgggaaaagtgttattatttggcatgcttaaatattgaataagtattcttcatcagcatttaataaatgtataggcagatgtaaggtaatttctgtgtattttgagataatgtcaaaatcatgaatatttcaaaataaactggggagttataaaaatacaactagagatata

SEQ ID NO: 333183 - DNA, 774 bp, Homo sapiens
tgcgcaggcgcgcggggcaagaggctggcagtgcgcctgcgccgcgtcggcgtgcggaacgccgcggtgtctcggcgcctctgcgcgcgggaagatggcggaacaggctaccaagtccgtgctgtttgtgtgtctgggtaacatttgtcgatcacccattgcagaagcagttttcaggaaacttgtaaccgatcaaaacatctcagagaattggagggtagacagcgcggcaacttccgggtatgagatagggaacccccctgactaccgagggcagagctgcatgaagaggcacggcattcccatgagccacgttgcccggcagattaccaaagaagattttgccacatttgattatatactatgtatggatgaaagcaatctgagagatttgaatagaaaaagtaatcaagttaaaacctgcaaagctaaaattgaactacttgggagctatgatccacaaaaacaacttattattgaagatccctattatgggaatgactctgactttgagacggtgtaccagcagtgtgtcaggtgctgcagagcgttcttggagaaggcccactgaggcaggttcgtgccctgctgcggccagcctgactagaccccaccctgaggtcctgcatttctcagtcggtgtgtaatcacgttccagggcccaaagcccagctctttgttcagttgacttactgtttcttaccttaaaaagtaattgtagatggaaatcagttgtgtttggcaggagaatcaataaaaatctttgattcagac

SEQ ID NO: 333184 - DNA, 774 bp, Homo sapiens
tgcgcaggcgcgcggggcaagaggctggcagtgcgcctgcgccgcgtcggcgtgcggaacgccgcggtgtctcggcgcctctgcgcgcgggaagatggcggaacaggctaccaagtccgtgctgtttgtgtgtctgggtaacatttgtcgatcacccattgcagaagcagttttcaggaaacttgtaaccgatcaaaacatctcagagaattgggtcattgacagcggtgctgtttctgactggaacgtgggccggtccccagacccaagagctgtgagctgcctaagaaatcatggcattcacacagcccataaagcaagacagattaccaaagaagattttgccacatttgattatatactatgtatggatgaaagcaatctgagagatttgaatagaaaaagtaatcaagttaaaacctgcaaagctaaaattgaactacttgggagctatgatccacaaaaacaacttattattgaagatccctattatgggaatgactctgactttgagacggtgtaccagcagtgtgtcaggtgctgcagagcgttcttggagaaggcccactgaggcaggttcgtgccctgctgcggccagcctgactagaccccaccctgaggtcctgcatttctcagtcggtgtgtaatcacgttccagggcccaaagcccagctctttgttcagttgacttactgtttcttaccttaaaaagtaattgtagatggaaatcagttgtgtttggcaggagaatcaataaaaatctttgattcagac

SEQ ID NO: 333185 - DNA, 820 bp, Homo sapiens
tgcgcaggcgcgcggggcaagaggctggcagtgcgcctgcgccgcgtcggcgtgcggaacgccgcggtgtctcggcgcctctgcgcgcgggaagatggcggaacaggctaccaagtccgtgctgtttgtgtgtctgggtaacatttgtcgatcacccattgcagaagcagttttcaggaaacttgtaaccgatcaaaacatctcagagaattggagggtagacagcgcggcaacttccgggtatgagatagggaacccccctgactaccgagggcagagctgcatgaagaggcacggcattcccatgagccacgttgcccggcagattaccaaagaagattttgccacatttgattatatactatgtatggatgaaagcaatctgaggtaatcctgtttttgaagaatatttctgttcaactctcagttcagcagtgggccaagtaatttgttgtccagatttactttttctattttaaaggttttaatagtcagtgatggtcaccatatgtagaattattttatttagaacagcaaaaaacttagtaatctagaattgtctcttaggtatttacaaggaaatacaccttagaaaagggaaagtctagttgttaatagcatgatttaattggaaaactagcttggctgttatagttttgtatcaagcatattgttctgcatgagaacgattttgatatttttgctgtaatgattcctgggcagggcagtgttttattgattctcaggtcaaagctctgcaaccataggttcctattattatcccatcttgtaaaagaaggaagtgagaaacggtaatgtt

SEQ ID NO: 333186 - DNA, 1682 bp, Homo sapiens
tgcgcaggcgcgcggggcaagaggctggcagtgcgcctgcgccgcgtcggcgtgcggaacgccgcggtgtctcggcgcctctgcgcgcgggaagatggcggaacaggctaccaagtccgtgctgtttgtgtgtctgggtaacatttgtcgatcacccattgcagaagcagttttcaggaaacttgtaaccgatcaaaacatctcagagaattggagggtagacagcgcggcaacttccgggtatgagatagggaacccccctgactaccgagggcagagctgcatgaagaggcacggcattcccatgagccacgttgcccggcagattaccaaagaagattttgccacatttgattatatactatgtatggatgaaagcaatctgagagatttgaatagaaaaagtaatcaagttaaaacctgcaaagctaaaattgaactacttgggagctatgatccacaaaaacaacttattattgaagatccctattatgggaatgactctgactttgagacggtgtaccagcagtgtgtcaggtgctgcagagcgttcttggagaaggcccactgaggcaggttcgtgccctgctgcggccagcctgactagaccccaccctgaggtcctgcatttctcagtcggtgtgtaatcacgttccagggcccaaagcccagctctttgttcagttgacttactgtttcttaccttaaaaagtaattgtagatggaaatcagttgtgtttggcaggagaatcaataaaaatctttgattcagacagcttatggggtattttaagcattcttagactagttgaacatctcactttgccccagttacaaaaatagtagaacaagcaacataaaacaatgaaggaaaacctcacttgaaggcccaggtcaacatctaagcctgttgagacttagataatcgagtctacctcttcagtaggtttgtgtggatggcctggagggcaggtgccctctgctccccagtgctacctctctcttccctagggccttttgtggattgacagtagtcccctccgtaggagctcacagtctagattagaagtgttttaatttctacacacccatagtgcacacttgtatattgaaaagatagggaagagagaaacatttatggaatcagtcgttggcaccttcaatacttcatgatttttgtcgagtttacttcatgaggaggtcagcccattggctcccatctgaaccactttgcctctgaaacttaattacatccagaaagaaggacacttgtatgctagtctatggtcagttgaggaatatgactgtttttatatgcacatgtaacccaaatgtccaatataaattggcttattttttaaaataattttaaaagttgggaaaagtgttattatttggcatgcttaaatattgaataagtattcttcatcagcatttaataaatgtataggcagatgtaaggtaatttctgtgtattttgagataatgtcaaaatcatgaatatttcaaaataaactggggagttataaaaatacaactagagatataaatctggtgtctgcctgtttttttattgacaggtaaggaagcatttgaaaacattgtattgtcctttttacatgatctgtgatgttaggtgtgcatattttatcttcaggataaggaagtaaaatgatgaaaat

SEQ ID NO: 333187 - DNA, 1425 bp, Homo sapiens
gaattcccccgcgcgcagagaggccgcgagacccattgcagaagcagttttcaggaaacttgtaaccgatcaaaacatctcagagaattggagggtagacagcgcggcaacttccgggtatgagatagggaacccccctgactaccgagggcagagctgcatgaagaggcacggcattcccatgagccacgttgcccggcagattaccaaagaagattttgccacatttgattatatactatgtatggatgaaagcaatctgagagatttgaatagaaaaagtaatcaagttaaaacctgcaaagctaaaattgaactacttgggagctatgatccacaaaaacaacttattattgaagatccctattatgggaatgactctgactttgagacggtgtaccagcagtgtgtcaggtgctgcagagcgttcttggagaaggcccactgaggcaggttcgtgccctgctgcggccagcctgactagaccccaccctgaggtcctgcatttctcagtcggtgtgtaatcacgttccagggcccaaagcccagctctttgttcagttgacttactgtttcttaccttaaaaagtaattgtagatggaaatcagttgtgtttggcaggagaatcaataaaaatctttgattcagacagcttatggggtattttaagcattcttagactagttgaacatctcactttgccccagttacaaaaatagtagaacaagcaacataaaacaatgaaggaaaacctcacttgaaggcccaggtcaacatctaagcctgttgagacttagataatcgagtctacctcttcagtaggtttgtgtggatggcctggagggcaggtgccctctgctccccagtgctacctctctcttccctagggccttttgtggattgacagtagtcccctccgtaggagctcacagtctagattagaagtgttttaatttctacacacccatagtgcacacttgtatattgaaaagatagggaagagagaaacatttatggaatcagtcgttggcaccttcaatacttcatgatttttgtcgagtttacttcatgaggaggtcagcccattggctcccatctgaaccactttgcctctgaaacttaattacatccagaaagaaggacacttgtatgctagtctatggtcagttgaggaatatgactgtttttatatgcacatgtaacccaaatgtccaatataaattggcttattttttaaaataattttaaaagttgggaaaagtgttattatttggcatgcttaaatattgaataagtattcttcatcagcatttaataaatgtataggcagatgtaaggtaatttctgtgtattttgagataatgtcaaaatcatgaatatttcaaaataaactggggagttataaaaatacaactagagatata

SEQ ID NO: 333188 - DNA, 1577 bp, Homo sapiens
tgcgcaggcgcgcggggcaagaggctggcagtgcgcctgcgccgcgtcggcgtgcggaacgccgcggtgtctcggcgcctctgcgcgcgggaagatggcggaacaggctaccaagtccgtgctgtttgtgtgtctgggtaacatttgtcgatcacccattgcagaagcagttttcaggaaacttgtaaccgatcaaaacatctcagagaattggagggtagacagcgcggcaacttccggtgggtcattgacagcggtgctgtttctgactggaacgtgggccggtccccagacccaagagctgtgagctgcctaagaaatcatggcattcacacagcccataaagcaagacagattaccaaagaagattttgccacatttgattatatactatgtatggatgaaagcaatctgagagatttgaatagaaaaagtaatcaagttaaaacctgcaaagctaaaattgaactacttgggagctatgatccacaaaaacaacttattattgaagatccctattatgggaatgactctgactttgagacggtgtaccagcagtgtgtcaggtgctgcagagcgttcttggagaaggcccactgaggcaggttcgtgccctgctgcggccagcctgactagaccccaccctgaggtcctgcatttctcagtcggtgtgtaatcacgttccagggcccaaagcccagctctttgttcagttgacttactgtttcttaccttaaaaagtaattgtagatggaaatcagttgtgtttggcaggagaatcaataaaaatctttgattcagacagcttatggggtattttaagcattcttagactagttgaacatctcactttgccccagttacaaaaatagtagaacaagcaacataaaacaatgaaggaaaacctcacttgaaggcccaggtcaacatctaagcctgttgagacttagataatcgagtctacctcttcagtaggtttgtgtggatggcctggagggcaggtgccctctgctccccagtgctacctctctcttccctagggccttttgtggattgacagtagtcccctccgtaggagctcacagtctagattagaagtgttttaatttctacacacccatagtgcacacttgtatattgaaaagatagggaagagagaaacatttatggaatcagtcgttggcaccttcaatacttcatgatttttgtcgagtttacttcatgaggaggtcagcccattggctcccatctgaaccactttgcctctgaaacttaattacatccagaaagaaggacacttgtatgctagtctatggtcagttgaggaatatgactgtttttatatgcacatgtaacccaaatgtccaatataaattggcttattttttaaaataattttaaaagttgggaaaagtgttattatttggcatgcttaaatattgaataagtattcttcatcagcatttaataaatgtataggcagatgtaaggtaatttctgtgtattttgagataatgtcaaaatcatgaatatttcaaaataaactggggagttataaaaatacaactagagatata

SEQ ID NO: 333189 - DNA, 1689 bp, Homo sapiens
tgcgcaggcgcgcggggcaagaggctggcagtgcgcctgcgccgcgtcggcgtgcggaacgccgcggtgtctcggcgcctctgcgcgcgggaagatggcggaacaggctaccaagtccgtgctgtttgtgtgtctgggtaacatttgtcgatcacccattgcagaagcagttttcaggaaacttgtaaccgatcaaaacatctcagagaattggagggtagacagcgcggcaacttccgggtatgagatagggaacccccctgactaccgagggcagagctgcatgaagaggcacggcattcccatgagccacgttgcccggcagattaccaaagaagattttgccacatttgattatatactatgtatggatgaaagcaatctgagagatttgaatagaaaaagtaatcaagttaaaacctgcaaagctaaaattgaactacttgggagctatgatccacaaaaacaacttattattgaagatccctattatgtaagtacagttcacgttttagggctaatatgaagacccaacacatttgtatcctgccatattaaataacagatgagattgtgttaaggatgtttttgttatgcaggttttgccattttcttctttttcctgtccatttaggggaatgactctgactttgagacggtgtaccagcagtgtgtcaggtgctgcagagcgttcttggagaaggcccactgaggcaggttcgtgccctgctgcggccagcctgactagaccccaccctgaggtcctgcatttctcagtcggtgtgtaatcacgttccagggcccaaagcccagctctttgttcagttgacttactgtttcttaccttaaaaagtaattgtagatggaaatcagttgtgtttggcaggagaatcaataaaaatctttgattcagacagcttatggggtattttaagcattcttagactagttgaacatctcactttgccccagttacaaaaatagtagaacaagcaacataaaacaatgaaggaaaacctcacttgaaggcccaggtcaacatctaagcctgttgagacttagataatcgagtctacctcttcagtaggtttgtgtggatggcctggagggcaggtgccctctgctccccagtgctacctctctcttccctagggccttttgtggattgacagtagtcccctccgtaggagctcacagtctagattagaagtgttttaatttctacacacccatagtgcacacttgtatattgaaaagatagggaagagagaaacatttatggaatcagtcgttggcaccttcaatacttcatgatttttgtcgagtttacttcatgaggaggtcagcccattggctcccatctgaaccactttgcctctgaaacttaattacatccagaaagaaggacacttgtatgctagtctatggtcagttgaggaatatgactgtttttatatgcacatgtaacccaaatgtccaatataaattggcttattttttaaaataattttaaaagttgggaaaagtgttattatttggcatgcttaaatattgaataagtattcttcatcagcatttaataaatgtataggcagatgtaaggtaatttctgtgtattttgagataatgtcaaaatcatgaatatttcaaaataaactggggagttataaaaatacaactagagatata

SEQ ID NO: 333190 - DNA, 1494 bp, Homo sapiens
tgcgcaggcgcgcggggcaagaggctggcagtgcgcctgcgccgcgtcggcgtgcggaacgccgcggtgtctcggcgcctctgcgcgcgggaagatggcggaacaggctaccaagtccgtgctgtttgtgtgtctgggtaacatttgtcgatcacccattgcagaagcagttttcaggaaacttgtaaccgatcaaaacatctcagagaattggagggtagacagcgcggcaacttccgggtatgagatagggaacccccctgactaccgagggcagagctgcatgaagaggcacggcattcccatgagccacgttgcccggcagattaccaaagaagattttgccacatttgattatatactatgtatggatgaaagcaatctgagagatttgaatagaaaaagtaatcaagttaaaacctgcaaagctaaaattgaactacttgggagctatgatccacaggtgtaccagcagtgtgtcaggtgctgcagagcgttcttggagaaggcccactgaggcaggttcgtgccctgctgcggccagcctgactagaccccaccctgaggtcctgcatttctcagtcggtgtgtaatcacgttccagggcccaaagcccagctctttgttcagttgacttactgtttcttaccttaaaaagtaattgtagatggaaatcagttgtgtttggcaggagaatcaataaaaatctttgattcagacagcttatggggtattttaagcattcttagactagttgaacatctcactttgccccagttacaaaaatagtagaacaagcaacataaaacaatgaaggaaaacctcacttgaaggcccaggtcaacatctaagcctgttgagacttagataatcgagtctacctcttcagtaggtttgtgtggatggcctggagggcaggtgccctctgctccccagtgctacctctctcttccctagggccttttgtggattgacagtagtcccctccgtaggagctcacagtctagattagaagtgttttaatttctacacacccatagtgcacacttgtatattgaaaagatagggaagagagaaacatttatggaatcagtcgttggcaccttcaatacttcatgatttttgtcgagtttacttcatgaggaggtcagcccattggctcccatctgaaccactttgcctctgaaacttaattacatccagaaagaaggacacttgtatgctagtctatggtcagttgaggaatatgactgtttttatatgcacatgtaacccaaatgtccaatataaattggcttattttttaaaataattttaaaagttgggaaaagtgttattatttggcatgcttaaatattgaataagtattcttcatcagcatttaataaatgtataggcagatgtaaggtaatttctgtgtattttgagataatgtcaaaatcatgaatatttcaaaataaactggggagttataaaaatacaactagagatata

SEQ ID NO: 333191 - DNA, 786 bp, Homo sapiens
tgcgcaggcgcgcggggcaagaggctggcagtgcgcctgcgccgcgtcggcgtgcggaacgccgcggtgtctcggcgcctctgcgcgcgggaagatggcggaacaggctaccaagtccgtgctgtttgtgtgtctgggtaacatttgtcgatcacccattgcagaagcagttttcaggaaacttgtaaccgatcaaaacatctcagagaattggagggtagacagcgcggcaacttccgggtatgagatagggaacccccctgactaccgagggcagagctgcatgaagaggcacggcattcccatgagccacgttgcccggcagattaccaaagaagattttgccacatttgattatatactatgtatggatgaaagcaatctgagagatttgaatagaaaaagtaatcaagttaaaacctgcaaagctaaaattgaactacttgggagctatgatccacaaaaacaacttattattgaagatccctattatgggaatgactctgactttgagacggtgtaccagcagtgtgtcaggtgctgcagagcgttcttggagaaggcccactgaggcaggttcgtgccctgctgcggccagcctgactagaccccaccctgaggtcctgcatttctcagtcggtgtgtaatcacgttccagggcccaaagcccagctctttgttcagttgacttactgtttcttaccttaaaaagtaattgtagatggaaagtgcttgttgttgacagatgttaactttctgtaaaataaactgtatttgcaaatcgcg

SEQ ID NO: 333192 - DNA, 915 bp, Homo sapiens
tgcgcaggcgcgcggggcaagaggctggcagtgcgcctgcgccgcgtcggcgtgcggaacgccgcggtgtctcggcgcctctgcgcgcgggaagatggcggaacaggctaccaagtccgtgctgtttgtgtgtctgggtaacatttgtcgatcacccattgcagaagcagttttcaggaaacttgtaaccgatcaaaacatctcagagaattggagggtagacagcgcggcaacttccgggtatgagatagggaacccccctgactaccgagggcagagctgcatgaagaggcacggcattcccatgagccacgttgcccggcagattaccaaagaagattttgccacatttgattatatactatgtatggatgaaagcaatctgagagatttgaatagaaaaagtaatcaagttaaaacctgcaaagctaaaattgaactacttgggagctatgatccacaaaaacaacttattattgaagatccctattatgtaagtacagttcacgttttagggctaatatgaagacccaacacatttgtatcctgccatattaaataacagatgagattgtgttaaggatgtttttgttatgcaggttttgccattttcttctttttcctgtccatttaggggaatgactctgactttgagacggtgtaccagcagtgtgtcaggtgctgcagagcgttcttggagaaggcccactgaggcaggttcgtgccctgctgcggccagcctgactagaccccaccctgaggtcctgcatttctcagtcggtgtgtaatcacgttccagggcccaaagcccagctctttgttcagttgacttactgtttcttaccttaaaaagtaattgtagatggaaatcagttgtgtttggcaggagaatcaataaaaatctttgattcagac

SEQ ID NO: 333193 - DNA, 537 bp, Homo sapiens
tctgagtataaccagaaccaactgagccacccaaagtccgtggggtgccaggggtgtgggaacccatcaggacccacggtcaccatcttgattgcacatgagaaccacctgggactttacaaaatgtcaatgatcaccccataccaatgagacagaatccttatgcagggggcccagagaaacagtattttattttttcaaagagctctccagccagggttgagaaccgcagatccttctagcccagccctaaaattttttagctgctgaactaaggctgagcatctgcttaagatcatgagcaagagggcagaagtacccgcaacgtaaacatgaaaaaaaggactttgccatttggttgtgaagtcctggcttctcggttcactcgctgtgtgaccttggacaagtcacttagcctctctgagcctgagctattaaaatgaaatcatagatataaatcacccagcatgttcctggtacccagcaggccctcaataaatatttgtttctatctctttctctctaggatctaaggct

SEQ ID NO: 333194 - DNA, 371 bp, Homo sapiens
agaatggtaggggactgaattttgtaagcagtgtgtctttcctgacaggggcagggagcctggcttcctgagactgtcccctgatgccacagcagatgtgtcaaaccatttttcctgctcatggcatgtagtttgagagagcttgatagtgaagctgccagctcagctgtgactggccactcatttgcagacaagaatgccttactggcctgggcttgcttaaggtaattgcttctagactcctcactcctgctgggccacagttgcttgaacagtcaaataaggggttggggggtagaggatatatctcaaaaccttctttgtgcttgaagatttgtgattccttgttctttggagaatgaaaatatctt

SEQ ID NO: 333195 - DNA, 491 bp, Homo sapiens
tggggatcagttagggggaatggggagctttcacttctctgaagccaactgtgatcagcattgccctgagagtcactcttgggtcagacaataagaaagacaatgaggatggagtgggaaacaggatgggaaggaaagacaagaatgaatgcacaaaaacaaggcaacaagttagagtaaaaagaaagtgaatagcaacaaacatcatgtcatatttcaccctcactcactgctgctggtggctccaaagggagtttttaagtgtctcagctccagccagacttgtcttcatttactcttgcttctgaccatggcttctgaccatggctgccacatgatttgccttttacttagcaagcccagaggagttgcagcagtgccaggatgaagaactgcattctctcagtggaaggtggctgggtactatttgtattgagtgaattattcactcttgaaggcaagcactcccatccagattcatacactgcaat

SEQ ID NO: 333196 - DNA, 283 bp, Homo sapiens
cgattctcctgcctcagcctcctgagtagctgggattacgggcacccgcaaccacgcccggctaatttttgtatttttagtagagaccgggtttcaccgtgttggccaggctggtctcgaactcccgacctcagatgatctgcccacttcggcctcccagagtgctgggattacaggtgtgagccacgggtctggcctaaacacagctttattaaggtataacttgcgtgcttaccatataactcacccgttatatatttttgtttttattaatttttttttt

SEQ ID NO: 333197 - DNA, 2102 bp, Homo sapiens
tactgtacatttccatcagggcacttaaaagttctgttatttttgtttggttttgttatttcagtcctcagttaaggcaagaatgcatgtgtttcttaagaatgagtactctgcgttgatgtttatgagaaggtggtcattagatgcagtcttttcctttttaatcccctcttagcacttctgtgagtggagaggacattaagtaaaatttggaatcataagttgcaatgcagtaaaatggtgctggggaaggagccagttagtgtttctgtgagtttgtgttgtgatgcaataagagataagtaatgcagagagaaatgaaccatggaaagtaagaacactgatggtgattcctctgcaaagatgataagaaaaagaaccaataaatcacacaatctttatgtgctttctatatgtatttcttagtagtgataccattgatcctcttactttttttactccattaatactaataattatatactttgctgaggatcaaaacagccaagaaaggaattactgctaaagcatctaagattctcctgaactgtaaaatcaacaggaaatggccactgggagagaaggatttggtattgggtgaggggctttctccctttacctgcctcttcttgcttgctaatagtaagttctttgtgcaccttccaccacttctgagccactactattcaagtagagatttgccccaacacattaactttttccttggagatttatatggtcctgcattttgtcctgtgctcacaatgtgaagtgtcttctgtattcaaatcaaaaaataatatatttaaggtatataagtgtgaatctcctataatgatggaagaagaggttctcttgtcttagatagaaaagagccttctccaagagcaatgtcaaaacttgggctgtcatctttgagctgtttaccaaaatacagaccattattgaagaaaaacaaattatctattttgttttcccccatctaacatgatagtgcccccaaccaggttgtagcattgccttttaaaagagactcactcactcttagtttttaagaactggaaatttcccatcctcagatcccttaaaggatgaagagttggctgtacacttagcggacttgcctcttgtatgcaaggactactgattgaagtctgttttgctgtgtctggttatgttgtctgcacttttatgaaatcactacaataggtctgcattggaaatgactattaatttgtaaagaagtaagttttattaaacactgtctagaaaaagaaagtgaagctgagaactcttcctttattgtgcatttatattttctgctgaattccggtagttccctttaaagtcatgttgactaatgttttcctccttgtttgtattcagatttccaaaatttcactcatacaagggaagagactccatttagcttaacggtagtctttagatcataagaaatatataaattagtatgcaccttatctgcctgttgtgggtttcttaaacttgcacttcctacccacccaaagatagatatcctttaaagaaaataaaggcagagaattaaaactggggagccatttactatgtcaccatcactgttaactgtttcccagcaatctaaactttttgaagtttcagaggtgtattttttttttgtatatatgtctgtgtgattgtattgttttgtttctaaatatacaaggaattctttaaatagagaaaaaggttaatcctcactgaaacaccaggatgcccactggatatactaatctgaacatctgtaggtagtttgtcatgaaaaagtggagagaagatgagacttttgaatgaatgaaaaagggtatcttgatacccagaattccccccaaagtacgggtaattcaacctgcacagttttctttcactcaaagtgttcagcacttgtgagtgaaaaatcatgtaattatctgtaaatatgtagctaacaaattgacctagtttctgtatttttttgtttttgtactaaagtttataggtctgtgccagctagagagaagttgctgtcattaccagttgtggtcctagcatctaaccctgaaaccatcctaggtgacattttt

SEQ ID NO: 333198 - DNA, 2579 bp, Homo sapiens
tagtacgaggccggtggtaatcggccgagggcagtgagagagggagcccgtcctcggggggtaaccctctctctggggtggccagcagctccccgaacctcccgcacagagacgccgccgtggcggggagctcgcccaggctgcccagcctgctgcccccgcgcccaccgcctgccctgagcctggacatcgcctccgactccctgaggacagcaaacaaggtcgactcggatcttgcagactacaagctccgcgcgcagccgctcctggtgcgggcccacagcagcctgggccccggccggccgcggagccccctggcctgcgacgactgttcccttcgctcggccaaatcctccttcagcctcctggcgcccatccgcagcaaggacgtccgcagcaggagttacctggagggcagcctcctggccagcggggccctgttgggggcggatgagctggcccgctacttcccagaccggaacgtggcactcttcgtggccacctggaacatgcagggccagaaggagctcccgcccagcctggacgagttcctgctcccagccgaggccgactatgcccaggacctgtatgtcatcggggtccaggagggctgttctgacaggcgggagtgggagactcgtctgcaggagacgctgggcccgcactatgtgctgctgtcctcggcggcccacggcgtgctctacatgtcgctcttcatccgcagggacctcatctggttctgctcagaggtggagtgctccacggtgaccacacgcatcgtgtctcagatcaagaccaagggggccttgggcatcagcttcaccttttttggcacttccttcctcttcatcacgtcccacttcacctcaggtgacgggaaggtggcggagcggctgctggactacaccaggactgtacaagccctggtcctgcccagaaatgtgcccgacaccaacccctatcgctccagcgcagcggacgtcaccacccgcttcgatgaggtgttctggtttggagacttcaacttccgcctgagtggcgggcgcacagtcgtggacgccctcctgtgccagggcctggtggtggacgtgccggcgctgctgcagcacgaccagctcatccgggagatgcggaaagggtccatcttcaagggcttccaggagccggacatccacttcctcccatcatacaagtttgacatcgggaaggacacgtacgacagcacctccaagcagaggacgccctcatacacggaccgcgtcttgtacagaagccgccacaagggtgacatctgtcctgtgagctactcttcctgccccgggatcaagacgtccgaccaccgccctgtgtatggcctcttccgggtgaaagtgaggccggggcgagacaacattccgttggcagctggcaaatttgatagagaactgtacttactaggaattaaaagacggatttcgaaggagattcagaggcagcaagcactacagagtcagaactccagcaccatctgctccgtttcttgaagtttgctgaacgaggactcacagctgcaacgtggggtgattgtattgatcaaaacccactgggaaggacaaagagtttgccgcctttcggggatccgagggactgtggcgaccgtgcctctgtgccagcgtcccaggaaggaagccaaccctgagcgagcctgtcctctgtggcaggtccacacggtgtgggtgggcagggcttggacccccgtctccatggcaggtccatacagcatgggtggcagggtttggacccgcccagcagcaccacggaccccagccactctcgggggcagacgtcagaatccgttcctgagcagctcctgtgccctgggggcagtcacagagccccccaacacccccgtgctctgcaccagcctctccctccacacccgaagcaggcgtccatctgtgtcctcctggcagcccctcaaacacacaccaccccatgtcacacgggtatccagagcaaggctggatctgggctaggtgacccctggggcctcagacctctgagtgggccccagagcccagctgaggaagccacacagcctccaggacgtggcacggttcccctccacttggctgcaagtcgcctgccatggggcgaggaggcctgcaccccagtataagggcctccccagctgagtaagaagctgcttcccctcctctcataggccaagcctattgtgtgaaaccatctcatggtcttggtgacgtagaccatttttgaaaccgtctcatggtcttggtgacgtagaccgtttgcttctttaactccagccgcggaatgacattagtggaaccgggctagggaactgctggaagttcaggatgccaccaccttgaacacctaggccagggatccccaccatgtcccgggtttctttcttcgagagtatagaaccgttcattcttgctttgtgtcccattccatctcttgaaaaaatgtagtctttgaatgtgtgaaaatctagggacattcaatctagtcttttaaattatttttccatatttatatttttaaataaatgcatatattgagtcttaaaa

SEQ ID NO: 333199 - DNA, 2532 bp, Homo sapiens
tagtacgaggccggtggtaatcggccgagggcagtgagagagggagcccgtcctcggggggtaaccctctctctggggtggccagcagctccccgaacctcccgcacagagacgccgccgtggcggggagctcgcccaggctgcccagcctgctgcccccgcgcccaccgcctgccctgagcctggacatcgcctccgactccctgaggacagcaaacaaggtcgactcggatcttgcagactacaagctccgcgcgcagccgctcctggtgcgggcccacagcagcctgggccccggccggccgcggagccccctggcctgcgacgactgttcccttcgctcggccaaatcctccttcagcctcctggcgcccatccgcagcaaggacgtccgcagcaggagttacctggagggcagcctcctggccagcggggccctgttgggggcggatgagctggcccgctacttcccagaccggaacgtggcactcttcgtggccacctggaacatgcagggccagaaggagctcccgcccagcctggacgagttcctgctcccagccgaggccgactatgcccaggacctgtatgtcatcggggtccaggagggctgttctgacaggcgggagtgggagactcgtctgcaggagacgctgggcccgcactatgtgctgctgtcctcggcggcccacggcgtgctctacatgtcgctcttcatccgcagggacctcatctggttctgctcagaggtggagtgctccacggtgaccacacgcatcgtgtctcagatcaagaccaagggggccttgggcatcagcttcaccttttttggcacttccttcctcttcatcacgtcccacttcacctcaggtgacgggaaggtggcggagcggctgctggactacaccaggactgtacaagccctggtcctgcccagaaatgtgcccgacaccaacccctatcgctccagcgcagcggacgtcaccacccgcttcgatgaggtgttctggtttggagacttcaacttccgcctgagtggcgggcgcacagtcgtggacgccctcctgtgccagggcctggtggtggacgtgccggcgctgctgcagcacgaccagctcatccgggagatgcggaaagggtccatcttcaagggcttccaggagccggacatccacttcctcccatcatacaagtttgacatcgggaaggacacgtacgacagcacctccaagcagaggacgccctcatacacggaccgcgtcttgtacagaagccgccacaagggtgacatctgtcctgtgagctactcttcctgccccgggatcaagacgtccgaccaccgccctgtgtatggcctcttccgggtgaaagtgaggccggggcgagacaagaattaaaagacggatttcgaaggagattcagaggcagcaagcactacagagtcagaactccagcaccatctgctccgtttcttgaagtttgctgaacgaggactcacagctgcaacgtggggtgattgtattgatcaaaacccactgggaaggacaaagagtttgccgcctttcggggatccgagggactgtggcgaccgtgcctctgtgccagcgtcccaggaaggaagccaaccctgagcgagcctgtcctctgtggcaggtccacacggtgtgggtgggcagggcttggacccccgtctccatggcaggtccatacagcatgggtggcagggtttggacccgcccagcagcaccacggaccccagccactctcgggggcagacgtcagaatccgttcctgagcagctcctgtgccctgggggcagtcacagagccccccaacacccccgtgctctgcaccagcctctccctccacacccgaagcaggcgtccatctgtgtcctcctggcagcccctcaaacacacaccaccccatgtcacacgggtatccagagcaaggctggatctgggctaggtgacccctggggcctcagacctctgagtgggccccagagcccagctgaggaagccacacagcctccaggacgtggcacggttcccctccacttggctgcaagtcgcctgccatggggcgaggaggcctgcaccccagtataagggcctccccagctgagtaagaagctgcttcccctcctctcataggccaagcctattgtgtgaaaccatctcatggtcttggtgacgtagaccatttttgaaaccgtctcatggtcttggtgacgtagaccgtttgcttctttaactccagccgcggaatgacattagtggaaccgggctagggaactgctggaagttcaggatgccaccaccttgaacacctaggccagggatccccaccatgtcccgggtttctttcttcgagagtatagaaccgttcattcttgctttgtgtcccattccatctcttgaaaaaatgtagtctttgaatgtgtgaaaatctagggacattcaatctagtcttttaaattatttttccatatttatatttttaaataaatgcatatattgagtcttaaaa

SEQ ID NO: 333200 - DNA, 2398 bp, Homo sapiens
tagtacgaggccggtggtaatcggccgagggcagtgagagagggagcccgtcctcggggggtaaccctctctctggggtggccagcagctccccgaacctcccgcacagagacgccgccgtggcggggagctcgcccaggctgcccagcctgctgcccccgcgcccaccgcctgccctgagcctggacatcgcctccgactccctgaggacagcaaacaaggtcgactcggatcttgcagactacaagctccgcgcgcagccgctcctggtgcgggcccacagcagcctgggccccggccggccgcggagccccctggcctgcgacgactgttcccttcgctcggccaaatcctccttcagcctcctggcgcccatccgcagcaaggacgtccgcagcaggagttacctggagggcagcctcctggccagcggggccctgttgggggcggatgagctggcccgctacttcccagaccggaacgtggcactcttcgtggccacctggaacatgcagggccagaaggagctcccgcccagcctggacgagttcctgctcccagccgaggccgactatgcccaggacctgtatgtcatcggggtccaggagggctgttctgacaggcgggagtgggagactcgtctgcaggagacgctgggcccgcactatgtgctgctgtcctcggcggcccacggcgtgctctacatgtcgctcttcatccgcagggacctcatctggttctgctcagaggtggagtgctccacggtgaccacacgcatcgtgtctcagatcaagaccaagggggccttgggcatcagcttcaccttttttggcacttccttcctcttcatcacgtcccacttcacctcaggtgacgggaaggtggcggagcggctgctggactacaccaggactgtacaagccctggtcctgcccagaaatgtgcccgacaccaacccctatcgctccagcgcagcggacgtcaccacccgcttcgatgaggtgttctggtttggagacttcaacttccgcctgagtggcgggcgcacagtcgtggacgccctcctgtgccagggcctggtggtggacgtgccggcgctgctgcagcacgaccagctcatccgggagatgcggaaagggtccatcttcaagggcttccaggagccggacatccacttcctcccatcatacaagtttgacatcgggaaggacacgtacgacagcacctccaagcagaggacgccctcatacacggaccgcgtcttgtacagaagccgccacaagggtgacatctgtcctgtgagctactcttcctgccccgggatcaagacgtccgaccaccgccctgtgtatggcctcttccgggtgaaagtgaggccggggcgagacaacattccgttggcagctggcaaatttgatagagaactgtacttactaggaattaaaagacggatttcgaaggagattcagaggcagcaagcactacagagtcagaactccagcaccatctgctccgtttcttgaagtttgctgaacgaggactcacagctgcaacgtggggtgattgtattgatcaaaacccactgggaaggacaaagagtttgccgcctttcggggatccgagggactgtggcgaccgtgcctctgtgccagcgtcccaggaaggaagccaaccctgagcgagcctgtcctctgtggcaggtccacacggtgtgggtgggcagggcttggacccccgtctccatggcaggtccatacagcatgggtggcagggtttggacccgcccagcagcaccacggaccccagccactctcgggggcagacgtcagaatccgttcctgagcaggcctcagacctctgagtgggccccagagcccagctgaggaagccacacagcctccaggacgtggcacggttcccctccacttggctgcaagtcgcctgccatggggcgaggaggcctgcaccccagtataagggcctccccagctgagtaagaagctgcttcccctcctctcataggccaagcctattgtgtgaaaccatctcatggtcttggtgacgtagaccatttttgaaaccgtctcatggtcttggtgacgtagaccgtttgcttctttaactccagccgcggaatgacattagtggaaccgggctagggaactgctggaagttcaggatgccaccaccttgaacacctaggccagggatccccaccatgtcccgggtttctttcttcgagagtatagaaccgttcattcttgctttgtgtcccattccatctcttgaaaaaatgtagtctttgaatgtgtgaaaatctagggacattcaatctagtcttttaaattatttttccatatttatatttttaaataaatgcatatattgagtcttaaaa

SEQ ID NO: 333201 - DNA, 1663 bp, Homo sapiens
tgccctctgcccgttgcaccctcgctcaccctcctgccaggcccatggctgcatctctgggcatgtcccgatatctggatatctgctggaagcctcaagaagccactgaggcagggcagggtaggagcagccgctgtccacagggtctctccagcggcgagggacaggccctggcccagctggccacagacgccaggcaacaaaatgggcatgagtgtcaggggtcccagaaggcttccttgtggggggcgcttgagaacagcagggaggtgagcgggccacgccccacggctcctcacaagtaactggacctcctgcctctgcaatcttcccaaaggaccgcgtcttgtacagaagccgccacaagggtgacatctgtcctgtgagctactcttcctgccccgggatcaagacgtccgaccaccgccctgtgtatggcctcttccgggtgaaagtgaggccggggcgagacaacattccgttggcagctggcaaatttgatagagaactgtacttactaggaattaaaagacggatttcgaaggagattcagaggcagcaagcactacagagtcagaactccagcaccatctgctccgtttcttgaagtttgctgaacgaggactcacagctgcaacgtggggtgattgtattgatcaaaacccactgggaaggacaaagagtttgccgcctttcggggatccgagggactgtggcgaccgtgcctctgtgccagcgtcccaggaaggaagccaaccctgagcgagcctgtcctctgtggcaggtccacacggtgtgggtgggcagggcttggacccccgtctccatggcaggtccatacagcatgggtggcagggtttggacccgcccagcagcaccacggaccccagccactctcgggggcagacgtcagaatccgttcctgagcagctcctgtgccctgggggcagtcacagagccccccaacacccccgtgctctgcaccagcctctccctccacacccgaagcaggcgtccatctgtgtcctcctggcagcccctcaaacacacaccaccccatgtcacacgggtatccagagcaaggctggatctgggctaggtgacccctggggcctcagacctctgagtgggccccagagcccagctgaggaagccacacagcctccaggacgtggcacggttcccctccacttggctgcaagtcgcctgccatggggcgaggaggcctgcaccccagtataagggcctccccagctgagtaagaagctgcttcccctcctctcataggccaagcctattgtgtgaaaccatctcatggtcttggtgacgtagaccatttttgaaaccgtctcatggtcttggtgacgtagaccgtttgcttctttaactccagccgcggaatgacattagtggaaccgggctagggaactgctggaagttcaggatgccaccaccttgaacacctaggccagggatccccaccatgtcccgggtttctttcttcgagagtatagaaccgttcattcttgctttgtgtcccattccatctcttgaaaaaatgtagtctttgaatgtgtgaaaatctagggacattcaatctagtcttttaaattatttttccatatttatatttttaaataaatgcatatattgagtcttaaaa

SEQ ID NO: 333202 - DNA, 3095 bp, Homo sapiens
ggcgtttctgctcctcgctgcgccggcgaccccggacccggcacccgtgacccctcgcgctgcctgcggcctcgcgccgaggcctgccccgggagagaccgtccatgccgtccaaggcggagaatctgcggccctccgagccggccccgcagccgccggaagggaggacgctccaaggacagcttcccggcgctccgccggcccagcgcgcggggtccccacccgatgctccgggctccgagagccccgcgcttgcctgcagcactccggccacgcccagcggcgaggacccgccagcccgagcagcacccatcgccccgcggccccccgccaggcctcgactggagcgagccctgtccctggacgacaagggctggaggaggaggcgttttcgaggcagccaggaggacctggaagcccggaatgggaccagtccctccaggggctcagtgcagagcgagggccccggggcccccgcccacagctgctccccgccctgcctgagcacctccttgcaggaaatccccaagtcccgcggggtcctgagcagtgagagagggagcccgtcctcggggggtaaccctctctctggggtggccagcagctccccgaacctcccgcacagagacgccgccgtggcggggagctcgcccaggctgcccagcctgctgcccccgcgcccaccgcctgccctgagcctggacatcgcctccgactccctgaggacagcaaacaaggtcgactcggatcttgcagactacaagctccgcgcgcagccgctcctggtgcgggcccacagcagcctgggccccggccggccgcggagccccctggcctgcgacgactgttcccttcgctcggccaaatcctccttcagcctcctggcgcccatccgcagcaaggacgtccgcagcaggagttacctggagggcagcctcctggccagcggggccctgttgggggcggatgagctggcccgctacttcccagaccggaacgtggcactcttcgtggccacctggaacatgcagggccagaaggagctcccgcccagcctggacgagttcctgctcccagccgaggccgactatgcccaggacctgtatgtcatcggggtccaggagggctgttctgacaggcgggagtgggagactcgtctgcaggagacgctgggcccgcactatgtgctgctgtcctcggcggcccacggcgtgctctacatgtcgctcttcatccgcagggacctcatctggttctgctcagaggtggagtgctccacggtgaccacacgcatcgtgtctcagatcaagaccaagggggccttgggcatcagcttcaccttttttggcacttccttcctcttcatcacgtcccacttcacctcaggtgacgggaaggtggcggagcggctgctggactacaccaggactgtacaagccctggtcctgcccagaaatgtgcccgacaccaacccctatcgctccagcgcagcggacgtcaccacccgcttcgatgaggtgttctggtttggagacttcaacttccgcctgagtggcgggcgcacagtcgtggacgccctcctgtgccagggcctggtggtggacgtgccggcgctgctgcagcacgaccagctcatccgggagatgcggaaagggtccatcttcaagggcttccaggagccggacatccacttcctcccatcatacaagtttgacatcgggaaggacacgtacgacagcacctccaagcagaggacgccctcatacacggaccgcgtcttgtacagaagccgccacaagggtgacatctgtcctgtgagctactcttcctgccccgggatcaagacgtccgaccaccgccctgtgtatggcctcttccgggtgaaagtgaggccggggcgagacaacattccgttggcagctggcaaatttgatagagaactgtacttactaggaattaaaagacggatttcgaaggagattcagaggcagcaagcactacagagtcagaactccagcaccatctgctccgtttcttgaagtttgctgaacgaggactcacagctgcaacgtggggtgattgtattgatcaaaacccactgggaaggacaaagagtttgccgcctttcggggatccgagggactgtggcgaccgtgcctctgtgccagcgtcccaggaaggaagccaaccctgagcgagcctgtcctctgtggcaggtccacacggtgtgggtgggcagggcttggacccccgtctccatggcaggtccatacagcatgggtggcagggtttggacccgcccagcagcaccacggaccccagccactctcgggggcagacgtcagaatccgttcctgagcagctcctgtgccctgggggcagtcacagagccccccaacacccccgtgctctgcaccagcctctccctccacacccgaagcaggcgtccatctgtgtcctcctggcagcccctcaaacacacaccaccccatgtcacacgggtatccagagcaaggctggatctgggctaggtgacccctggggcctcagacctctgagtgggccccagagcccagctgaggaagccacacagcctccaggacgtggcacggttcccctccacttggctgcaagtcgcctgccatggggcgaggaggcctgcaccccagtataagggcctccccagctgagtaagaagctgcttcccctcctctcataggccaagcctattgtgtgaaaccatctcatggtcttggtgacgtagaccatttttgaaaccgtctcatggtcttggtgacgtagaccgtttgcttctttaactccagccgcggaatgacattagtggaaccgggctagggaactgctggaagttcaggatgccaccaccttgaacacctaggccagggatccccaccatgtcccgggtttctttcttcgagagtatagaaccgttcattcttgctttgtgtcccattccatctcttgaaaaaatgtagtctttgaatgtgtgaaaatctagggacattcaatctagtcttttaaattatttttccatatttatatttttaaataaatgcatatattgagtcttaaaa

SEQ ID NO: 333203 - DNA, 2477 bp, Homo sapiens
tagtacgaggccggtggtaatcggccgagggcagtgagagagggagcccgtcctcggggggtaaccctctctctggggtggccagcagctccccgaacctcccgcacagagacgccgccgtggcggggagctcgcccaggctgcccagcctgctgcccccgcgcccaccgcctgccctgagcctggacatcgcctccgactccctgaggacagcaaacaaggtcgactcggatcttgcagactacaagctccgcgcgcagccgctcctggtgcgggcccacagcagcctgggccccggccggccgcggagccccctggcctgcgacgactgttcccttcgctcggccaaatcctccttcagcctcctggcgcccatccgcagcaaggacgtccgcagcaggagttacctggagggcagcctcctggccagcggggccctgttgggggcggatgagctggcccgctacttcccagaccggaacgtggcactcttcgtggccacctggaacatgcagggccagaaggagctcccgcccagcctggacgagttcctgctcccagccgaggccgactatgcccaggacctgtatgtcatcggggtccaggagggctgttctgacagggacctcatctggttctgctcagaggtggagtgctccacggtgaccacacgcatcgtgtctcagatcaagaccaagggggccttgggcatcagcttcaccttttttggcacttccttcctcttcatcacgtcccacttcacctcaggtgacgggaaggtggcggagcggctgctggactacaccaggactgtacaagccctggtcctgcccagaaatgtgcccgacaccaacccctatcgctccagcgcagcggacgtcaccacccgcttcgatgaggtgttctggtttggagacttcaacttccgcctgagtggcgggcgcacagtcgtggacgccctcctgtgccagggcctggtggtggacgtgccggcgctgctgcagcacgaccagctcatccgggagatgcggaaagggtccatcttcaagggcttccaggagccggacatccacttcctcccatcatacaagtttgacatcgggaaggacacgtacgacagcacctccaagcagaggacgccctcatacacggaccgcgtcttgtacagaagccgccacaagggtgacatctgtcctgtgagctactcttcctgccccgggatcaagacgtccgaccaccgccctgtgtatggcctcttccgggtgaaagtgaggccggggcgagacaacattccgttggcagctggcaaatttgatagagaactgtacttactaggaattaaaagacggatttcgaaggagattcagaggcagcaagcactacagagtcagaactccagcaccatctgctccgtttcttgaagtttgctgaacgaggactcacagctgcaacgtggggtgattgtattgatcaaaacccactgggaaggacaaagagtttgccgcctttcggggatccgagggactgtggcgaccgtgcctctgtgccagcgtcccaggaaggaagccaaccctgagcgagcctgtcctctgtggcaggtccacacggtgtgggtgggcagggcttggacccccgtctccatggcaggtccatacagcatgggtggcagggtttggacccgcccagcagcaccacggaccccagccactctcgggggcagacgtcagaatccgttcctgagcagctcctgtgccctgggggcagtcacagagccccccaacacccccgtgctctgcaccagcctctccctccacacccgaagcaggcgtccatctgtgtcctcctggcagcccctcaaacacacaccaccccatgtcacacgggtatccagagcaaggctggatctgggctaggtgacccctggggcctcagacctctgagtgggccccagagcccagctgaggaagccacacagcctccaggacgtggcacggttcccctccacttggctgcaagtcgcctgccatggggcgaggaggcctgcaccccagtataagggcctccccagctgagtaagaagctgcttcccctcctctcataggccaagcctattgtgtgaaaccatctcatggtcttggtgacgtagaccatttttgaaaccgtctcatggtcttggtgacgtagaccgtttgcttctttaactccagccgcggaatgacattagtggaaccgggctagggaactgctggaagttcaggatgccaccaccttgaacacctaggccagggatccccaccatgtcccgggtttctttcttcgagagtatagaaccgttcattcttgctttgtgtcccattccatctcttgaaaaaatgtagtctttgaatgtgtgaaaatctagggacattcaatctagtcttttaaattatttttccatatttatatttttaaataaatgcatatattgagtcttaaaa

SEQ ID NO: 333204 - DNA, 1508 bp, Homo sapiens
agggcctggggtgcggcggctggcacaagctggtctgagccagtccgagtgcccatcctgtggcagggtccatcttcaagggcttccaggagccggacatccacttcctcccatcatacaagtttgacatcgggaaggacacgtacgacagcacctccaagcagaggacgccctcatacacggaccgcgtcttgtacagaagccgccacaagggtgacatctgtcctgtgagctactcttcctgccccgggatcaagacgtccgaccaccgccctgtgtatggcctcttccgggtgaaagtgaggccggggcgagacaacattccgttggcagctggcaaatttgatagagaactgtacttactaggaattaaaagacggatttcgaaggagattcagaggcagcaagcactacagagtcagaactccagcaccatctgctccgtttcttgaagtttgctgaacgaggactcacagctgcaacgtggggtgattgtattgatcaaaacccactgggaaggacaaagagtttgccgcctttcggggatccgagggactgtggcgaccgtgcctctgtgccagcgtcccaggaaggaagccaaccctgagcgagcctgtcctctgtggcaggtccacacggtgtgggtgggcagggcttggacccccgtctccatggcaggtccatacagcatgggtggcagggtttggacccgcccagcagcaccacggaccccagccactctcgggggcagacgtcagaatccgttcctgagcagctcctgtgccctgggggcagtcacagagccccccaacacccccgtgctctgcaccagcctctccctccacacccgaagcaggcgtccatctgtgtcctcctggcagcccctcaaacacacaccaccccatgtcacacgggtatccagagcaaggctggatctgggctaggtgacccctggggcctcagacctctgagtgggccccagagcccagctgaggaagccacacagcctccaggacgtggcacggttcccctccacttggctgcaagtcgcctgccatggggcgaggaggcctgcaccccagtataagggcctccccagctgagtaagaagctgcttcccctcctctcataggccaagcctattgtgtgaaaccatctcatggtcttggtgacgtagaccatttttgaaaccgtctcatggtcttggtgacgtagaccgtttgcttctttaactccagccgcggaatgacattagtggaaccgggctagggaactgctggaagttcaggatgccaccaccttgaacacctaggccagggatccccaccatgtcccgggtttctttcttcgagagtatagaaccgttcattcttgctttgtgtcccattccatctcttgaaaaaatgtagtctttgaatgtgtgaaaatctagggacattcaatctagtcttttaaattatttttccatatttatatttttaaataaatgcatatattgagtcttaaaa

SEQ ID NO: 333205 - DNA, 401 bp, Homo sapiens
  misc_feature (287)..(287): n is a, c, g, or t
  misc_feature (293)..(293): n is a, c, g, or t
  misc_feature (295)..(295): n is a, c, g, or t
  misc_feature (301)..(301): n is a, c, g, or t
agcgaggggcagagcggccgctgcaagatcgtggtggtgggagacgcagagtgcggcaagacggcgctgctgcaggtgttcgccaaggacgcctatcccgggagttatgtccccaccgtgtttgagaactacactgcgagctttgagatcgacaagcgccgcattgagctcaacatgtgggacacttcaggttcctcttactatgataatgtccggcctctggcctatcctgattctgatgctgtgctcatctgcttcgacattagccgaccagaaacactctgcgntgtttntnaaagtnctgaattcatgttcttcccactaccctaagcttcccacctagtggaatatattcatcttgtttctttcagatgttgcaacaagacattaggcttctttac

SEQ ID NO: 333206 - DNA, 437 bp, Homo sapiens
cgagatacacaaggatcgagccaaaagctgcaacctccctctccacccccagtccccatattctggttttggcccaaggaaaatgtccattctatgaccttctcttttcctctcctctcacttctgcagctattctcacacaattgttcccctgcctgcgcccaggcttcctgacctcctgatcctggctgggaagttagggcaggcagagcgagcaattctgggcaggggagctggagggcagaagggtatcatcgtttctcatctcctcctccctcctcttctccagtggatgttgagggagctaacagggctggcatctggggcatgaactgggatggggcaggtgggcgttagggaagctggtatcaatccaccagccctagaacctcccttgcctcaacagtcacctaataaagcccacctccatggaaaac

SEQ ID NO: 333207 - DNA, 1914 bp, Homo sapiens
agcgaggggcagagcggccgctgcaagatcgtggtggtgggagacgcagagtgcggcaagacggcgctgctgcaggtgttcgccaaggacgcctatcccgggagttatgtccccaccgtgtttgagaactacactgcgagctttgagatcgacaagcgccgcattgagctcaacatgtgggacacttcaggttcctcttactatgataatgtccggcctctggcctatcctgattctgatgctgtgctcatctgcttcgacattagccgaccagaaacactggacagtgttctcaagaagtggcaaggagagactcaagagttctgccccaatgccaaggttgtgctggttggctgtaaactggacatgcggactgacctggccacactgagggagctgtccaagcagaggcttatccctgttacacatgagcagggcactgtgctggccaagcaggtgggggctgtgtcctatgttgagtgctcctcccggtcctctgagcgcagcgtcagggatgtcttccatgtggctacagtggcctcccttggccgtggccataggcagctgcgccgaactgactcacgccggggaatgcagcgatccgctcagctgtcaggacggccagaccgggggaatgagggcgagatacacaaggatcgagccaaaagctgcaacctcatgtgaggggctaggagagggcagagtgtgaagaggggtggtgagggacacaattgttcccctgcctgcgcccaggcttcctgacctcctgatcctggctgggaagttagggcaggcagagcgagcaattctgggcaggggagctggagggcagaagggtatcatcgtttctcatctcctcctccctcctcttctccagtggatgttgagggagctaacagggctggcatctggggcatgaactgggatggggcaggtgggcgttagggaagctggtatcaaatggtgaccttggtggagtctcctatgtgaagagtaccctccctctccacccccagtccccatatcctggttctggcccaaggaaaatgtccattctatgaccttctcttttcctctcctctcacttctgcagctattctcacacatctaacctctaggcaacatgcactaaattcaaaagcaaggagaagcccttgccccccatcagtccaccagccctagaacctcccttgcctcaacagtcacctaataaagcccacctccatggaaaacggctgtggctttagttttgttgctttttaaaaaaatcaatctaccaatctttagcagtaagagggaaagttagacctcagctggggaactttcctgtccatgtccacagatagagcagaggacaaagccataggttggatcagaagtgtccttttaggagtcagagttgggagaaggagacatcctgggactgttcatcctagttaatgaagtgggcaattctcaggccattagggggttttagagcagaccgacatataattagtcagcatttctcagcccagccaggcctgctgctagtgtgggaggggtcctgctcaccatctgtacccctggcttggagcctgctggtaccctgggggttgtggggataaggaggcatcaggccgggcgcgctggctcacgcctgtaatcccagcactttgggaggccgaggtgggcggatcacaagttcaggagatcgagaccatcctggctaacacggtgaaaccccatctctactaaaaatacaaaaaattagccaggcgcggtggcagtgcctgtagtcccagctgctcgggaggctgaggcaggagaatggtgtgaacccgggtgaacctgggaggcggagcttgcagtgagccgagattgcgccactgcattctagcctggatgacagagcaagactctgtctccaaaaaa

SEQ ID NO: 333208 - DNA, 1643 bp, Homo sapiens
agcgaggggcagagcggccgctgcaagatcgtggtggtgggagacgcagagtgcggcaagacggcgctgctgcaggtgttcgccaaggacgcctatcccgggagttatgtccccaccgtgtttgagaactacactgcgagctttgagatcgacaagcgccgcattgagctcaacatgtgggacacttcaggttcctcttactatgataatgtccggcctctggcctatcctgattctgatgctgtgctcatctgcttcgacattagccgaccagaaacactggacagtgttctcaagaagtggcaaggagagactcaagagttctgccccaatgccaaggttgtgctggttggctgtaaactggacatgcggactgacctggccacactgagggagctgtccaagcagaggcttatccctgttacacatgagcagggcactgtgctggccaagcaggtgggggctgtgtcctatgttgagtgctcctcccggtcctctgagcgcagcgtcagggatgtcttccatgtggctacagtggcctcccttggccgtggccataggcagctgcgccgaactgactcacgccggggaatgcagcgatccgctcagctgtcaggacggccagaccgggggaatgagggcgagatacacaaggatcgagccaaaagctgcaacctcatgtgaggggctaggagagggcagagtgtgaagaggggtggtgagggacacaattgttcccctgcctgcgcccaggcttcctgacctcctgatcctggctgggaagttagggcaggcagagcgagcaattctgggcaggggagctggagggcagaagggtatcatcgtttctcatctcctcctccctcctcttctccagtggatgttgagggagctaacagggctggcatctggggcatgaactgggatggggcaggtgggcgttagggaagctggtatcaaatggtgaccttggtggagtctcctatgtgaagagtaccctccctctccacccccagtccccatatcctggttctggcccaaggaaaatgtccattctatgaccttctcttttcctctcctctcacttctgcagctattctcacacatctaacctctaggcaacatgcactaaattcaaaagcaaggagaagcccttgccccccatcagtccaccagccctagaacctcccttgcctcaacagtcacctaataaagcccacctccatggaaaacggctgtggctttagttttgttgctttttaaaaaaatcaatctaccaatctttagcagtaagagggaaagttagacctcagctggggaactttcctgtccatgtccacagatagagcagaggacaaagccataggttggatcagaagtgtccttttaggagtcagagttgggagaaggagacatcctgggactgttcatcctagttaatgaagtgggcaattctcaggccattagggggttttagagcagaccgacatataattagtcagcatttctcagcccagccaggcctgctgctagtgtgggaggggtcctgctcaccatctgtacccctggcttggagcctgctggtaccctgggggtgggaggagaggaagtgtatcctctagagtcagccatgagcatggcta

SEQ ID NO: 333209 - DNA, 820 bp, Homo sapiens
agcgaggggcagagcggccgctgcaagatcgtggtggtgggagacgcagagtgcggcaagacggcgctgctgcaggtgttcgccaaggacgcctatcccgggagttatgtccccaccgtgtttgagaactacactgcgagctttgagatcgacaagcgccgcattgagctcaacatgtgggacacttcaggttcctcttactatgataatgtccggcctctggcctatcctgattctgatgctgtgctcatctgcttcgacattagccgaccagaaacactggacagtgttctcaagaagtggcaaggagagactcaagagttctgccccaatgccaaggttgtgctggttggctgtaaactggacatgcggactgacctggccacactgagggagctgtccaagcagaggcttatccctgttacacatgagcagggcactgtgctggccaagcaggtgggggctgtgtcctatgttgagtgctcctcccggtcctctgagcgcagcgtcagggatgtcttccatgtggctacagtggcctcccttggccgtggccataggcagctgcgccgaactgactcacgccggggaatgcagcgatccgctcagctgtcaggacggccagaccgggggaatgagggcgagatacacaaggatcgagccaaaagctgcaacctcatctattctcacacatctaacctctaggcaacatgcactaaattcaaaagcaaggagaagcccttgccccccatcagtccaccagccctagaacctcccttgcctcaacagtcacctaataaagcccacctccatggaaaac

SEQ ID NO: 333210 - DNA, 522 bp, Homo sapiens
tgaaagctgatatgggattgacagcagaggaagtccggtgagggatactggagagtgagattctggatcgtaggaagcgaggagccggcggaggttgctgaggttcccgggatctgaggactggagcctcagcaacctctgccggctcctccctcctcttctccagtggatgttgagggagctaacagggctggcatctggggcatgaactgggatggggcaggtgggcgttagggaagctggtatcaaatggtgaccttggtggagtctcctatgtgaagagtaccctccctctccacccccagtccccatatcctggttctggcccaaggaaaatgtccattctatgaccttctcttttcctctcctctcacttctgcagctattctcacacatctaacctctaggcaacatgcactaaattcaaaagcaaggagaagcccttgccccccatcagtccaccagccctagaacctcccttgcctcaacagtcacctaataaagcccacctccatggaaaac

SEQ ID NO: 333211 - DNA, 1233 bp, Homo sapiens
agcgaggggcagagcggccgctgcaagatcgtggtggtgggagacgcagagtgcggcaagacggcgctgctgcaggtgttcgccaaggacgcctatcccgggagttatgtccccaccgtgtttgagaactacactgcgagctttgagatcgacaagcgccgcattgagctcaacatgtgggacacttcaggttcctcttactatgataatgtccggcctctggcctatcctgattctgatgctgtgctcatctgcttcgacattagccgaccagaaacactggacagtgttctcaagaagtggcaaggagagactcaagagttctgccccaatgccaaggttgtgctggttggctgtaaactggacatgcggactgacctggccacactgagggagctgtccaagcagaggcttatccctgttacacatgagcagggcactgtgctggccaagcaggtgggggctgtgtcctatgttgagtgctcctcccggtcctctgagcgcagcgtcagggatgtcttccatgtggctacagtggcctcccttggccgtggccataggcagctgcgccgaactgactcacgccggggaatgcagcgatccgctcagctgtcaggacggccagaccgggggaatgagggcgagatacacaaggatcgagccaaaagctgcaacctcatgtgaggggctaggagagggcagagtgtgaagaggggtggtgagggacacaattgttcccctgcctgcgcccaggcttcctgacctcctgatcctggctgggaagttagggcaggcagagcgagcaattctgggcaggggagctggagggcagaagggtatcatcgtttctcatctcctcctccctcctcttctccagtggatgttgagggagctaacagggctggcatctggggcatgaactgggatggggcaggtgggcgttagggaagctggtatcaaatggtgaccttggtggagtctcctatgtgaagagtaccctccctctccacccccagtccccatatcctggttctggcccaaggaaaatgtccattctatgaccttctcttttcctctcctctcacttctgcagctattctcacacatctaacctctaggcaacatgcactaaattcaaaagcaaggagaagcccttgccccccatcagtccaccagccctagaacctcccttgcctcaacagtcacctaataaagcccacctccatggaaaac

SEQ ID NO: 333212 - DNA, 845 bp, Homo sapiens
agcgaggggcagagcggccgctgcaagatcgtggtggtgggagacgcagagtgcggcaagacggcgctgctgcaggtgttcgccaaggacgcctatcccgggagttatgtccccaccgtgtttgagaactacactgcgagctttgagatcgacaagcgccgcattgagctcaacatgtgggacacttcaggttcctcttactatgataatgtccggcctctggcctatcctgattctgatgctgtgctcatctgcttcgacattagccgaccagaaacactggacagtgttctcaagaagtggcaaggagagactcaagagttctgccccaatgccaaggttgtgctggttggctgtaaactggacatgcggactgacctggccacactgagggagctgtccaagcagaggcttatccctgttacacatgagcagggcactgtgctggccaagcaggtgggggctgtgtcctatgttgagtgctcctcccggtcctctgagcgcagcgtcagggatgtcttccatgtggctacagtggcctcccttggccgtggccataggcagctgcgccgaactgactcacgccggggaatgcagcgatccgctcagctgtcaggacggccagaccgggggaatgagggcgagatacacaaggaaaatgtccattctatgaccttctcttttcctctcctctcacttctgcagctattctcacacatctaacctctaggcaacatgcactaaattcaaaagcaaggagaagcccttgccccccatcagtccaccagccctagaacctcccttgcctcaacagtcacctaataaagcccacctccatggaaaac

SEQ ID NO: 333213 - DNA, 182 bp, Homo sapiens
cgcatttccagcaccaagaacactgcctggatcatctgattaatgcctcacagtgttctcagcagcagcaggttctgacacctgtatttcataagagatgcctgcacccacggacgaaccagctgcaggctgtaccctcagctccaccagctcatctgaacacatcgctacagacacaaagg

SEQ ID NO: 333214 - DNA, 251 bp, Homo sapiens
gggccagatcttgatgcccaacattggttatgggagcaacaaaaaaacaaagcacattgctgctgatgtgcaacaaatcttactgtgccgagatcgctcacaatgtttcctccaagaaccgcaaagccatcgtggaaacagctgcccaactggccatcagagtcaccaaccccaatgccaggctgcgcagcgaagaaaatgagtagacagctcgtgtgcacgttttctgtttaaataaatgtaaaaactgc

SEQ ID NO: 333215 - DNA, 94 bp, Homo sapiens
tgtgggcaggttgcctgggagacctgcttccttccttgtttcctctgccagaggccaaaggaagagattcaggtcagaacccaagcttccccgg

SEQ ID NO: 333216 - DNA, 106 bp, Homo sapiens
cgtctcatgggatgcacattgtacgtgtccctctttccgagggaaagggacattatcttggtgttctttatatttgaaacacctacacaacggtgtcttgcatata

SEQ ID NO: 333217 - DNA, 1286 bp, Homo sapiens
ttttccttttttaaatagaaaaatgccaattaagctctttttcagtcttgggattgtttttgccttcagttggtagccctcaatagaaaataggtcttctgtcagcagatgttgacaacaaagaaagggaagcttttaatttgttcactaatagtgaaaaagcaaacatttacataacacaaatgtactgataaacacaattaaggatatatgcttgcctatttgtgatccaagtgttcaattaaaattatataattattgtgaaacagaggaggatgatgttcaagctatcaccgattggcctgctcttcatgtttgttaacattccggggacaaacttcaacatcaacaacctcaaattctatggcagtatccaatcctgcgtcaagcctgaatcccgggaccagacctaatcccaggaagagcaccaatcccagaatgaaccccaatcctgggataagcccagatctcaaaatgacctcgagtcccaagatgactccaaattccaagacaagtctgaatagagcagtgaccccaaagagccacaactatgaatatgaatactgtgacaaatggtagcaccaatcctgggacaagcccaaatctcaaaatgacctcaaatccctagatgactccaaattccaagacaagtctgaatacagcagtgaccccaaagatagccacaactatgaatatgaacactgtgacaaatggtagcaccatactcaatccaatggacaacatttattttctatgtaatatttttgctgttttgtgtatacttgcactcaggctgaagtgaacttcaactgcctgcattcttatctcagtttcttattattgctgaatgacaagcatgctaggaaaatatcatttatttcaatttactatttaagaaattatcatcttgatttttttttgcaaattataattgtgtacgtttaaatattaacttaatatgatgttttccttccatatgaaagaagtatgcactaccttattaaatgctgaaacaagcaaaataccatgtttgccttttaaatgtttgcaaaactgaaccaaaactcagatatttatattaaaggtgtaagagaagaaattatgtaggtggggtgtgtgtgtgtgtgtggtgtatgtgagagagagcacacacatgagagtgagagagcgagtgagcaacagtgacagagagatgaaggataggggataggggatagaggatgggggtgtgggataaggagtggtatgggggaagttgtttttgtattttatttttatttttttga

SEQ ID NO: 333218 - DNA, 597 bp, Homo sapiens
ttgtaggcgtgtctgggactgtactgttctagaggcccaggtctttcagtttacccaagaacaagagctgcctcagggtttctcctctttccaggagggagtcttaggggcatggcacagccttagtgacattgatgtgtggaagaggttctgggtatttttgagatccgctagctttttagtgtttaacccttcagtttgaccaacatatttgacacacctaagcaccaggccctgtttggccctttaacacgttacttcccttcatcttgtccacctgatttacctcccttagcccctgccaccttgactcctagtgccctgctccaccgcacaggagctgccgggggaggtcgaggctgggaggcaggtgttgtgtgtctgggaccctctgattcttttcctcccgggcttgctaccatgagtctgatggagaccagctctgacctggggagctgggtcttcacctgtgcgcctgcattctgtcactggtgaatttcacctgagtatcatttgagtttgcgttccccacctgtaaagcagaagcagctctccctggttcatctgggagatgaacacttgtaccagcataaggtg

SEQ ID NO: 333219 - DNA, 361 bp, Homo sapiens
tggggctgggtgtggggacaggtctcttagaaggatagggagcagggccgccaggtgtgtgctttgaggtgcctggcagcttagagctaatggcagctgtgttttgctacagcgttaccttccccaaggctggtaatgggatgaaccaaaagaaactactgacttatttttctaggggactggggcttgggcagaaggctgcattttcctcctgggtaggacctggatcaggatagcccatgatgaatttgaccctgatgactctatagtggggaacaatgtcctcaggaaagcattcaggaaacccttcgtgtagtagtgatcaaagctctggagcagctcagcaggatggatgggaaaa

SEQ ID NO: 333220 - DNA, 408 bp, Homo sapiens
ttttttttaatggatgtcagattatgtcattcctctattcaaaactctccaatgtcttcctatttaactcagaataaagctctccatgatctggtccctgtctacccttgtgacttctccatattcctatctcccccttcgtttactccatctgtagccacactggcctcctttcgttccttagaatcaagaagcacgctctatgcctagaaagttattcccccaaagatacacatagctcactactccagttcttgcatatttctgcacaaattttattttctgagaggccttctttaataatccagtgtctccctattcccttaccctgctatttttcttcagatttattcatttatctgctttcctctactagaacgtaaactacagagagaaaactattttatt

SEQ ID NO: 333221 - DNA, 118 bp, Homo sapiens
cagcctggacatcatagtgagacaccctctctgaacaaacaaacacacacacacaaacactgcagctgtgggagccaggaagtctttctggtgtcacagctcatgctcagcccttcgg

SEQ ID NO: 333222 - DNA, 288 bp, Homo sapiens
cttctgtcccctctccttctccctgtcccagggcctccttctttcatctctcctcctcgtcccctccttttctctctgctgttcctctagcatgccacactcatgcccagcacagggcctttgcacttgctgtttcttctgtctgcagctcaggtctcctggatgcttgatgactgactcttgatcattccttgggtctttgcacaaatgtcacctcctctgggatggtatgcctgactgctccagttgaaactcctcctcatgcagccactctgttacatttcactt

SEQ ID NO: 333223 - DNA, 3629 bp, Homo sapiens
ccggctcgacggctcggtcaccgcctcgctgtcgtcgcggcgcccccggccgtcctctgtccgtaccgcccccggagccagggccgagtcctcgccatgccggcccggcggctgctgctgctgctgacgctgctgctgcccggcctcgggatttttggaagtaccagcacagtgacgcttcctgaaaccttgttgtttgtgtcaacgctggatggaagtttgcatgctgtcagcaagaggacaggctcaatcaaatggactttaaaagaagatccagtcctgcaggtcccaacacatgtggaagagcctgcctttctcccagatcctaatgatggcagcctgtatacgcttggaagcaagaataatgaaggcctgacgaaacttccttttaccatcccagaattggtgcaggcatccccatgccgaagttcagatggaatcctctacatgggtaaaaagcaggacatctggtatgttattgacctcctgaccggagagaagcagcagactttgtcatcggcctttgcagatagtctctgcccatcaacctctcttctgtatcttgggcgaacagaatacaccatcaccatgtacgacaccaaaacccgagagctccggtggaatgccacctactttgactatgcggcctcactgcctgaggacgacgtggactacaagatgtcccactttgtgtccaatggtgatgggctggtggtgactgtggacagtgaatctggggacgtcctgtggatccaaaactacgcctcccctgtggtggccttttatgtctggcagcgggagggtctgaggaaggtgatgcacatcaatgtcgctgtggagaccctgcgctatctgaccttcatgtctggggaggtggggcgcatcacaaagtggaagtacccgttccccaaggagacagaggccaagagcaagctgacgcccactctgtatgttgggaaatactctaccagcctctatgcctctccctcaatggtacacgagggggttgctgtcgtgccccgcggcagcacacttcctttgctggaagggccccagactgatggcgtcaccatcggggacaagggggagtgtgtgatcacgcccagcacggacgtcaagtttgatcccggactcaaaagcaagaacaagctcaactacttgaggaattactggcttctgataggacaccatgaaaccccactgtctgcgtctaccaagatgctggagagatttcccaacaatctacccaaacatcgggaaaatgtgattcctgctgattcagagaaaaagagctttgaggaagttatcaacctggttgaccagacttcagaaaacgcacctaccaccgtgtctcgggatgtggaggagaagcccgcccatgcccctgcccggcccgaggcccccgtggactccatgcttaaggacatggctaccatcatcctgagcaccttcctgctgattggctgggtggccttcatcatcacctatcccctgagcatgcatcagcagcagcagctccagcaccagcagttccagaaggaactggagaagatccagctcctgcagcagcagcagcagcagctgcccttccacccacctggagacacggctcaggacggcgagctcctggacacgtctggcccgtactcagagagctcgggcaccagcagccccagcacgtcccccagggcctccaaccactcgctctgctccggcagctctgcctccaaggctggcagcagcccctccctggaacaagacgatggagatgaggaaaccagcgtggtgatagttgggaaaatttccttctgtcccaaggatgtcctgggccatggagctgagggcacaattgtgtaccggggcatgtttgacaaccgcgacgtggccgtgaagaggatcctccccgagtgttttagcttcgcagaccgtgaggtccagctgttgcgagaatcggatgagcacccgaacgtgatccgctacttctgcacggagaaggaccggcaattccagtacattgccatcgagctgtgtgcagccaccctgcaagagtatgtggagcagaaggactttgcgcatctcggcctggagcccatcaccttgctgcagcagaccacctcgggcctggcccacctccactccctcaacatcgttcacagagacctaaagccacacaacatcctcatatccatgcccaatgcacacggcaagatcaaggccatgatctccgactttggcctctgcaagaagctggcagtgggcagacacagtttcagccgccgatctggggtgcctggcacagaaggctggatcgctccagagatgctgagcgaagactgtaaggagaaccctacctacacggtggacatcttttctgcaggctgcgtcttttactacgtaatctctgagggcagccacccttttggcaagtccctgcagcggcaggccaacatcctcctgggtgcctgcagccttgactgcttgcacccagagaagcacgaagacgtcattgcacgtgaattgatagagaagatgattgcgatggatcctcagaaacgcccctcagcgaacgacgtgctcaaacacccgttcttctggagcctagagaagcagctccagttcttccaggacgtgagcgacagaatagaaaaggaatccctggatggcccgatcgtgaagcagttagagagaggcgggagagccgtggtgaagatggactggcgggagaacatcactgaccccctccagacagacctgcgtaaattcaggacctataaaggtggttctgtcagagatctcctccgagccatgagaaataagaagcaccactaccgggagctgcctgcagaggtgcgggagacgctggggaccctccccgacgacttcgtgtgctacttcacgtctcgcttcccccacctcctcgcacacacctaccgggccatggagctgtgcagccacgagagactcttccagccctactacttccacgagcccccagagccccagcccccagtgactccagacgccctctgagcgagggcggcccctctgttctggtggccccagctgtgactgagggcctggtcaccacaattagagcttgatgcctcccggctttgcagggagaccaggcttcccaaaccaagtgccttgagctgcctgctctgcagcccacagaggacagtgctgaccccaggaagtgggagaagtggcccctcgtgacctacagggaactgggaagatgctggccccaaaagccttacggtcatgatgtctgcaaaggagggcctcagagacagcgcgagtagcacccccagccatctactggataaacttgcttcagactttttaaattcctgcttaatgtcagtctacaggcctttcaggaagggagaggagggaatcgtacattttgcttgcgtgctgggacagctaggctgagatgcaccaagtacagccttcactggagaccggaattgagaggtgggggatgctgaggagggggaggacggagttcagagggtgtcgtcctgcagtatgagatttctcattgatcacagatgtgcccagagtagcccaggtcactgttaactagtgtttctgcagaggcagcaggagccagcccggaattc

SEQ ID NO: 333224 - DNA, 1376 bp, Homo sapiens
ccggctcgacggctcggtcaccgcctcgctgtcgtcgcggcgcccccggccgtcctctgtccgtaccgcccccggagccagggccgagtcctcgccatgccggcccggcggctgctgctgctgctgacgctgctgctgcccggcctcggggtgagtgaccggggagcgtggggtggaggacagctcgcgacggccgggtcggggccggggcagcgtcgcggcgccggggctggagtccgagctgggagcgcgacggcggcggccagatgccccgtgagcccagccgtgggaggctcgggccgggcgtaggaggcggcaccgggccgggagagcttccctgacgggagtcgcggccccaccgaggcgtcggccgcccgaagagcctcccaagccagcgcggctgtcacgggcagcggctccccggaccccgcgggctcgggcgcaacttcgtggcgtcctgcacggcacttgggggtcccagaaggccccggcctgaggaggccgcccacctgcgggaccctcctcctcgcgggcgggcgccggcgctgcctggcgggggccgcggaggagccgaaagggcgttgggatccaggggaagggtctgtcctgcgcttcgaatccttgtttgaactttttaaaaattcgaaaactttggggaacgaatgcaacagggagtaaggactctcacccgagagctggcttctgccacttgccctgccggtttcttggtactgggaggctgcaggcttccttctgtgcaccgagacttccttgagcaagtggagctgtgggaattgcactcttggaagatcccgcatgggttcgaggtgaggccgcttcagaacctcaaatgaaagactgtctcctcgtgggagagcacctggggccatcagaaatgtcttttcatctttttctggaggagacgaatgatagggcctggtttacattcatttaactctttatgaccttcactcagctgtggatttgggggcactttgtgggagacttggcttttttttttcttctggttggaagaacctaaattagcgaatgtttttcacaaaatgtattgttcaggatgtgagcgtggcaaatttgtccgtgttctgtttaatgacctctttaaaggtactgtgtactctttaatagggatatcatgtaccaggtgtcccagtagagcactgacatgtgtgtgcctgagtgccagccaccgtgtgaactctttggaggttttgcattttaggtaaataactgtctgtactcttggagtaacaagaatttggaaacaggagaagtaaataaataaggttgcctttttcaaattcagggtttttttttttaaataaaggaaaatttgtagactctttataatagaa

SEQ ID NO: 333225 - DNA, 1320 bp, Homo sapiens
ccggctcgacggctcggtcaccgcctcgctgtcgtcgcggcgcccccggccgtcctctgtccgtaccgcccccggagccagggccgagtcctcgccatgccggcccggcggctgctgctgctgctgacgctgctgctgcccggcctcggggtgagtgaccggggagcgtggggtggaggacagctcgcgacggccgggtcggggccggggcagcgtcgcggcgccggggctggagtccgagctgggagcgcgacggcggcggccagatgccccgtgagcccagccgtgggaggctcgggccgggcgtaggaggcggcaccgggccgggagagcttccctgacgggagtcgcggccccaccgaggcgtcggccgcccgaagagcctcccaagccagcgcggctgtcacgggcagcggctccccggaccccgcgggctcgggcgcaacttcgtggcgtcctgcacggcacttgggggtcccagaaggccccggcctgaggaggccgcccacctgcgggaccctcctcctcgcgggcgggcgccggcgctgcctggcgggggccgcggaggagccgaaagggcgttgggatccaggggaagggtctgtcctgcgcttcgaatccttgtttgaactttttaaaaattcgaaaactttggggaacgaatgcaacagggagtaaggactctcacccgagagctggcttctgccacttgccctgccggtttcttggtactgggaggctgcaggcttccttctgtgcaccgagacttccttgagcaagtggagctgtgggaattgcactcttggaagatcccgcatgggttcgaggtgaggccgcttcagaacctcaaatgaaagactgtctcctcgtgggagagcacctggggccatcagaaatgtcttttcatctttttctggaggagacgaatgatagggcctggtttacattcatttaactctttatgaccttcactcagctgtggatttgggggcactttgtgggagacttggcttttttttttcttctggttggaagaacctaaattagcgaatgtttttcacaaaatgtattgttcaggatgtgagcgtggcaaatttgtccgtgttctgtttaatgacctctttaaaggtactgtgtactctttaatagggatatcatgtaccaggtgtcccagtagagcactgacatgtgtgtgcctgagtgccagccaccgtgtgaactctttggaggttttgcattttaggcattttcccgtatgctttctttcatgttacaagtatttgataacgtgaaaagcaaaataattaggatgcctatgtc

SEQ ID NO: 333226 - DNA, 234 bp, Homo sapiens
atagtgtataccaccataggggtattttatttatctgtggttgaagtgagagagagtagtgggtggaattgtcttatatactcacttatacacctacacacaaccaccctccactctctattcctccatcatgggtttgcgtggctttggtatgttgttccatgccctgggctgtaatttatctttgatatttattatttaatctctaggcctgcctttctcccagatcctaat

SEQ ID NO: 333227 - DNA, 509 bp, Homo sapiens
gcaggcatcatgggcatcgtctagtccagccctgcgattttgctgaggcttgccattaggtggcttgtccatgtttctgcagtgagtgacagctgggatgaagtcctgtggtcctgttcccagggcagtgcccctagcttcacacccctactgcgttcctccatgtctggggggttaatgtggtcatccctgcgggtggtatttggggtgatgattactcccttctgtgggatctggaaattcaatgactctggaatgcatgtatctgtttttctcctaggcccactctgtatgttgggaaatactctaccagcctctatgcctctccctcaatggtacacgagggggttgctgtcgtggtaagtccactacggagggctcgcagctgcctaaccacttctgttccattttagcaaagaatgactttgctatgcatgagcatcctgcaggttaagaatgaaaaacacaaatcttaagttctcaaaaacagtttctgcacatgccacatt

SEQ ID NO: 333228 - DNA, 668 bp, Homo sapiens
cttggttaacttttttttttctttttttttttttttaaagaaacttccttttaccatcccagaattggtgcaggcatccccatgccgaagttcagatggaatcctctacatgggtaaaaagcaggacatctggtatgttattgacctcctgaccggagagaagcagcagactttgtcatcggcctttgcagatagtctctgcccatcaacctctcttctgtatcttgggcgaacagaatacaccatcaccatgtacgacaccaaaacccgagagctccggtggaatgccacctactttgactatgcggcctcactgcctgaggacgacgtggactacagtaagtgctctctgctggatttcacaagcttgggccagtacttttgacctatgtggaaacagtggctccagaaagtaggattttcttttaagatactctttgtcaccaggttctttctttccatggacttttcatgggcttatcataaatacttcccacagtcaatgtgcaggggccttggtgaagtctgaagggaaaccgaagtaaaatggtgacaagcttagccagagaggaaggaggacatccctcgttgagtctttctatgtcacagaaggaatttactgcaagcccatggaaagtagaagtaaaatcagcataggacattaacaa

SEQ ID NO: 333229 - DNA, 1573 bp, Homo sapiens
ccggctcgacggctcggtcaccgcctcgctgtcgtcgcggcgcccccggccgtcctctgtccgtaccgcccccggagccagggccgagtcctcgccatgccggcccggcggctgctgctgctgctgacgctgctgctgcccggcctcgggatttttggaagtaccagcacagtgacgcttcctgaaaccttgttgtttgtgtcaacgctggatggaagtttgcatgctgtcagcaagaggacaggctcaatcaaatggactttaaaagaagatccagtcctgcaggtcccaacacatgtggaagagcctgcctttctcccagatcctaatgatggcagcctgtatacgcttggaagcaagaataatgaaggcctgacgaaacttccttttaccatcccagaattggtgcaggcatccccatgccgaagttcagatggaatcctctacatgggtaaaaagcaggacatctggtatgttattgacctcctgaccggagagaagcagcagactttgtcatcggcctttgcagatagtctctgcccatcaacctctcttctgtatcttgggcgaacagaatacaccatcaccatgtacgacaccaaaacccgagagctccggtggaatgccacctactttgactatgcggcctcactgcctgaggacgacgtggactacaagatgtcccactttgtgtccaatggtgatgggctggtggtgactgtggacagtgaatctggggacgtcctgtggatccaaaactacgcctcccctgtggtggccttttatgtctggcagcgggagggtctgaggaaggtgatgcacatcaatgtcgctgtggagaccctgcgctatctgaccttcatgtctggggaggtggggcgcatcacaaagtggaagtacccgttccccaaggagacagaggccaagagcaagctgacgcccactctgtatgttgggaaatactctaccagcctctatgcctctccctcaatggtacacgagggggttgctgtcgtgccccgcggcagcacacttcctttgctggaagggccccagactgatggcgtcaccatcggggacaagggggagtgtgtgatcacgcccagcacggacgtcaagtttgatcccggactcaaaagcaagaacaagctcaactacttgaggaattactggcttctgataggacaccatgaaaccccactgtctgcgtctaccaagatgctggagagatttcccaacaatctacccaaacatcgggaaaatgtgattcctgctgattcagagaaaaagagctttgaggaaactttgttacagatgacttcagtgttttcctggatactgaacctaccatcaaaggaggaagtgtttgcctttttgaggatttttgaaaaaaatatgtagggtctgaagacacctgccaaaagtattgctccaaaaactatttttgaataatgataacctcactgcaaagatgcatggcctctcaaagcaattgctttgaaagaggcaacagttatctggctacatgatctttggtgagcttaaaacaaataaaaccccctgcagtacagtc

SEQ ID NO: 333230 - DNA, 666 bp, Homo sapiens
tcacatgatactaaaagcacaggtaacaaaagaaaaaaatgataattggacttcattaaaatgtaaaacttttgtgactcaaaggacactattgtctgggtacagtggctcatgcctataatcctagcactttgggaggcccaggcgggcagatcacaaggtcaggagttcgagaccagcctgcccaacatggtgaaaccccatctctactaaaaaaaaatacaaaaattagctgggcatggtggtgtgtgcctgtaatcccagctactcgggaggctgaggaagaagaattgcttgaacctgggaggtggaggttgcagtggtgagccaagattgtgtgactgcactccagcctgggcgacagagcaagactccgtctcaaaaaaaaaaaaaaaaaaaaggacactatcaagagagtgaaagacactctacacatctaaaggtctagtagccaggatgcattaaaaaaactctgataacaacaaaatcaccaacaatccaatttaaaaataggcactagatttgaatagacatttctccaaagaagatatacaaagagccattaaacacattaaaagatgcttaatatcactggtcagcagtcaacagagaaatgtaaataataacaacagtgagataccacttcacactcacaaggatagctgt

SEQ ID NO: 333231 - DNA, 537 bp, Homo sapiens
ccctttggggcattctccggcaactgagaatcacgtgagggtgtctgggaggaatgctccctaagatgtgcagcagctctaagtaggtttccccctcagaagaacatatttagggtctaatctcagcaaacaggcacatataaggagctgacccttcctgcaccttgagcccctgacatgctgtgccaggtagctctgacacaggtggactgaaccggttctgggggtaatgaccctgaaaaactaggtctgcaagcagcacactttgtgtccaacacatgtcctgacttggccaaatctgaaggggaaatctaaattattgggaatgagtcctctaagttagctaaaaccccagcagctgtggaccatagttccacctttagaaactctggccaggtatatgcaaaatacttgtggtgaattgtcatgtaaatatttaaccaagtggaccactgtaactaaagcagattctaagttacagtggcctaaatggggatcttttgagatgcacaaattcgtgtacctgtgaaccaggat

SEQ ID NO: 333232 - DNA, 621 bp, Homo sapiens
cttaaagtattttcagaaatctgaggggaacatcacctgtgctttattggttattttgacaagtgaaatagaggacaaactgctttgatttgagttgatgtctacacatgtgaactcatgagaaacagcaaagcccacaatccacatggacatcatcatcgttcgggaacaggcatggtctccattctttccatgcacacgccccggcttcaaaaagacatctgaaacactagtgatgaccatcattaccccatctgtgagctccaggcacggcacagccctgcaaggtaaatgttattactgaaggtcagagaagttccgtagcttgcccagtcacatacctggcacggagctaagccaagcttcgagctcaagtcctcctgatgcgaaagttatttccactgaaccagcccaggcaaaatcctggtcgggtctgtgttactcttggctttcaaaacagatagccttgaggagatgtgtgtgtgtgttcatttaaaaaaatccagaaacgaccaaactctggcaactttctagaacgtattttgtacctaaatgaatgtggctcagtattgcctttgtttagactttgaataaaattgaacaaatcattagaagccctat

SEQ ID NO: 333233 - DNA, 334 bp, Homo sapiens
gtaacacaggcagaggtgtgggggcagggcacagattttggtctcctgaagtcccttgaactgaaattgttgggtaggtctcgagaaaaggccctctgttttctctccaaaccagtcaaggctggttctgcatcacagagcctccagctctcatccctccccttctactacagcccagagaccaaaatttaacccagggaaaaagggtagtgatggtgagggttaaatccagggttgggcgtcaatcaggagctgaggatgttaaagcagtgtggcagaggggaccccaacccaacacccttggcctccctcccctcctgcccagggtcggggt

SEQ ID NO: 333234 - DNA, 431 bp, Homo sapiens
ctcgcgaacgtgttatccttaatgattctgtgtttagtaatgctttttcagaatcattaaggataacccttagaatatcattcccacaatactattactccattttcaatcactgagtaaggtacatatttttttaagaccaaatcacattcttgtacttaaaaatataatttccacccttattcgttgtatacaaatttctcttctgccaaatacctgaaacaatgatgaactaactgaaaaggatgggcttttcctcttagcatagccattctaacagtaactaattcactttcaaatacttgtatattaaaagtaaaaaaaaaaatgggggccaggcacggtggctcacgcctgtaatcccagcactttgggaggccgaggtgggtggatcacgaggtcaggagatcgagaccatcctggataacacg

SEQ ID NO: 333235 - DNA, 297 bp, Homo sapiens
aggtgaaggggtgaacaggcaaggagacaggtgaaggggtgaacaggcaaggagacaggtgaagggatggactggtgaagagatggccagatgagaagatgaacaagtgaggaggtggacagataaggagacaggtgaagggatggccaagtgagatgaacaggtgaggggtggacaggtgaagagacagtgaggggatgaacaggtgaggggtggacaggtgaagagacagtgaggggatggacaggtgaggggtggacagatgaggggacaaacagctgaagggatggacaggtg

SEQ ID NO: 333236 - DNA, 192 bp, Homo sapiens
tagacagtgttttgttctgttgtccaaactggtgtgcagtggcgcaatcaaagctctgcaacctcgaactcccaggcttaagcaatagccccacttcagcttccctagtagctgagattataggtgcacaccaccatgcctaactgtttgttttttttttgtttttttttttttgagatggagtttcgctct

SEQ ID NO: 333237 - DNA, 450 bp, Homo sapiens
gagaatgatggtgtgcaggcaacagtgatcagcaccaccatggtttgcagacaggcctcgatcaggcccactgtgggcatctacctctagttccatcagcttcctaaaatctgaaatacttttagagatccggaaaccagaatagggtttctccaagtgggagataatgtcagcctgatttaatgagaaattgcaaaaatacttgttcaaactgaggctataggaataccagccagaagaacaaacaaattcttcagggaagcatccagcactgaagtggcagcttctaaatgaactgaaattttctgcatgttctctcagaaagttacagtgttaattaattaataaaatcattacaaaagaatttcttccgaggtatgatggagcatgtgatgacttcaggaatggcttgatttgtttgtttgtttgtttgtttgttttttgagacag

SEQ ID NO: 333238 - DNA, 1232 bp, Homo sapiens
ctcacggcagaaagcccaattccatctggcccctgcaggttggctcagcactggggaatcagagtcccctccatgaccaaggcaccactccactgacagactctgttaatcagcttgcttggctggcctccaaccataggtccaggggctgagacaaggtccttttgagctcctatgtgggaggctctggaaagcttagcaacactttccaacaactttgccagggtcacatctcccaggaagatctcacttccccacagaagctcttggcctggcctcctgcagtgccacgctccgtgtatttgacaagctgagttggacactccatgtggtagagtgtcagtttgtcaaataccccaagtgcggcacatgcttaccagctctaggccagggcagatgggatatgacgaatggactgccagctggatacaaggatgctcaccaagcaccaagttctcacaagttattttatgtgactttgcaggaactgaggcattatatctgaggacaccaggggaaaagtgtggcatctcagggaaatacagccctgggctgtgtctacacacaccatgagagtgctgatgggggcgcaatagtcttgaaaatgtataaagtgtccaggaatggaagtgctctttgattcattattattttcttccttcatattcccctcccagagtctcctatctaggacatcagcattctcacacaagcctaatggcttatctgagtaagcagggcttagaaattcactttcttgatactcagtcttgccttctaaacactccttgatcttgcctacctctccccttttccacatgtcttttcctgtaggaacactttctccatttattcctgcctatccaattcttccctatatttcctggaccagctaaagtccagtgtttccagagacttttgaaagtcaacttacactttttccttcttcattcacaaagctcttcttccctgggccctggtatgtatgcctttctctcctactgtctaatagcacctcgtaaattgtcaatgaacttttctaaggggtattcttgaattcccaactagattgtgagcttctggaagacaaggctatgtctttgattgttgtctcccctaccacagcccagtactttagttacagaaaataataaatatttactgattgattgactttcctcttgtccactagctttaggtttgggggccaaattctaccctggattttgaaa

SEQ ID NO: 333239 - DNA, 1181 bp, Homo sapiens
ctcacggcagaaagcccaattccatctggcccctgcaggttggctcagcactggggaatcagagtcccctccatgaccaaggcaccactccactgacagactctgttaatcagcttgcttggctggcctccaaccataggtccaggggctgagacaaggtccttttgagctcctatgtgggaggctctggaaagcttagcaacactttccaacaactttgccagggtcacatctcccaggaagatctcacttccccacagaagctcttggcctggcctcctgcagtgccacgctccgtgtatttgacaagctgagttggacactccatgtggtagagtgtcagtttgtcaaataccccaagtgcggcacatgcttaccagctctaggccagggcagatgggatatgacgaatggactgccagctggatacaaggatgctcaccaagcaccaagttctcacaagttattttatgtgactttgcaggaactgaggcattatatctgaggacaccaggggcatgagagtgctgatgggggcgcaatagtcttgaaaatgtataaagtgtccaggaatggaagtgctctttgattcattattattttcttccttcatattcccctcccagagtctcctatctaggacatcagcattctcacacaagcctaatggcttatctgagtaagcagggcttagaaattcactttcttgatactcagtcttgccttctaaacactccttgatcttgcctacctctccccttttccacatgtcttttcctgtaggaacactttctccatttattcctgcctatccaattcttccctatatttcctggaccagctaaagtccagtgtttccagagacttttgaaagtcaacttacactttttccttcttcattcacaaagctcttcttccctgggccctggtatgtatgcctttctctcctactgtctaatagcacctcgtaaattgtcaatgaacttttctaaggggtattcttgaattcccaactagattgtgagcttctggaagacaaggctatgtctttgattgttgtctcccctaccacagcccagtactttagttacagaaaataataaatatttactgattgattgactttcctcttgtccactagctttaggtttgggggccaaattctaccctggattttgaaa

SEQ ID NO: 333240 - DNA, 925 bp, Homo sapiens
ctcacggcagaaagcccaattccatctggcccctgcaggttggctcagcactggggaatcagagtcccctccatgaccaaggcaccactccactgacagactctgttaatcagcttgcttggctggcctccaaccataggtccaggggctgagacaaggtccttttgagctcctatgtgggaggctctggaaagcttagcaacactttccaacaactttgccagggtcacatctcccaggaagatctcacttccccacagaagctcttggcctggcctcctgcagtgccacgctccgtgtatttgacaagctgagttggacactccatgtggtagagtgtcagtttgtcaaataccccaagtgcggcacatgcttaccagctctaggccagggcagatgggatatgacgaatggactgccagctggatacaaggatgctcaccaagcaccaagttctcacaagttattttatgtgactttgcaggaactgaggcattatatctgaggacaccaggggaaaagtgtggcatctcagggaaatacagccctgggctgtgtctacacacaccatgagagtgctgatgggggcgcaatagtcttgaaaatgtataaagtgtccaggaatggaagtgctctttgattcattattattttcttccttcatattcccctcccagagtctcctatctaggacatcagcattctcacacaagcctaatggcttatctgagtaagcagggcttagaaattcactttcttgatactcagtcttgccttctaaacactccttgatcttgcctacctctcccctaccacagcccagtactttagttacagaaaataataaatatttactgattgattgactttcctcttgtccactagctttaggtttgggggccaaattctaccctggattttgaaa

SEQ ID NO: 333241 - DNA, 500 bp, Homo sapiens
agagatggaaggtagctcacagagtcatgacatcttttggagaaggagctgttggaattagctgtattattagatgtacatggttggggggagatgaatcaaagcacgattcctagctttttagtttgaacaactgaaaggatggtagctccatttccggagatgagaggactgaggagatcatgatccggggggaatatttggtctttaacatgtgagcccattggacgagcatttgggtaacttcagtcttactcctcagcagctgctgttggcagggtgtggtcaggtaggctggcactgtgtctgagcaagccagctctggtctgataacagagttttatctggaaggggaaacccagggctgggcttacgatctaaggtcagcagcctgtcacaccaagaaataaatgtctgttaaggcaattggtacataagcactcagaaagtgtagcttgtcaaagtggcttaattccaactaggttgttattactcagttg

SEQ ID NO: 333242 - DNA, 294 bp, Homo sapiens
atctacagatgtgtgtctgtgcttgtccttccaccaccaccaccaccagcagaatcacatacagagttcttatcctctcttctgtttgcctgtctctgattatcttcacccctgtgagggtgtctgttgctttcttctcttgtttttgcccttcatctctcttttcaaacccctcaccctttgaaatcccttttgttcagaacgctttcttttcaatttctcttctcttccttcttttaccacctgtttgcctgctggggcacatcctggccctttctcccgtacaattcagcc

SEQ ID NO: 333243 - DNA, 846 bp, Homo sapiens
acaaagggatatcattactgtctgcaacgacccttacacgttggcccagcagctgactcatatagagctggagaggctcaattatattgggccagaagaatttgttcaggcgttcgtgcagaaggaccctttggataatgacaagagttgctacagtgaacggaagaaaacacgaaacttagaagcttacgtggaatggtttaatcgcctcagctacttggttgctacagaaatctgtatgcctgttaagaaaaaacaccgagcaagaatgattgagtatttcattgacgtagctcgggagtgttttaacattggcaacttcaactccttgatggcgataatctctggtatgaatatgagcccagtctctcgactaaaaaaaacttgggccaaagtgaagactgcaaaatttgacattcttgaggtatgtgaagctgatgttttgctgttaagtaacactttacacctggaaagtggaattcctttatgtggtcttgcctctccatcagactacgacagaggaaaaagcccatctatctttacagacccagggaaaggaaagtgggtagaattggaggggaaaataatcaggttatgtactggttgctttataggtagagatgtccattctggggttaattgactggggaaatagtgacctgtcagtcacatcaccttatatgtcagaatggaattttggtcctgagcagttgagagttttacttcactgtgagcctattagcttcatttatcttcagtgtctcaggggaagggttccccatccctacagtaacatttgttcatcatcctttcaacaaatttagctgacctgtgaaaaagcccttc

SEQ ID NO: 333244 - DNA, 440 bp, Homo sapiens
catagagaaaatgtattcacctctgcacagagtcagtgatagcatttatgctgtttctcaactcagaatttgcaaacaaaaaaagttataaaattggagtttgttacttactaattttagaattctcacttagtaatgaaagtattttagaagtatgtgtttatcgtttttcttatttctctctttcaattttccttttttctccccctccatttcaaatgggaagctggtatgaatatgagcccagtctctcgactaaaaaaaacttgggccaaagtgaagactgcaaaatttgacattcttgaggtatgtgaagctgatgttttgctgttaagtaacactttacacctggaaagtggaattcctttatgtggtcttgcctctccatcagactacgacagaggaaaaagcccatctatctttacagacccagggaaagg

SEQ ID NO: 333245 - DNA, 740 bp, Homo sapiens
acaaagggatatcattactgtctgcaacgacccttacacgttggcccagcagctgactcatatagagctggagaggctcaattatattgggccagaagaatttgttcaggcgttcgtgcagaaggaccctttggataatgacaagagttgctacagtgaacggaagaaaacacgaaacttagaagcttacgtggaatggtttaatcgcctcagctacttggttgctacagaaatctgtatgcctgttaagaaaaaacaccgagcaagaatgattgagtatttcattgacgtagctcgggagtgttttaacattggcaacttcaactccttgatggcgataatctctggtatgaatatgagcccagtctctcgactaaaaaaaacttgggccaaagtgaagactgcaaaatttgacattcttgagcatcagatggacccttcaagcaatttctataattatcgaacagctcttcgtggggcagcacaaaggtctttaactgctcatagtagtagagaaaagattgtgataccattcttcagtctcttaatcaaagatatttatttcctcaatgagggttgtgccaaccgccttcccaatggccatgtcaattttgagaaattttgggaactggccaaacaagtgagtgaatttatgacatggaaacaagtggagtgtccatttgagagggaccggaagatcttgcagtatctgctcacagtaccagtcttcagtgaagatg

SEQ ID NO: 333246 - DNA, 283 bp, Homo sapiens
tctccctatgtttcccaggctggtcttgaatttctggccttaagtgatcctcctgcctcagcttcccaaagtgctgggattacaggtgtgagccaccatagccatccccttaattgtgttttctatgtgtcaaccactagctatacactaggagaactaataaaaaatatgatactttttcctgcctctacaagccatgtaatctagctgaagaaataaaatggacataaatgaaatagttaaagaggtaattgtcaaactgtgaagttgttaccaagtagga

SEQ ID NO: 333247 - DNA, 543 bp, Homo sapiens
taattatttgaccttggtgaagttaccaaaactccctgagtctttttccctcatcaataaaatgaagataataagaatatgtctgatattgaactaggctcacaattattttctttcagaagacttttcctgggctgggggatagatagatttgatgggagaagcaagtaatttcctgttttaagtaaagaactctatatacaatgagggcatatccaacatcacacagtcatgtgaaaggctatttttcttttgtcagagaagataaggagaataacaataaagcttataagaattcagttgcactgcagtgcagcagatcctaaatctgttcatgttccaaaaatagaattcacgtcatcaaatgcaacagctccaagtaagtggctgatcatctctggaaacaacagctcctcagggtcgttcatagataccctatgatactccttcccagaaagtcaaacataggagcctagagccatgaatggaactatttatagtcatgcctttaaatgaaatagcattttaaggaagtatataaat

SEQ ID NO: 333248 - DNA, 736 bp, Homo sapiens
ggtctgtacattgactatagcagagaaaccccctccagccatgcctcacagtagggttcagaaggctcttttctgtccccgtttctgtttgctcctgtatggaaagcagctgagactctgggcattacaatcatttggcaatggccgggcacggtggcttatgcctgtaatcccagcactttgggaggccgaggcgggggatcacttgaggtcaggagttcaagaccagcctggccaacatggcaaaacctcgtctctagttaaaatacaaaaattagctgagcatgggggtgggcacttgtagtcccagctactcgggaggctgaggccggagaatcccttgaaacccagaaggcggacgttgcagtgagctgagctgatgccactgcactccagcctgggtaccagagcgagactctatctcaaaaaaaaaaagaaaaaaaaaaagaaatcggccgggcacggtggctcacgcctgtaatcccaacactttgggaggctgaggcgggcggatcaccaggtcgggagtttgagaccagcctgaccaacattgtgaaaccccatctccactaaaagtacaaaaaattagccgggcatggtggcacatgcttgtagtcccagctacttgggagggtgaggcaggagaattgcttgaacctggcagacagaggttgcagtgagccgagatcacgccactgcactcgggtctgggcgatagagtgagactccatctcaa

SEQ ID NO: 333249 - DNA, 141 bp, Homo sapiens
tttattgcataacatccttgtatgttggaaattcacactaaagtattcagagttattgggtcagcagcttactttcaagtggttagtaaaataagttctttcttttgtgcttgcagcttctctgtaggtttgtggttgttt

SEQ ID NO: 333250 - DNA, 174 bp, Homo sapiens
tttgagattgaccatatttgcttaatctcttatatttgtggaagacttacaggctattaatacttcaaagaactgacctccctggatcccgctgtatcttgctgggacataatcagcaggttccatcaagtctaatctacttagtgacatgaccctgggctctcatatatctaa

SEQ ID NO: 333251 - DNA, 88 bp, Homo sapiens
tctgcttaaaggagatagaaaactgttagtaaatataatttccaaggaaaataattatttagaaataagaagtgagctacgtatagga

SEQ ID NO: 333252 - DNA, 400 bp, Homo sapiens
ggcacaggaaacaaaacctaactgcagtggataaatgggcaaatggggggaaaaaaaaagcctggaggtgggggtgaggaggaaggtgatatgtgggattggctgtgtgtgagtaatgtgctaatgaggcctgcttggaatttccgggtaaatgcaagaaagaaaaaaatccctgacaaagcttcttagtgctgcacagacaatgtggctcaggaagccagatgatgccgtgaggtgccaggcatgggtgaggtagccctcctctccagccccctataatggctttagaacaaggctctttacatctacctgtaaaaggtggttggggggagtgggaggagcaccaagaggtctcagcagttgccacaggctgctttgatgatcggccaggaagatttga

SEQ ID NO: 333253 - DNA, 777 bp, Homo sapiens
gaggacaggtttcaggcctctcacacatcattggtaccatggaatatttttctcctgcaagattttgggctggccttataagaaagagaggatctgattgcaggatgtttatactcttttggggacaggacaaggttccttctgatggggcagggatgaaactcttggctggctatgccattgcagtcactgccatgtttgtggccatgtgagcaatcgtgtggttgcttatatcagtgctctccttccaccacatactcattcctcctcccatctctttctggcccctgtggtctagcttctgtccccaccagtctcccaagatgacacactttgaggaactcactggctcaggccctgtgtcctttcttgggcatcctcattcatctttcctattcagcaatccttgctgctgctcctctggccataggtcaatgtctaatcttgcttctcttctacctttatgactgctccttctctgtccatcaatggctcttgtgtctctccacttttcctggatgcttactctgtccttcattgcagactctcctcccactgagacctcaatcaccctaatggccaagtcatcagctctaatcagatatttccaatctatgctctacttttaagaagttccagcaagccaccatggcacacatttacctatgtaacaaacaggcacatcctgcacatgtatcctggaacctaaaataaagttttaaaaatgtcccatttaataagtgaaaaatggcctcttgttttaattttaaattagta

SEQ ID NO: 333254 - DNA, 350 bp, Homo sapiens
tcgttcgcctactactactaaattcgcggccgcgtcgaccgtcaagatatggtaatataatgtgaaattcctagagcagcttaatgctagtctctatttggctacctttttctttagaattgcttatatagttagtgtatgagatttttgttatattttgcaaatattttctctccattatagctcatcatcttttagctttgtttatggcatgtttttatgatagagaagtttcattttttatttttaagtggttacatctattaataatttcctttgtgtctctgaggttttgttgcttaagaaggacttctcaaagatttaaccttattttttacttaaagagcaaa

SEQ ID NO: 333255 - DNA, 816 bp, Homo sapiens
catcacccctgcatctcactccaagaagcccaatggcagttcaaaacccctcctgactctcagaacggtcaggccctcaacctttctacgcaagtcttaatgactaatgctaggcaggtaacattccagatgtctcaccacctagtccccttcagtgatctgtcacttaaaggacatgttaagtgccatctatgctcttcttgaaaaaggaatactcaactttgctttaaaaaaatatatacacaggaagtaatacttgagggtagtctattttttctgtattttttctatttatactcttttacccatataggaaaacttcaaaaaagacaatatgattttctgggctacaaaatagcatttactgaataccatttgtgaaaatattgatatgcctacaacagaaaacatctttggaaggacataccagacatttgctgtgaggagaacagtatggatagtgagtgaccagtaaggagagatttctactttaaaaaatatatttgtgtatattttcagtttcaaattaaatacacaaataagtataaaatatctactttctgaacagtgagcaggttctctgcagtatttccatcctttgacttatctctgcttttggtctccatgtgtatgttcccgactttccaactccaccagacagaggatgaataaagaggaagctccaggctgtgaagcgtctagtccttgctcccctcagaagctgggacatgttggaccaaggtggtaaggatagtgaggtatggctttaccttgtacaattcaaaacaatcatattccttgactcagcaattctat

SEQ ID NO: 333256 - DNA, 2358 bp, Homo sapiens
catcacccctgcatctcactccaagaagcccaatggcagttcaaaacccctcctgactctcagaacggtcaggccctcaacctttctacgcaagtcttaatgactaatgctaggcaggtaacattccagatgtctcaccacctagtccccttcagtgatctgtcacttaaaggacatgttaagtgccatctatgctcttcttgaaaaaggaatactcaactttgctttaaaaaaatatatacacaggaagtaatacttgagggtagtctattttttctgtattttttctatttatactcttttacccatataggaaaacttcaaaaaagacaatatgattttctgggctacaaaatagcatttactgaataccatttgtgaaaatattgatatgcctacaacagaaaacatctttggaaggacataccagacatttgctgtgaggagaacagtatggatagtgagtgaccagtaaggagagatttctactttaaaaaatatatttgtgtatattttcagtttcaaattaaatacacaaataagtataaaatatctactttctgaacagtgagcaggttctctgcagtatttccatcctttgacttatctctgcttttggtctccatgtgtatgttcccgactttccaactccaccagacagaggatgaataaagaggaagctccaggctgtgaagcgtctagtccttgctcccctcagaagctgggacatgttggaccaaggtggtaaggatagtgagtttcccagaagctggacaagccacgacggcgccttccaataaaaggggaactccagagacgctatgagaaaagaggaacagacatctgcaatagatatctgcaacttccttttcaaaaacaccatcggcattgctttctcaggaagccactgccagcctattgtgatagctgacactgagttcctgagaattctctaattaggatcccagattggagggtcagccagtggttaacatataatggacacaaaactgattttactggaagactgagggtgggcactcaccatggttctaagcattcattactcagaagatccataaaaacattacagttctgttgtgtaagagtttaggaaaaaaagaaaatcctgacaaaaatcccaacctaaaaaacagtgtcaacatttgtaagtaggatggggaggcagagatgaattggcagtgttatcacagctactggactatgtggactttaacaaagtaagaaacgggtgggggttgggtggtggtatcttaatagagcaggagtagagacggatgtcctggggcagaatgggtaccaatgctgcctgaagcctggagctgggagctgaggactaagaggtagacaggagggtggggaccggtacctgctccaaggaactggtgccccagaactggtgagctggggtatgcatttagctcattcgtttaccagaatgcagtcaccacctgatgaaagaaatgactaatggcaggacttgaacagttctctataaatgagtacctgggagaaaaacaggtctccaggctccacaatacccaataaacacactgcctttagcccacttcaagctgcacttcttacatggaacccaacccaaccaacctcagaggtaagggtgagagcaggcaatgaacagctatgattctccattccctggccaggcagggagcctttccatccaccctcgtgagactgcttgtaacagaaataaggaaaccgactccaaggctcagtaacccacccaaggtcagaaccacggagtggcagggcctgtgagccacaaaggagactgaaaaccagaaagagcttctctctggtctgttattttaagaaaaacatgcccagaggggccacctggaagcaaggctgtgtggcaccctcaccttcctaattaaacaacaacttcccaggagcaacgacagcaacaacagcctggcccagcagatgaactcgaatcaatccaagcccttcccctatacgggtcagtttgggcactactttacctgctgtgaagtctactgggatcttccaggaaagtcccacctcattaagtaaaaagaaaaacaaagactcgggaagaaagttctgccctccctgttgaatgctgtgtgaggataagatgtctggagcatggcagtcaccctgtgactatcagaaggccaggcgtaccacaaggtggtcattccagtgctctgaatcagccccaaaccacttccctcaagactcatgttctgaggtgattaaaagtgtgctttgaaggtaaatctaggatgacagtcaacagatcagtgattgccaggagtcaggggtagagggagggaagaacagatg

SEQ ID NO: 333257 - DNA, 2110 bp, Homo sapiens
tccaccgcgccacaggagcgaggtccaacgcaacggtccctagggcctgcctccaacccagcctcagtttcctatctgtcacatcgttctatgatctcgaaatgactataacccctttcttagccccaaaccagccggaagcgacatcttccggttgctacaggttacggcggttgctatgggctacggcgcctgcgcagaaacaccgccaagcgactcagcaacttctagagcgcatgcgtttcgcccacccaggcccgggcgcggttaggggtgactcccacgatccctagcggctgcagagtggaacatggcggcctccttgccgcttgcgttaccagagtccacccggcctcgtgctttctccgggcgcccgtagctggcgccggcatccacaaaaatagatcagacagaggatgaataaagaggaagctccaggctgtgaagcgtctagtccttgctcccctcagaagctgggacatgttggaccaaggtggtaaggatagtgagtttcccagaagctggacaagccacgacggcgccttccaataaaaggggaactccagagacgctatgagaaaagaggaacagacatctgcaatagatatctgcaacttccttttcaaaaacaccatcggcattgctttctcaggaagccactgccagcctattgtgatagctgacactgagttcctgagaattctctaattaggatcccagattggagggtcagccagtggttaacatataatggacacaaaactgattttactggaagactgagggtgggcactcaccatggttctaagcattcattactcagaagatccataaaaacattacagttctgttgtgtaagagtttaggaaaaaaagaaaatcctgacaaaaatcccaacctaaaaaacagtgtcaacatttgtaagtaggatggggaggcagagatgaattggcagtgttatcacagctactggactatgtggactttaacaaagtaagaaacgggtgggggttgggtggtggtatcttaatagagcaggagtagagacggatgtcctggggcagaatgggtaccaatgctgcctgaagcctggagctgggagctgaggactaagaggtagacaggagggtggggaccggtacctgctccaaggaactggtgccccagaactggtgagctggggtatgcatttagctcattcgtttaccagaatgcagtcaccacctgatgaaagaaatgactaatggcaggacttgaacagttctctataaatgagtacctgggagaaaaacaggtctccaggctccacaatacccaataaacacactgcctttagcccacttcaagctgcacttcttacatggaacccaacccaaccaacctcagaggtaagggtgagagcaggcaatgaacagctatgattctccattccctggccaggcagggagcctttccatccaccctcgtgagactgcttgtaacagaaataaggaaaccgactccaaggctcagtaacccacccaaggtcagaaccacggagtggcagggcctgtgagccacaaaggagactgaaaaccagaaagagcttctctctggtctgttattttaagaaaaacatgcccagaggggccacctggaagcaaggctgtgtggcaccctcaccttcctaattaaacaacaacttcccaggagcaacgacagcaacaacagcctggcccagcagatgaactcgaatcaatccaagcccttcccctatacgggtcagtttgggcactactttacctgctgtgaagtctactgggatcttccaggaaagtcccacctcattaagtaaaaagaaaaacaaagactcgggaagaaagttctgccctccctgttgaatgctgtgtgaggataagatgtctggagcatggcagtcaccctgtgactatcagaaggccaggcgtaccacaaggtggtcattccagtgctctgaatcagccccaaaccacttccctcaagactcatgttctgaggtgattaaaagtgtgctttgaaggtaaatctaggatgacagtcaacagatcagtgattgccaggagtcaggggtagagggagggaagaacagatg

SEQ ID NO: 333258 - DNA, 1759 bp, Homo sapiens
tatagcctggtggtggcagtccagagtgcaacccctagagatggtaacttgacaagacctctcaaaaacactacacacagcttttgagcccctcatcccacttctgagagtaagtcctatggcaacatgtgcacacgtggaaaatgaagtctgtacaagtttcccagaagctggacaagccacgacggcgccttccaataaaaggggaactccagagacgctatgagaaaagaggaacagacatctgcaatagatatctgcaacttccttttcaaaaacaccatcggcattgctttctcaggaagccactgccagcctattgtgatagctgacactgagttcctgagaattctctaattaggatcccagattggagggtcagccagtggttaacatataatggacacaaaactgattttactggaagactgagggtgggcactcaccatggttctaagcattcattactcagaagatccataaaaacattacagttctgttgtgtaagagtttaggaaaaaaagaaaatcctgacaaaaatcccaacctaaaaaacagtgtcaacatttgtaagtaggatggggaggcagagatgaattggcagtgttatcacagctactggactatgtggactttaacaaagtaagaaacgggtgggggttgggtggtggtatcttaatagagcaggagtagagacggatgtcctggggcagaatgggtaccaatgctgcctgaagcctggagctgggagctgaggactaagaggtagacaggagggtggggaccggtacctgctccaaggaactggtgccccagaactggtgagctggggtatgcatttagctcattcgtttaccagaatgcagtcaccacctgatgaaagaaatgactaatggcaggacttgaacagttctctataaatgagtacctgggagaaaaacaggtctccaggctccacaatacccaataaacacactgcctttagcccacttcaagctgcacttcttacatggaacccaacccaaccaacctcagaggtaagggtgagagcaggcaatgaacagctatgattctccattccctggccaggcagggagcctttccatccaccctcgtgagactgcttgtaacagaaataaggaaaccgactccaaggctcagtaacccacccaaggtcagaaccacggagtggcagggcctgtgagccacaaaggagactgaaaaccagaaagagcttctctctggtctgttattttaagaaaaacatgcccagaggggccacctggaagcaaggctgtgtggcaccctcaccttcctaattaaacaacaacttcccaggagcaacgacagcaacaacagcctggcccagcagatgaactcgaatcaatccaagcccttcccctatacgggtcagtttgggcactactttacctgctgtgaagtctactgggatcttccaggaaagtcccacctcattaagtaaaaagaaaaacaaagactcgggaagaaagttctgccctccctgttgaatgctgtgtgaggataagatgtctggagcatggcagtcaccctgtgactatcagaaggccaggcgtaccacaaggtggtcattccagtgctctgaatcagccccaaaccacttccctcaagactcatgttctgaggtgattaaaagtgtgctttgaaggtaaatctaggatgacagtcaacagatcagtgattgccaggagtcaggggtagagggagggaagaacagatg

SEQ ID NO: 333259 - DNA, 2304 bp, Homo sapiens
catcacccctgcatctcactccaagaagcccaatggcagttcaaaacccctcctgactctcagaacggtcaggccctcaacctttctacgcaagtcttaatgactaatgctaggcaggtaacattccagatgtctcaccacctagtccccttcagtgatctgtcacttaaaggacatgttaagtgccatctatgctcttcttgaaaaaggaatactcaactttgctttaaaaaaatatatacacaggaagtaatacttgagggtagtctattttttctgtattttttctatttatactcttttacccatataggaaaacttcaaaaaagacaatatgattttctgggctacaaaatagcatttactgaataccatttgtgaaaatattgatatgcctacaacagaaaacatctttggaaggacataccagacatttgctgtgaggagaacagtatggatagtgagtgaccagtaaggagagatttctactttaaaaaatatatttgtgtatattttcagtttcaaattaaatacacaaataagtataaaatatctactttctgaacagtgagcaggttctctgcagtatttccatcctttgacttatctctgcttttggtctccatgtgtatgttcccgactttccaactccaccagacagaggatgaataaagaggaagctccaggctgtgaagcgtctagtccttgctcccctcagaagctgggacatgttggaccaaggtggtaaggatagtgagtttcccagaagctggacaagccacgacggcgccttccaataaaaggggaactccagagacgctatgagaaaagaggaacagacatctgcaatagatatctgcaacttccttttcaaaaacaccatcggcattgctttctcaggaagccactgccagcctattgtgatagctgacactgagttcctgagaattctctaattaggatcccagattggagggtcagccagtggttaacatataatggacacaaaactgattttactggaagactgagggtgggcactcaccatggttctaagcattcattactcagaagatccataaaaacattacagttctgttgtgtaagagtttaggaaaaaaagaaaatcctgacaaaaatcccaacctaaaaaacagtgtcaacatttgtaagtaggatggggaggcagagatgaattggcagtgttatcacagctactggactatgtggactttaacaaagtaagaaacgggtgggggttgggtggtggtatcttaatagagcaggagtagagacggatgtcctggggcagaatgggtaccaatgctgcctgaagcctggagctgggagctgaggactaagaggtagacaggagggtggggaccggtacctgctccaaggaactggtgccccagaactggtgagctggggtatgcatttagctcattcgtttaccagaatgcagtcaccacctgatgaaagaaatgactaatggcaggacttgaacagttctctataaatgagtacctgggagaaaaacaggtctccaggctccacaatacccaataaacacactgcctttagcccacttcaagctgcacttcttacatggaacccaacccaaccaacctcagaggtaagggtgagagcaggcaatgaacagctatgattctccattccctggccaggcagggagcctttccatccaccctcgtgagactgcttgtaacagaaataaggaaaccgactccaaggctcagtaacccacccaaggtcagaaccacggagtggcagggcctgtgagccacaaaggagactgaaaaccagaaagagcttctctctggtctgttattttaagacctaattaaacaacaacttcccaggagcaacgacagcaacaacagcctggcccagcagatgaactcgaatcaatccaagcccttcccctatacgggtcagtttgggcactactttacctgctgtgaagtctactgggatcttccaggaaagtcccacctcattaagtaaaaagaaaaacaaagactcgggaagaaagttctgccctccctgttgaatgctgtgtgaggataagatgtctggagcatggcagtcaccctgtgactatcagaaggccaggcgtaccacaaggtggtcattccagtgctctgaatcagccccaaaccacttccctcaagactcatgttctgaggtgattaaaagtgtgctttgaaggtaaatctaggatgacagtcaacagatcagtgattgccaggagtcaggggtagagggagggaagaacagatg

SEQ ID NO: 333260 - DNA, 1228 bp, Homo sapiens
gttggtttctgtattactatctgttcagacacaagcgtccttaaaaatgtgcttagttgtaatttcttcatagatttcaaccaaaacaacatattgcaagattgaatgcagaagtagatgtgagaactcattctattaagccaagcgtaaatgtttaaaaatgtaaaataataccactcttctgatatgttttgggagaaaatatgtttgtggaaaatatacctatcaaagaaatatcagaaaccttccaaactgaaggacatgtgtatccagattaaaatgaccttccaaatgcttaacatagtaaacaaaaaacaggaggaaaaggaggggagaaaagaaaaaaagaagactcacacaaggccgtgttacgacatttcatcataccatagataaatcagatcctgaaagatttcagaaaggaatatgagatcacacataaaggaacaggaatcaaaatgacattacccttctcaacaacactggaagctccaagagagtgcagcaatgctttcatcctcagagaaaataattatcaatacaaaataatattcccagctaagctatcaatcatgagggtagaagaaaggcatttttagccattgcgtgggagtgctataataatggtcccagtgaaccacacctccctgtatccgcaccactttgcaatgagaaatttgctgtttctcctagtgagagagggagtctatttctttacccttgggcctgggctggcctggtgacttgttttgaccaatacatggaagaagtgacattatgtgagttctgcagctgaagctttaagaggccttgaagtttctcctcaccttcttggaaccttgagaccaccatgctgtgagaagcctgggcatatctactggaggccgaggggccacatgacacgtctaaaactcatacgtcaagatatggtaatataatgtgaaattcctagagcagcttaatgctagtctctatttggctacctttttctttagaattgcttatatagttagtgtatgagatttttgttatattttgcaaatattttctctccattatagctcatcatcttttagctttgtttatggcatgtttttatgatagagaagtttcattttttatttttaagtggttacatctattaataatttcctttgtgtctctgaggttttgttgcttaagaaggacttctcaaagatttaaccttattttttacttaaagagcaaa

SEQ ID NO: 333261 - DNA, 1586 bp, Homo sapiens
tccaccgcgccacaggagcgaggtccaacgcaacggtccctagggcctgcctccaacccagcctcagtttcctatctgtcacatcgttctatgatctcgaaatgactataacccctttcttagccccaaaccagccggaagcgacatcttccggttgctacaggttacggcggttgctatgggctacggcgcctgcgcagaaacaccgccaagcgactcagcaacttctagagcgcatgcgtttcgcccacccaggcccgggcgcggttaggggtgactcccacgatccctagcggctgcagagtggaacatggcggcctccttgccgcttgcgttaccagagtccacccggcctcgtgctttctccgggcgcccgtagctggcgccggcatccacaaaaatagatcagaccctgagagcctactgaccacagcagctcctgttaccacggctgccgtttctgctctcaatgctactgctcattgatcccagggaggaaaattctggtgcatcacttagtatttatttcagatttcaaccaaaacaacatattgcaagattgaatgcagaagtagatgtgagaactcattctattaagccaagcgtaaatgtttaaaaatgtaaaataataccactcttctgatatgttttgggagaaaatatgtttgtggaaaatatacctatcaaagaaatatcagaaaccttccaaactgaaggacatgtgtatccagattaaaatgaccttccaaatgcttaacatagtaaacaaaaaacaggaggaaaaggaggggagaaaagaaaaaaagaagactcacacaaggccgtgttacgacatttcatcataccatagataaatcagatcctgaaagatttcagaaaggaatatgagatcacacataaaggaacaggaatcaaaatgacattacccttctcaacaacactggaagctccaagagagtgcagcaatgctttcatcctcagagaaaataattatcaatacaaaataatattcccagctaagctatcaatcatgagggtagaagaaaggcatttttagccattgcgtgggagtgctataataatggtcccagtgaaccacacctccctgtatccgcaccactttgcaatgagaaatttgctgtttctcctagtgagagagggagtctatttctttacccttgggcctgggctggcctggtgacttgttttgaccaatacatggaagaagtgacattatgtgagttctgcagctgaagctttaagaggccttgaagtttctcctcaccttcttggaaccttgagaccaccatgctgtgagaagcctgggcatatctactggaggccgaggggccacatgacacgtctaaaactcatacgtcaagatatgcttgaaagctgcacccatcaagtgcgtcctgaatctgacgattcactatcttcacttccgccagtctgctccaggcctccatcctttctggcctaaatgaaccccaaagctggcttgtgtcctgcatccatccaccactcttgcccttgtttcacttatctattgctgtgaaataaacttcaaaaccaagtgattcagt

SEQ ID NO: 333262 - DNA, 699 bp, Homo sapiens
tcactatcctatgctcttgcctgacagaccctgagagcctactgaccacagcagctcctgttaccacggctgccgtttctgctctcaatgctactgctcattgatcccagggaggaaaattctggtgcatcacttagtatttatttcaggtatggttaggacatttcagaataaaggatggcttcttctggatgtatctgaattgatctgctgtcatatacttatgaatcacatgctcagaccaaagtacataaaaaagtcattctctttccagacaattttaggggtttgtaaccttggtcttatattgctccatggcctatgaattagtaacaggactagtgaaattcctagtaacatagtcctgttactacaagattacccatatcctttgatgatccatctactgcaaactcatagaatttactggacagtcttcttcattttatgtaagaatgaccactgtatcatcatatgtcaatgtcctgcataactgtcaccacccctccatgccgaatacctggtagcttgtgatgagttgagaacctcactaaacagtcttatccacatcctcaggttctctgaggttttccttctgtccagtccatgcacttgtacccctggtggtcgaagtacagtcacgcactgcgtatgatgttctcatcagtggtgggctgcatacacagcagtggtcccata

SEQ ID NO: 333263 - DNA, 1686 bp, Homo sapiens
tccaccgcgccacaggagcgaggtccaacgcaacggtccctagggcctgcctccaacccagcctcagtttcctatctgtcacatcgttctatgatctcgaaatgactataacccctttcttagccccaaaccagccggaagcgacatcttccggttgctacaggttacggcggttgctatgggctacggcgcctgcgcagaaacaccgccaagcgactcagcaacttctagagcgcatgcgtttcgcccacccaggcccgggcgcggttaggggtgactcccacgatccctagcggctgcagagtggaacatggcggcctccttgccgcttgcgttaccagagtccacccggcctcgtgctttctccgggcgcccgtagctggcgccggcatccacaaaaatagatcagaccctgagagcctactgaccacagcagctcctgttaccacggctgccgtttctgctctcaatgctactgctcattgatcccagggaggaaaattctggtgcatcacttagtatttatttcagatttcaaccaaaacaacatattgcaagattgaatgcagaagtagatgtgagaactcattctattaagccaagcgtaaatgtttaaaaatgtaaaataataccactcttctgatatgttttgggagaaaatatgtttgtggaaaatatacctatcaaagaaatatcagaaaccttccaaactgaaggacatgtgtatccagattaaaatgaccttccaaatgcttaacatagtaaacaaaaaacaggaggaaaaggaggggagaaaagaaaaaaagaagactcacacaaggccgtgttacgacatttcatcataccatagataaatcagatcctgaaagatttcagaaaggaatatgagatcacacataaaggaacaggaatcaaaatgacattacccttctcaacaacactggaagctccaagagagtgcagcaatgctttcatcctcagagaaaataattatcaatacaaaataatattcccagctaagctatcaatcatgagggtagaagaaaggcatttttagccattgcgtgggagtgctataataatggtcccagtgaaccacacctccctgtatccgcaccactttgcaatgagaaatttgctgtttctcctagtgagagagggagtctatttctttacccttgggcctgggctggcctggtgacttgttttgaccaatacatggaagaagtgacattatgtgagttctgcagctgaagctttaagaggccttgaagtttctcctcaccttcttggaaccttgagaccaccatgctgtgagaagcctgggcatatctactggaggccgaggggccacatgacacgtctaaaactcatacgtcaagatatggtaatataatgtgaaattcctagagcagcttaatgctagtctctatttggctacctttttctttagaattgcttatatagttagtgtatgagatttttgttatattttgcaaatattttctctccattatagctcatcatcttttagctttgtttatggcatgtttttatgatagagaagtttcattttttatttttaagtggttacatctattaataatttcctttgtgtctctgaggttttgttgcttaagaaggacttctcaaagatttaaccttattttttacttaaagagcaaa

SEQ ID NO: 333264 - DNA, 370 bp, Homo sapiens
tgcatgcctgtggtcccagctactcgagaggctgaggtcaggctgaggtgggaggatccctggagcctgggaagcggaggttgcagtgggggatgaaaaagaataccccgtgtccaaatagcaaaacactctgaaatgaggcaaaccgtggtttgttgaacaggtgttctgggacaaggttgccgaatatgcattagccgtaatccccaggacagccatgcagggtgggtcttaaacagttttttagattctcgagtataaaggtataatattgaagaataagcacaaataatgtcatcatacatgttaaagtgacaacacaggatttacaaaattacccttttttccccaaattacctcttacgatgtg

SEQ ID NO: 333265 - DNA, 265 bp, Homo sapiens
gtgggatattaagtggggcttccttggaggcaggcggggcctcaggttcggctgtgttgggtcactccctgtcccgccccggcctctggagtttgtgtggttttgtctcctctttcttcctggatcattgtgcatgaggctgggagccacaccggctgcttaggctcctcctgcctcccaggccacctgcaggtcacaggggctgatgaagccgtgaatcgcttggctctgtttggaatgctcgttccccggtgccataaagaaa

SEQ ID NO: 333266 - DNA, 2205 bp, Homo sapiens
ctcgacccacgcgtccgcgcgccccaggagccaaagccgggctccaagtcggcgccccacgtcgaggctccgccgcagcctccggagttggccgcagacaagaaggggagggagcgggagagggaggagagctccgaagcgagagggccgagcgccatgcgccgcgccagcagagactacaccaagtacctgcgtggctcggaggagatgggcggcggccccggagccccgcacgagggccccctgcacgccccgccgccgcctgcgccgcaccagccccccgccgcctcccgctccatgttcgtggccctcctggggctggggctgggccaggttgtctgcagcgtcgccctgttcttctatttcagagcgcagatggatcctaatagaatatcagaagatggcactcactgcatttatagaattttgagactccatgaaaatgcagattttcaagacacaactctggagagtcaagatacaaaattaatacctgattcatgtaggagaattaaacaggcctttcaaggagctgtgcaaaaggaattacaacatatcgttggatcacagcacatcagagcagagaaagcgatggtggatggctcatggttagatctggccaagaggagcaagcttgaagctcagccttttgctcatctcactattaatgccaccgacatcccatctggttcccataaagtgagtctgtcctcttggtaccatgatcggggttgggccaagatctccaacatgacttttagcaatggaaaactaatagttaatcaggatggcttttattacctgtatgccaacatttgctttcgacatcatgaaacttcaggagacctagctacagagtatcttcaactaatggtgtacgtcactaaaaccagcatcaaaatcccaagttctcataccctgatgaaaggaggaagcaccaagtattggtcagggaattctgaattccatttttattccataaacgttggtggattttttaagttacggtctggagaggaaatcagcatcgaggtctccaacccctccttactggatccggatcaggatgcaacatactttggggcttttaaagttcgagatatagattgagccccagtttttggagtgttatgtatttcctggatgtttggaaacattttttaaaacaagccaagaaagatgtatataggtgtgtgagactactaagaggcatggccccaacggtacacgactcagtatccatgctcttgaccttgtagagaacacgcgtatttacagccagtgggagatgttagactcatggtgtgttacacaatggtttttaaattttgtaatgaattcctagaattaaaccagattggagcaattacgggttgaccttatgagaaactgcatgtgggctatgggaggggttggtccctggtcatgtgccccttcgcagctgaagtggagagggtgtcatctagcgcaattgaaggatcatctgaaggggcaaattcttttgaattgttacatcatgctggaacctgcaaaaaatactttttctaatgaggagagaaaatatatgtatttttatataatatctaaagttatatttcagatgtaatgttttctttgcaaagtattgtaaattatatttgtgctatagtatttgattcaaaatatttaaaaatgtcttgctgttgacatatttaatgttttaaatgtacagacatatttaactggtgcactttgtaaattccctggggaaaacttgcagctaaggaggggaaaaaaatgttgtttcctaatatcaaatgcagtatatttcttcgttctttttaagttaatagattttttcagacttgtcaagcctgtgcaaaaaaattaaaatggatgccttgaataataagcaggatgttggccaccaggtgcctttcaaatttagaaactaattgactttagaaagctgacattgccaaaaaggatacataatgggccactgaaatctgtcaagagtagttatataattgttgaacaggtgtttttccacaagtgccgcaaattgtacctttttttttttttcaaaatagaaaagttattagtggtttatcagcaaaaaagtccaattttaatttagtaaatgttatcttatactgtacaataaaaacattgcctttgaatgttaattttttggtacaaaaataaatttatatgaaaacctga

SEQ ID NO: 333267 - DNA, 1924 bp, Homo sapiens
ctcatgtgatcagggcgcctggcctattgaaggtttttaatcttcagagtttcgactttatcaacaacacttagaagccaccaaagaattgcagatggatcctaatagaatatcagaagatggcactcactgcatttatagaattttgagactccatgaaaatgcagattttcaagacacaactctggagagtcaagatacaaaattaatacctgattcatgtaggagaattaaacaggcctttcaaggagctgtgcaaaaggaattacaacatatcgttggatcacagcacatcagagcagagaaagcgatggtggatggctcatggttagatctggccaagaggagcaagcttgaagctcagccttttgctcatctcactattaatgccaccgacatcccatctggttcccataaagtgagtctgtcctcttggtaccatgatcggggttgggccaagatctccaacatgacttttagcaatggaaaactaatagttaatcaggatggcttttattacctgtatgccaacatttgctttcgacatcatgaaacttcaggagacctagctacagagtatcttcaactaatggtgtacgtcactaaaaccagcatcaaaatcccaagttctcataccctgatgaaaggaggaagcaccaagtattggtcagggaattctgaattccatttttattccataaacgttggtggattttttaagttacggtctggagaggaaatcagcatcgaggtctccaacccctccttactggatccggatcaggatgcaacatactttggggcttttaaagttcgagatatagattgagccccagtttttggagtgttatgtatttcctggatgtttggaaacattttttaaaacaagccaagaaagatgtatataggtgtgtgagactactaagaggcatggccccaacggtacacgactcagtatccatgctcttgaccttgtagagaacacgcgtatttacagccagtgggagatgttagactcatggtgtgttacacaatggtttttaaattttgtaatgaattcctagaattaaaccagattggagcaattacgggttgaccttatgagaaactgcatgtgggctatgggaggggttggtccctggtcatgtgccccttcgcagctgaagtggagagggtgtcatctagcgcaattgaaggatcatctgaaggggcaaattcttttgaattgttacatcatgctggaacctgcaaaaaatactttttctaatgaggagagaaaatatatgtatttttatataatatctaaagttatatttcagatgtaatgttttctttgcaaagtattgtaaattatatttgtgctatagtatttgattcaaaatatttaaaaatgtcttgctgttgacatatttaatgttttaaatgtacagacatatttaactggtgcactttgtaaattccctggggaaaacttgcagctaaggaggggaaaaaaatgttgtttcctaatatcaaatgcagtatatttcttcgttctttttaagttaatagattttttcagacttgtcaagcctgtgcaaaaaaattaaaatggatgccttgaataataagcaggatgttggccaccaggtgcctttcaaatttagaaactaattgactttagaaagctgacattgccaaaaaggatacataatgggccactgaaatctgtcaagagtagttatataattgttgaacaggtgtttttccacaagtgccgcaaattgtacctttttttttttttcaaaatagaaaagttattagtggtttatcagcaaaaaagtccaattttaatttagtaaatgttatcttatactgtacaataaaaacattgcctttgaatgttaattttttggtacaaaaataaatttatatgaaaacctga

SEQ ID NO: 333268 - DNA, 280 bp, Homo sapiens
taaaattatttttcctttttatttcaggaattacaacatatcgttggatcacagcacatcagagcagagaaaggtaagcatggatccatacatctgtatgaaatcccacagggtcactactattttggctataataatatggtttctctcatctccagcgatggtggatggctcatggttagatctggccaagaggagcaagcttgaagctcagccttttgctcatctcactattaatgccaccgacatcccatctggtaagctctatctgcatccagcc

SEQ ID NO: 333269 - DNA, 2159 bp, Homo sapiens
ctcgacccacgcgtccgcgcgccccaggagccaaagccgggctccaagtcggcgccccacgtcgaggctccgccgcagcctccggagttggccgcagacaagaaggggagggagcgggagagggaggagagctccgaagcgagagggccgagcgccatgcgccgcgccagcagagactacaccaagtacctgcgtggctcggaggagatgggcggcggccccggagccccgcacgagggccccctgcacgccccgccgccgcctgcgccgcaccagccccccgccgcctcccgctccatgttcgtggccctcctggggctggggctgggccaggttgtctgcagcgtcgccctgttcttctatttcagagcgcagatggatcctaatagaatatcagaagatggcactcactgcatttatagaattttgagactccatgaaaatgcagattttcaagacacaactctggagagtcaagatacaaaattaatacctgattcatgtaggagaattaaacaggcctttcaaggagctgtgcaaaagcgatggtggatggctcatggttagatctggccaagaggagcaagcttgaagctcagccttttgctcatctcactattaatgccaccgacatcccatctggttcccataaagtgagtctgtcctcttggtaccatgatcggggttgggccaagatctccaacatgacttttagcaatggaaaactaatagttaatcaggatggcttttattacctgtatgccaacatttgctttcgacatcatgaaacttcaggagacctagctacagagtatcttcaactaatggtgtacgtcactaaaaccagcatcaaaatcccaagttctcataccctgatgaaaggaggaagcaccaagtattggtcagggaattctgaattccatttttattccataaacgttggtggattttttaagttacggtctggagaggaaatcagcatcgaggtctccaacccctccttactggatccggatcaggatgcaacatactttggggcttttaaagttcgagatatagattgagccccagtttttggagtgttatgtatttcctggatgtttggaaacattttttaaaacaagccaagaaagatgtatataggtgtgtgagactactaagaggcatggccccaacggtacacgactcagtatccatgctcttgaccttgtagagaacacgcgtatttacagccagtgggagatgttagactcatggtgtgttacacaatggtttttaaattttgtaatgaattcctagaattaaaccagattggagcaattacgggttgaccttatgagaaactgcatgtgggctatgggaggggttggtccctggtcatgtgccccttcgcagctgaagtggagagggtgtcatctagcgcaattgaaggatcatctgaaggggcaaattcttttgaattgttacatcatgctggaacctgcaaaaaatactttttctaatgaggagagaaaatatatgtatttttatataatatctaaagttatatttcagatgtaatgttttctttgcaaagtattgtaaattatatttgtgctatagtatttgattcaaaatatttaaaaatgtcttgctgttgacatatttaatgttttaaatgtacagacatatttaactggtgcactttgtaaattccctggggaaaacttgcagctaaggaggggaaaaaaatgttgtttcctaatatcaaatgcagtatatttcttcgttctttttaagttaatagattttttcagacttgtcaagcctgtgcaaaaaaattaaaatggatgccttgaataataagcaggatgttggccaccaggtgcctttcaaatttagaaactaattgactttagaaagctgacattgccaaaaaggatacataatgggccactgaaatctgtcaagagtagttatataattgttgaacaggtgtttttccacaagtgccgcaaattgtacctttttttttttttcaaaatagaaaagttattagtggtttatcagcaaaaaagtccaattttaatttagtaaatgttatcttatactgtacaataaaaacattgcctttgaatgttaattttttggtacaaaaataaatttatatgaaaacctga

SEQ ID NO: 333270 - DNA, 953 bp, Homo sapiens
ttgcctgagctttcctcagggactcagatcagggctggcagtagatggtaggctctccagtctcaaagctgtggccgccttcagaccacaccacctctaccattattttctgtccgacatgttcaaactgttcctgcattatatctacccaagttcccagggaaaagtccccattgtccttgatgaatggatgatctgtcattgccatgatggtcatacagacacaaatcaaagaaataggctgggcgtggggctcacacctgtaatcccagcactttgggaggccgaggaaggaggattacctgagcccaggagttcgagaccagcctgggcaacatggcgagaccctgtctctacaaaaaattagctagtcatggtgggcatatctgtagtcccagctatgtgggaggctaaggtgggaggatcgtttcagcctgggaggtcaaggctgcagtgagctgtgatggcgtcagtgttctccagcctgggcaacagagtgagtccctgtctccaaaggaaaaaaaaaagaaaaaagttttgtcattttgatcacatcatctcactgattctctcagcctcaatttccctatctgtaaaatgagtgtattaaactggatcagtggtttcctcctccattttgcaaagctctctcctaggacacagctaggacttttcgggaagggggcagagtgagagaggacaaggccaaagctttcttttgaaaagagactcctgtttgaaagccatgactatgtgattctgaggttgcatgcccatccttgtatttgagaagcttcctatgcaggaaaaactggtgaaataatatacagatcaagcctgagagtctctgataaaatattaatatcatcaatcactgtatagatataaactttggtatctgtctagagagagatacagatgatattaggttccattaatgctttgaaatttac

SEQ ID NO: 333271 - DNA, 318 bp, Homo sapiens
tctgataaaaggtatccacaaaaaacctagattagaaaggtacttagtggtgaaaacttcccctttaagagtgaggcttagttaatagggttgctcctaaaaataagaataaaaaaaagggaggaacaagagcaggaagctctacagttctaggcagcatattagacaagaaaaagtaacaaaagttgtaagaattagaaaagaagaaacaatctgtcattatttgcagatgctatattcctaattagaaaaccaaaaagggctggacgcagtggctcactgtaatcccagcactttgggaggccaaggcaggcagat

SEQ ID NO: 333272 - DNA, 272 bp, Homo sapiens
gctttgacctcgaacggccatggtttcacttgcacgctctcccacttaccatttaaccttcagcaaccagtttttcattccatcagcaggtgcctaggcaggctgagggagcacttaggtggagtaaacgagttactatatgcttagcacaaagtaagcacttgataaatgtttgcttttattattattactattatcttgagggggacagagtcccactccgtcgcctaggctgcagtgcagtggcaagatctcggctcgctgcaatctcc

SEQ ID NO: 333273 - DNA, 180 bp, Homo sapiens
ctcctagattcctcacatgtgcagttcacaatagggttctcctatgagaatctaatgctgttgctgatgggacaggaggcagagctcgggcagtaatgcgagtgactcccgctgctcacctcctgctgtgtagcctggttcctaacaggccatgaactggtacaggcccatggcccgggg

SEQ ID NO: 333274 - DNA, 4355 bp, Homo sapiens
agcgggagggaggacgaggacgggggcggcggctgctgcgagggggggcccgtgctctccccgtttcccttagtcgcactcaggcagccgccgccgccgccgctgccgccatgttggtttgagaggcgatgacaggaggcggccgcggcgtgtgggactgaaaagtgaaggaggaggaggagaaacaaagctctgagaagaaaccattcccgggctgaggagaaggaggacccggcctcttccggggaccagccgaagtcggcgtcgcccggagctcgcgaggccggggaggggaggggaagggaaggcggagaccggggaggcggcggcggggaaggcggaggcagaagaggagtggcgaggagccggagacgatgcgccccgaccccagctgctgtccggaggcgcccgcggcctgagcccagaggggctgtggagtgtcccggccggccccgagcacccccgcgctgtcggtcccccgctccggtctttcgctttggcttccaactagttaaatgcccttgagcgcgggtttccgcggcccggctcttcgcccccgcggcgcgagttgagccgtttccccgcgctgtccgcgcgggcgctccgacagcggctctgcagggtccgcggccagcgtccggccaccgctcggccgccactcaaggctcacgcgtcgatgtgtagctacatagttatctgtgtacatccacgctggggcatttttctcctgcttaatgaggacttgactcgggagcaagtgtgaatcattgccggggctgggaaaggaggaaggcgcatttaaccccctcccacccctctccatgtccgtgtgtcactcggctcggtccacctggcgcggccggtcctggggctgctgctgctgttgacgacgacgacgacgacgggggctgcctctgctgtcccgggagtttcctcctgctccggccacacagctcctggggattgttcctcttcgaaccagaacctcggcctgaccggcactttggctccaaaataactttatttttgggggagaaagcacatcacgaaccagtcaaaatcgtggtttatttctgtaacgtgaagacttctgctcttttttctttgtttgtttttttcgtaaacatctgggtgtatatcaaacggcaagatgtccagtaatgtcccggcggatatgataaatttgcgcctcattttggtaagcggaaaaacaaaagagttcctgttttctcctaacgattctgcttctgacattgcaaagcatgtatatgacaattggccaatggactgggaagaagagcaggtcagcagtccaaatattctacgacttatttatcaaggacgatttctacatggaaatgtcacattaggagcattaaaacttccttttggcaaaacaacagtgatgcatttggtggccagagagacattaccagagccaaactctcaaggtcagaggaatcgtgagaagactggagagagtaattgttgtgtaatcctgtaaacactgtctgcctagtgtgatgtgatatagtctttgtctttcatgctgctgggacagaaaagacccgacattgcttcagaaaccgttcagaacagtctgcctgtaaacacatggaactgaattaccacatgaacactgtcatcttttctcatgaaagtaaaaagaaccaagaacatttttcactctgattttttatttcttgtattttttgttgagctgttttaacacatattggtttttgaatgcagtcaatctccaggggaaaagttaacaagttatctttcgtagcagaaaccattttgctgccacaaaattttcatcatcagaactaataaatcaagtgttccaaatacaatttgcactaaaaagattggcattattttcctcatcagcagaatttataacagtgtgtggtatctagaaatacttatatatacaattccacactggaagacactcagcaattaatgaagttaattactgggccaacttgagaggaaaaaatggaaaagaaactaaaatgttgggtgaattctaccaaagtcagccgtggtggctgcactggcacagaatactaaactgagtgtgactattttcactgcaacaaatgaaaaaacaaaatgtgcctgtttaaagcactcagtagagggctgatgaaactaattttttttcctttaagacatgcactcttgagtcctacagtaactgagtgtttgtttagacagcacaagaaggggtgagagtgcgtctcctagccttaatgtgggagggtagtttcagtcactcatcggctttcattattgtgcagaaatattagaaaacctcattgatcaattttatgtatttgaatatcagcaaattgaaattttccataattatcattaatttgtaaccacatccagtgtcatgcttactccttagagttcagatgaattcttaaaattaaaaaaaaactccatagtactaattttgtttctttatatagtttgcgtttgatattagtgcttgcaattgtattaaagtcaaaagctgatttttatggcatacacaagaatgccactttttcttttatttcataccaataatttaaagattgatatgctaaaaacaatttgcacagcactaaagcatgagctactttcatctaaacctgtaaaaatatgaaagatttttatattttttcactgggaagaaattcttcctggatgaaattacaaatatgtgtagaatatatttaataaaagacttataaaatacctaactacaggacttaaaatatagattggcgcgtagtatatagaacaatattccatataaataagtttagcctttataaaaatgaagttgcaggctgacattacattctgtacttactaagtgtcaacagcccttacaaacattaaatgtaaatggtttcaaatggtcagcgttgtttaaatgtaatcatgttattttattcattgttaatgctttgatgaaaaggctttatatgcagtagatctacgaaaatattgttcatactgatcagaattaaatttgtatagagcagagttttaaaatgaatgtaaatagcactaaacgttttctttctgcaacctgtacttacagattcttcctgtaaactaaataaaaaaaaaatgatagtgcattttggtggtaattttaaaggtcttgattaggtcaataattgtttaagcaccgtctcattcatgttttctactttcatttcttaagcttttaaaattcatttaattaatattctgttgttgttttggggagtattcccaatgtatctttgatatttaacctggttaatttgtggacagtcacaacaatggatagaattatgtagtctccgttatcactaaaatgttatcttcaagagatgttaaatatttatatgctttgttgactagctgaaatgtgaattctgttagtgttgactaaagaatctggtagttgcttaattgggcaattaaacaatttatggctctattttgtaaaacaaactactggtaattatttttaatacctattttcattctgattactctttttttaagttaaagactatcagttaattaagattgagtttttatgatggttaaaaataattctctattggtttttcaatatatttttctgtgtgttctcagattatatatttccctcaatttagagtttgctaagtgaaataaactggttcactagtagagaaagaattacgtcgcttaatacctaatatcatagttgtacaatatgaaaaaaaagaataaaaagtagcagtaaaattatatactgaaaacaccaaaaatttagatgccttaatagtatatacgtgaaatactcagctgtccctttaaaaataattccttggactgcctggtggttaaaatacgattcctcatatccaaggctacttttgaagatccctctgccaaaaatatagctcacttatctaaaggtgagagctgcatagatccagtaatgtacataaagcctgaatgatgagcctatgtccctgcctaacgctggtgtctcactcatctcttttacctaaattgtcctgaactttgttaagtgttctggacaaggccaagcttttctttattaaaacctcagcatgtctccctgatctgaactatttgctttctcttcaagataagttgtattttaccatggaaaaatacagtatctaacattaccattcacgttaaatgaagtttcctcataacatttatctttagttttatgaagtcatcgtgaccaatgttacagtaatttctgttagctgattgtggtaaacaatgtttaatgtgaaaagaaattaaaactttcttcatctgttgta

SEQ ID NO: 333275 - DNA, 4811 bp, Homo sapiens
agcgggagggaggacgaggacgggggcggcggctgctgcgagggggggcccgtgctctccccgtttcccttagtcgcactcaggcagccgccgccgccgccgctgccgccatgttggtttgagaggcgatgacaggaggcggccgcggcgtgtgggactgaaaagtgaaggaggaggaggagaaacaaagctctgagaagaaaccattcccgggctgaggagaaggaggacccggcctcttccggggaccagccgaagtcggcgtcgcccggagctcgcgaggccggggaggggaggggaagggaaggcggagaccggggaggcggcggcggggaaggcggaggcagaagaggagtggcgaggagccggagacgatgcgccccgaccccagctgctgtccggaggcgcccgcggcctgagcccagaggggctgtggagtgtcccggccggccccgagcacccccgcgctgtcggtcccccgctccggtctttcgctttggcttccaactagttaaatgcccttgagcgcgggtttccgcggcccggctcttcgcccccgcggcgcgagttgagccgtttccccgcgctgtccgcgcgggcgctccgacagcggctctgcagggtccgcggccagcgtccggccaccgctcggccgccactcaaggctcacgcgtcgatgtgtagctacatagttatctgtgtacatccacgctggggcatttttctcctgcttaatgaggacttgactcgggagcaagtgtgaatcattgccggggctgggaaaggaggaaggcgcatttaaccccctcccacccctctccatgtccgtgtgtcactcggctcggtccacctggcgcggccggtcctggggctgctgctgctgttgacgacgacgacgacgacgggggctgcctctgctgtcccgggagtttcctcctgctccggccacacagctcctggggattgttcctcttcgaaccagaacctcggcctgaccggcactttggctccaaaataactttatttttgggggagaaagcacatcacgaaccagtcaaaatcgtggtttatttctgtaacgtgaagacttctgctcttttttctttgtttgtttttttcgtaaacatctgggtgtatatcaaacggcaagatgtccagtaatgtcccggcggatatgataaatttgcgcctcattttggtaagcggaaaaacaaaagagttcctgttttctcctaacgattctgcttctgacattgcaaagcatgtatatgacaattggccaatggactgggaagaagagcaggtcagcagtccaaatattctacgacttatttatcaaggacgatttctacatggaaatgtcacattaggagcattaaaacttccttttggcaaaacaacagtgatgcatttggtggccagagagacattaccagagccaaactctcaaggtcagaggaatcgtgagaagactggagagagtaattgttgtgtaatcctgtaaacactgtctgcctagtgtgatgtgatatagtctttgtctttcatgctgctgggacagaaaagacccgacattgcttcagaaaccgttcagaacagtctgcctgtaaacacatggaactgaattaccacatgaacactgtcatcttttctcatgaaagtaaaaagaaccaagaacatttttcactctgattttttatttcttgtattttttgttgagctgttttaacacatattggtttttgaatgcagtcaatctccaggggaaaagttaacaagttatctttcgtagcagaaaccattttgctgccacaaaattttcatcatcagaactaataaatcaagtgttccaaatacaatttgcactaaaaagattggcattattttcctcatcagcagaatttataacagtgtgtggtatctagaaatacttatatatacaattccacactggaagacactcagcaattaatgaagttaattactgggccaacttgagaggaaaaaatggaaaagaaactaaaatgttgggtgaattctaccaaagtcagccgtggtggctgcactggcacagaatactaaactgagtgtgactattttcactgcaacaaatgaaaaaacaaaatgtgcctgtttaaagcactcagtagagggctgatgaaactaattttttttcctttaagacatgcactcttgagtcctacagtaactgagtgtttgtttagacagcacaagaaggggtgagagtgcgtctcctagccttaatgtgggagggtagtttcagtcactcatcggctttcattattgtgcagaaatattagaaaacctcattgatcaattttatgtatttgaatatcagcaaattgaaattttccataattatcattaatttgtaaccacatccagtgtcatgcttactccttagagttcagatgaattcttaaaattaaaaaaaaactccatagtactaattttgtttctttatatagtttgcgtttgatattagtgcttgcaattgtattaaagtcaaaagctgatttttatggcatacacaagaatgccactttttcttttatttcataccaataatttaaagattgatatgctaaaaacaatttgcacagcactaaagcatgagctactttcatctaaacctgtaaaaatatgaaagatttttatattttttcactgggaagaaattcttcctggatgaaattacaaatatgtgtagaatatatttaataaaagacttataaaatacctaactacaggacttaaaatatagattggcgcgtagtatatagaacaatattccatataaataagtttagcctttataaaaatgaagttgcaggctgacattacattctgtacttactaagtgtcaacagcccttacaaacattaaatgtaaatggtttcaaatggtcagcgttgtttaaatgtaatcatgttattttattcattgttaatgctttgatgaaaaggctttatatgcagtagatctacgaaaatattgttcatactgatcagaattaaatttgtatagagcagagttttaaaatgaatgtaaatagcactaaacgttttctttctgcaacctgtacttacagattcttcctgtaaactaaataaaaaaaaaatgatagtgcattttggtggtaattttaaaggtcttgattaggtcaataattgtttaagcaccgtctcattcatgttttctactttcatttcttaagcttttaaaattcatttaattaatattctgttgttgttttggggagtattcccaatgtatctttgatatttaacctggttaatttgtggacagtcacaacaatggatagaattatgtagtctccgttatcactaaaatgttatcttcaagagatgttaaatatttatatgctttgttgactagctgaaatgtgaattctgttagtgttgactaaagaatctggtagttgcttaattgggcaattaaacaatttatggctctattttgtaaaacaaactactggtaattatttttaatacctattttcattctgattactctttttttaagttaaagactatcagttaattaagattgagtttttatgatggttaaaaataattctctattggtttttcaatatatttttctgtgtgttctcagattatatatttccctcaatttagagtttgctaagtgaaataaactggttcactagtagagaaagaattacgtcgcttaatacctaatatcatagttgtacaatatgaaaaaaaagaataaaaagtagcagtaaaattatatactgaaaacaccaaaaatttagatgccttaatagtatatacgtgaaatactcagctgtccctttaaaaataattccttggactgcctggtggttaaaatacgattcctcatatccaaggctacttttgaagatccctctgccaaaaatatagctcacttatctaaaggtgagagctgcatagatccagtaatgtacataaagcctgaatgatgagcctatgtccctgcctaacgctggtgtctcactcatctcttttacctaaattgtcctgaactttgttaagtgttctggacaaggccaagcttttctttattaaaacctcagcatgtctccctgatctgaactatttgctttctcttcaagataagttgtattttaccatggaaaaatacagtatctaacattaccattcacgttaaatgaagtttcctcataacatttatctttagttttatgaagtcatcgtgaccaatgttacagtaatttctgttagctgattgtggtaaacaatgtttaatgtgaaaagaaattaaaactttcttcatctgttgtagaatatttctcttctttaaaatggcttctattcataaaaaaaaaaaaaaaaaaaaaaaaaaaaaaaaaaaaaagaaaacaaaaaaaaaagaaaagaaagaagagagaaaaaaaaaagaaaaaagagaaaagggggggggggggcaaaaaatactccccgggggggggcccatttgcccccgccttttattttgaaaaagggggggcccccaaggggggtttataacaaagcaggcacgcgcgcggcgcggctattaaaaacacgcccctttgcgggggaggacaaaactgcgtcgtgtgggtgtctccttcttgttgagagcacaccaccatcgtgggggggggagcaaacatttgcgcagcccaccccgcctcacgtaattttataccctcgcgggaataatcacaatcatggcgtgtttattgttttaaacccgccttattgtctgcgggagaa

SEQ ID NO: 333276 - DNA, 4297 bp, Homo sapiens
agcgggagggaggacgaggacgggggcggcggctgctgcgagggggggcccgtgctctccccgtttcccttagtcgcactcaggcagccgccgccgccgccgctgccgccatgttggtttgagaggcgatgacaggaggcggccgcggcgtgtgggactgaaaagtgaaggaggaggaggagaaacaaagctctgagaagaaaccattcccgggctgaggagaaggaggacccggcctcttccggggaccagccgaagtcggcgtcgcccggagctcgcgaggccggggaggggaggggaagggaaggcggagaccggggaggcggcggcggggaaggcggaggcagaagaggagtggcgaggagccggagacgatgcgccccgaccccagctgctgtccggaggcgcccgcggcctgagcccagaggggctgtggagtgtcccggccggccccgagcacccccgcgctgtcggtcccccgctccggtctttcgctttggcttccaactagttaaatgcccttgagcgcgggtttccgcggcccggctcttcgcccccgcggcgcgagttgagccgtttccccgcgctgtccgcgcgggcgctccgacagcggctctgcagggtccgcggccagcgtccggccaccgctcggccgccactcaaggctcacgcgtcgatgtgtagctacatagttatctgtgtacatccacgctggggcatttttctcctgcttaatgaggacttgactcgggagcaagtgtgaatcattgccggggctgggaaaggaggaaggcgcatttaaccccctcccacccctctccatgtccgtgtgtcactcggctcggtccacctggcgcggccggtcctggggctgctgctgctgttgacgacgacgacgacgacgggggctgcctctgctgtcccgggagtttcctcctgctccggccacacagctcctggggattgttcctcttcgaaccagaacctcggcctgaccggcactttggctccaaaataactttatttttgggggagaaagcacatcacgaaccagtcaaaatcgtggtttatttctgtaacgtgaagacttctgctcttttttctttgtttgtttttttcgtaaacatctgggtgtatatcaaacggcaagatgtccagtaatgtcccggcggatatgataaatttgcgcctcattttggtaagcggaaaaacaaaagagttcctgttttctcctaacgattctgcttctgacattgcaaagcatgtatatgacaattggccaatggactgggaagaagagcaggtcagcagtccaaatattctacgacttatttatcaaggacgatttctacatggaaatgtcacattaggagcattaaaacttccttttggcaaaacaacagtgatgcatttggtggccagagagacattaccagagccaaactctcaaggtcagaggaatcgtgagaagactggagagagtaattgttgtgtaatcctgtaaacactgtctgcctagtgtgatgtgatatagtctttgtctttcatgctgctgggacagaaaagacccgacattgcttcagaaaccgttcagaacagtctgcctgtaaacacatggaactgaattaccacatgaacactgtcatcttttctcatgaaagtaaaaagaaccaagaacatttttcactctgattttttatttcttgtattttttgttgagctgttttaacacatattggtttttgaatgcagtcaatctccaggggaaaagttaacaagttatctttcgtagcagaaaccattttgctgccacaaaattttcatcatcagaactaataaatcaagtgttccaaatacaatttgcactaaaaagattggcattattttcctcatcagcagaatttataacagtgtgtggtatctagaaatacttatatatacaattccacactggaagacactcagcaattaatgaagttaattactgggccaacttgagaggaaaaaatggaaaagaaactaaaatgttgggtgaattctaccaaagtcagccgtggtggctgcactggcacagaatactaaactgagtgtgactattttcactgcaacaaatgaaaaaacaaaatgtgcctgtttaaagcactcagtagagggctgatgaaactaattttttttcctttaagacatgcactcttgagtcctacagtaactgagtgtttgtttagacagcacaagaaggggtgagagtgcgtctcctagccttaatgtgggagggtagtttcagtcactcatcggctttcattattgtgcagaaatattagaaaacctcattgatcaattttatgtatttgaatatcagcaaattgaaattttccataattatcattaatttgtaaccacatccagtgtcatgcttactccttagagttcagatgaattcttaaaattaaaaaaaaactccatagtactaattttgtttctttatatagtttgcgtttgatattagtgcttgcaattgtattaaagtcaaaagctgatttttatggcatacacaagaatgccactttttcttttatttcataccaataatttaaagattgatatgctaaaaacaatttgcacagcactaaagcatgagctactttcatctaaacctgtaaaaatatgaaagatttttatattttttcactgggaagaaattcttcctggatgaaattacaaatatgtgtagaatatatttaataaaagacttataaaatacctaactacaggacttaaaatatagattggcgcgtagtatatagaacaatattccatataaataagtttagcctttataaaaatgaagttgcaggctgacattacattctgtacttactaagtgtcaacagcccttacaaacattaaatgtaaatggtttcaaatggtcagcgttgtttaaatgtaatcatgttattttattcattgttaatgctttgatgaaaaggctttatatgcagtagatctacgaaaatattgttcatactgatcagaattaaatttgtatagagcagagttttaaaatgaatgtaaatagcactaaacgttttctttctgcaacctgtacttacagattcttcctgtaaactaaataaaaaaaaaatgatagtgcattttggtggtaattttaaaggtcttgattaggtcaataattgtttaagcaccgtctcattcatgttttctactttcatttcttaagcttttaaaattcatttaattaatattctgttgttgttttggggagtattcccaatgtatctttgatatttaacctggttaatttgtggacagtcacaacaatggatagaattatgtagtctccgttatcactaaaatgttatcttcaagagatgttaaatatttatatgctttgttgactagctgaaatgtgaattctgttagtgttgactaaagaatctggtagttgcttaattgggcaattaaacaatttatggctctattttgtaaaacaaactactggtaattatttttaatacctattttcattctgattactctttttttaagttaaagactatcagttaattaagattgagtttttatgatggttaaaaataattctctattggtttttcaatatatttttctgtgtgttctcagattatatatttccctcaatttagagtttgctaagtgaaataaactggttcactagtagagaaagaattacgtcgcttaatacctaatatcatagttgtacaatatgtgccttaatagtatatacgtgaaatactcagctgtccctttaaaaataattccttggactgcctggtggttaaaatacgattcctcatatccaaggctacttttgaagatccctctgccaaaaatatagctcacttatctaaaggtgagagctgcatagatccagtaatgtacataaagcctgaatgatgagcctatgtccctgcctaacgctggtgtctcactcatctcttttacctaaattgtcctgaactttgttaagtgttctggacaaggccaagcttttctttattaaaacctcagcatgtctccctgatctgaactatttgctttctcttcaagataagttgtattttaccatggaaaaatacagtatctaacattaccattcacgttaaatgaagtttcctcataacatttatctttagttttatgaagtcatcgtgaccaatgttacagtaatttctgttagctgattgtggtaaacaatgtttaatgtgaaaagaaattaaaactttcttcatctgttgta

SEQ ID NO: 333277 - DNA, 4229 bp, Homo sapiens
agcgggagggaggacgaggacgggggcggcggctgctgcgagggggggcccgtgctctccccgtttcccttagtcgcactcaggcagccgccgccgccgccgctgccgccatgttggtttgagaggcgatgacaggaggcggccgcggcgtgtgggactgaaaagtgaaggaggaggaggagaaacaaagctctgagaagaaaccattcccgggctgaggagaaggaggacccggcctcttccggggaccagccgaagtcggcgtcgcccggagctcgcgaggccggggaggggaggggaagggaaggcggagaccggggaggcggcggcggggaaggcggaggcagaagaggagtggcgaggagccggagacgatgcgccccgaccccagctgctgtccggaggcgcccgcggcctgagcccagaggggctgtggagtgtcccggccggccccgagcacccccgcgctgtcggtcccccgctccggtctttcgctttggcttccaactagttaaatgcccttgagcgcgggtttccgcggcccggctcttcgcccccgcggcgcgagttgagccgtttccccgcgctgtccgcgcgggcgctccgacagcggctctgcagggtccgcggccagcgtccggccaccgctcggccgccactcaaggctcacgcgtcgatgtgtagctacatagttatctgtgtacatccacgctggggcatttttctcctgcttaatgaggacttgactcgggagcaagtgtgaatcattgccggggctgggaaaggaggaaggcgcatttaaccccctcccacccctctccatgtccgtgtgtcactcggctcggtccacctggcgcggccggtcctggggctgctgctgctgttgacgacgacgacgacgacgggggctgcctctgctgtcccgggagtttcctcctgctccggccacacagctcctggggattgttcctcttcgaaccagaacctcggcctgaccggcactttggctccaaaataactttatttttgggggagaaagcacatcacgaaccagtcaaaatcgtggtttatttctgtaacgtgaagacttctgctcttttttctttgtttgtttttttcgtaaacatctgggtgtatatcaaacggcaagatgtccagtaatgtcccggcggatatgataaatttgcgcctcattttggtaagcggaaaaacaaaagagttcctgttttctcctaacgattctgcttctgacattgcaaagcatgtatatgacaattggccaatggactgggaagaagagcaggtcagcagtccaaatattctacgacttatttatcaaggacgatttctacatggaaatgtcacattaggagcattaaaacttccttttggcaaaacaacagtgatgcatttggtggccagagagacattaccagagccaaactctcaaggtcagaggaatcgtgagaagactggagagagtaattgttgtgtaatcctgtaaacactgtctgcctagtgtgatgtgatatagtctttgtctttcatgctgctgggacagaaaagacccgacattgcttcagaaaccgttcagaacagtctgcctatattggtttttgaatgcagtcaatctccaggggaaaagttaacaagttatctttcgtagcagaaaccattttgctgccacaaaattttcatcatcagaactaataaatcaagtgttccaaatacaatttgcactaaaaagattggcattattttcctcatcagcagaatttataacagtgtgtggtatctagaaatacttatatatacaattccacactggaagacactcagcaattaatgaagttaattactgggccaacttgagaggaaaaaatggaaaagaaactaaaatgttgggtgaattctaccaaagtcagccgtggtggctgcactggcacagaatactaaactgagtgtgactattttcactgcaacaaatgaaaaaacaaaatgtgcctgtttaaagcactcagtagagggctgatgaaactaattttttttcctttaagacatgcactcttgagtcctacagtaactgagtgtttgtttagacagcacaagaaggggtgagagtgcgtctcctagccttaatgtgggagggtagtttcagtcactcatcggctttcattattgtgcagaaatattagaaaacctcattgatcaattttatgtatttgaatatcagcaaattgaaattttccataattatcattaatttgtaaccacatccagtgtcatgcttactccttagagttcagatgaattcttaaaattaaaaaaaaactccatagtactaattttgtttctttatatagtttgcgtttgatattagtgcttgcaattgtattaaagtcaaaagctgatttttatggcatacacaagaatgccactttttcttttatttcataccaataatttaaagattgatatgctaaaaacaatttgcacagcactaaagcatgagctactttcatctaaacctgtaaaaatatgaaagatttttatattttttcactgggaagaaattcttcctggatgaaattacaaatatgtgtagaatatatttaataaaagacttataaaatacctaactacaggacttaaaatatagattggcgcgtagtatatagaacaatattccatataaataagtttagcctttataaaaatgaagttgcaggctgacattacattctgtacttactaagtgtcaacagcccttacaaacattaaatgtaaatggtttcaaatggtcagcgttgtttaaatgtaatcatgttattttattcattgttaatgctttgatgaaaaggctttatatgcagtagatctacgaaaatattgttcatactgatcagaattaaatttgtatagagcagagttttaaaatgaatgtaaatagcactaaacgttttctttctgcaacctgtacttacagattcttcctgtaaactaaataaaaaaaaaatgatagtgcattttggtggtaattttaaaggtcttgattaggtcaataattgtttaagcaccgtctcattcatgttttctactttcatttcttaagcttttaaaattcatttaattaatattctgttgttgttttggggagtattcccaatgtatctttgatatttaacctggttaatttgtggacagtcacaacaatggatagaattatgtagtctccgttatcactaaaatgttatcttcaagagatgttaaatatttatatgctttgttgactagctgaaatgtgaattctgttagtgttgactaaagaatctggtagttgcttaattgggcaattaaacaatttatggctctattttgtaaaacaaactactggtaattatttttaatacctattttcattctgattactctttttttaagttaaagactatcagttaattaagattgagtttttatgatggttaaaaataattctctattggtttttcaatatatttttctgtgtgttctcagattatatatttccctcaatttagagtttgctaagtgaaataaactggttcactagtagagaaagaattacgtcgcttaatacctaatatcatagttgtacaatatgaaaaaaaagaataaaaagtagcagtaaaattatatactgaaaacaccaaaaatttagatgccttaatagtatatacgtgaaatactcagctgtccctttaaaaataattccttggactgcctggtggttaaaatacgattcctcatatccaaggctacttttgaagatccctctgccaaaaatatagctcacttatctaaaggtgagagctgcatagatccagtaatgtacataaagcctgaatgatgagcctatgtccctgcctaacgctggtgtctcactcatctcttttacctaaattgtcctgaactttgttaagtgttctggacaaggccaagcttttctttattaaaacctcagcatgtctccctgatctgaactatttgctttctcttcaagataagttgtattttaccatggaaaaatacagtatctaacattaccattcacgttaaatgaagtttcctcataacatttatctttagttttatgaagtcatcgtgaccaatgttacagtaatttctgttagctgattgtggtaaacaatgtttaatgtgaaaagaaattaaaactttcttcatctgttgta

SEQ ID NO: 333278 - DNA, 3874 bp, Homo sapiens
tcccatgtgtcctaccttactccccctaaaaaatatatggtcatgcagttggggctaaaagagctattgggaggctgaggcaggagaatggattgagcttgggaggccgaggttgcagtgagccaagattgtaccactacactccagcctgggtgacagagcagagactctgtctcaaaaaaacatacatagtttattgttaattcgtctaggttttaataattttcataggaaaaaaacttgtatatagtttattttcttttaattatattttttaagaagtagaatatcaactaaattttttttctgtttagtgacgagacctgcagtgtcaacatttttattaatttttgggtaaaaatgtatattctataataatagtgataacttgcaaaagttcaattctgaacattgttggagtgattaaatttaaaagtgtaatgaattttggttttcctttgttcatttattatggcaaatatgtctgacacacacacacaccctttaaataataggaaataaaatcaaatatcaaattcccattctttttaaaaaagttttatagaatttaaataaaaaccacaatatggcattggtaataatttaggatgtgattgaaatgaaaagcctttgagtcttcttttttacttaaaaaatttttagatttatgttaaaagaatcattgtcttctttcagataaatttgcgcctcattttggtaagcggaaaaacaaaagagttcctgttttctcctaacgattctgcttctgacattgcaaagcatgtatatgacaattggccaatggactgggaagaagagcaggtcagcagtccaaatattctacgacttatttatcaaggacgatttctacatggaaatgtcacattaggagcattaaaacttccttttggcaaaacaacagtgatgcatttggtggccagagagacattaccagagccaaactctcaaggtcagaggaatcgtgagaagactggagagagtaattgttgtgtaatcctgtaaacactgtctgcctagtgtgatgtgatatagtctttgtctttcatgctgctgggacagaaaagacccgacattgcttcagaaaccgttcagaacagtctgcctgtaaacacatggaactgaattaccacatgaacactgtcatcttttctcatgaaagtaaaaagaaccaagaacatttttcactctgattttttatttcttgtattttttgttgagctgttttaacacatattggtttttgaatgcagtcaatctccaggggaaaagttaacaagttatctttcgtagcagaaaccattttgctgccacaaaattttcatcatcagaactaataaatcaagtgttccaaatacaatttgcactaaaaagattggcattattttcctcatcagcagaatttataacagtgtgtggtatctagaaatacttatatatacaattccacactggaagacactcagcaattaatgaagttaattactgggccaacttgagaggaaaaaatggaaaagaaactaaaatgttgggtgaattctaccaaagtcagccgtggtggctgcactggcacagaatactaaactgagtgtgactattttcactgcaacaaatgaaaaaacaaaatgtgcctgtttaaagcactcagtagagggctgatgaaactaattttttttcctttaagacatgcactcttgagtcctacagtaactgagtgtttgtttagacagcacaagaaggggtgagagtgcgtctcctagccttaatgtgggagggtagtttcagtcactcatcggctttcattattgtgcagaaatattagaaaacctcattgatcaattttatgtatttgaatatcagcaaattgaaattttccataattatcattaatttgtaaccacatccagtgtcatgcttactccttagagttcagatgaattcttaaaattaaaaaaaaactccatagtactaattttgtttctttatatagtttgcgtttgatattagtgcttgcaattgtattaaagtcaaaagctgatttttatggcatacacaagaatgccactttttcttttatttcataccaataatttaaagattgatatgctaaaaacaatttgcacagcactaaagcatgagctactttcatctaaacctgtaaaaatatgaaagatttttatattttttcactgggaagaaattcttcctggatgaaattacaaatatgtgtagaatatatttaataaaagacttataaaatacctaactacaggacttaaaatatagattggcgcgtagtatatagaacaatattccatataaataagtttagcctttataaaaatgaagttgcaggctgacattacattctgtacttactaagtgtcaacagcccttacaaacattaaatgtaaatggtttcaaatggtcagcgttgtttaaatgtaatcatgttattttattcattgttaatgctttgatgaaaaggctttatatgcagtagatctacgaaaatattgttcatactgatcagaattaaatttgtatagagcagagttttaaaatgaatgtaaatagcactaaacgttttctttctgcaacctgtacttacagattcttcctgtaaactaaataaaaaaaaaatgatagtgcattttggtggtaattttaaaggtcttgattaggtcaataattgtttaagcaccgtctcattcatgttttctactttcatttcttaagcttttaaaattcatttaattaatattctgttgttgttttggggagtattcccaatgtatctttgatatttaacctggttaatttgtggacagtcacaacaatggatagaattatgtagtctccgttatcactaaaatgttatcttcaagagatgttaaatatttatatgctttgttgactagctgaaatgtgaattctgttagtgttgactaaagaatctggtagttgcttaattgggcaattaaacaatttatggctctattttgtaaaacaaactactggtaattatttttaatacctattttcattctgattactctttttttaagttaaagactatcagttaattaagattgagtttttatgatggttaaaaataattctctattggtttttcaatatatttttctgtgtgttctcagattatatatttccctcaatttagagtttgctaagtgaaataaactggttcactagtagagaaagaattacgtcgcttaatacctaatatcatagttgtacaatatgaaaaaaaagaataaaaagtagcagtaaaattatatactgaaaacaccaaaaatttagatgccttaatagtatatacgtgaaatactcagctgtccctttaaaaataattccttggactgcctggtggttaaaatacgattcctcatatccaaggctacttttgaagatccctctgccaaaaatatagctcacttatctaaaggtgagagctgcatagatccagtaatgtacataaagcctgaatgatgagcctatgtccctgcctaacgctggtgtctcactcatctcttttacctaaattgtcctgaactttgttaagtgttctggacaaggccaagcttttctttattaaaacctcagcatgtctccctgatctgaactatttgctttctcttcaagataagttgtattttaccatggaaaaatacagtatctaacattaccattcacgttaaatgaagtttcctcataacatttatctttagttttatgaagtcatcgtgaccaatgttacagtaatttctgttagctgattgtggtaaacaatgtttaatgtgaaaagaaattaaaactttcttcatctgttgta

SEQ ID NO: 333279 - DNA, 3097 bp, Homo sapiens
agcgggagggaggacgaggacgggggcggcggctgctgcgagggggggcccgtgctctccccgtttcccttagtcgcactcaggcagccgccgccgccgccgctgccgccatgttggtttgagaggcgatgacaggaggcggccgcggcgtgtgggactgaaaagtgaaggaggaggaggagaaacaaagctctgagaagaaaccattcccgggctgaggagaaggaggacccggcctcttccggggaccagccgaagtcggcgtcgcccggagctcgcgaggccggggaggggaggggaagggaaggcggagaccggggaggcggcggcggggaaggcggaggcagaagaggagtggcgaggagccggagacgatgcgccccgaccccagctgctgtccggaggcgcccgcggcctgagcccagaggggctgtggagtgtcccggccggccccgagcacccccgcgctgtcggtcccccgctccggtctttcgctttggcttccaactagttaaatgcccttgagcgcgggtttccgcggcccggctcttcgcccccgcggcgcgagttgagccgtttccccgcgctgtccgcgcgggcgctccgacagcggctctgcagggtccgcggccagcgtccggccaccgctcggccgccactcaaggctcacgcgtcgatgtgtagctacatagttatctgtgtacatccacgctggggcatttttctcctgcttaatgaggacttgactcgggagcaagtgtgaatcattgccggggctgggaaaggaggaaggcgcatttaaccccctcccacccctctccatgtccgtgtgtcactcggctcggtccacctggcgcggccggtcctggggctgctgctgctgttgacgacgacgacgacgacgggggctgcctctgctgtcccgggagtttcctcctgctccggccacacagctcctggggattgttcctcttcgaaccagaacctcggcctgaccggcactttggctccaaaataactttatttttgggggagaaagcacatcacgaaccagtcaaaatcgtggtttatttctgtaacgtgaagacttctgctcttttttctttgtttgtttttttcgtaaacatctgggtgtatatcaaacggcaagatgtccagtaatgtcccggcggatatgataaatttgcgcctcattttggtaagcggaaaaacaaaagagttcctgttttctcctaacgattctgcttctgacattgcaaagcatgtatatgacaattggccaatggactgggaagaagagcaggtcagcagtccaaatattctacgacttatttatcaaggacgatttctacatggaaatgtcacattaggagcattaaaacttccttttggcaaaacaacagtgatgcatttggtggccagagagacattaccagagccaaactctcaaggtcagaggaatcgtgagaagactggagagagtaattgttgtgtaatcctgtaaacactgtctgcctagtgtgatgtgatatagtctttgtctttcatgctgctgggacagaaaagacccgacattgcttcagaaaccgttcagaacagtctgcctgtaaacacatggaactgaattaccacatgaacactgtcatcttttctcatgaaagtaaaaagaaccaagaacatttttcactctgattttttatttcttgtattttttgttgagctgttttaacacatattggtttttgaatgcagtcaatctccaggggaaaagttaacaagttatctttcgtagcagaaaccattttgctgccacaaaattttcatcatcagaactaataaatcaagtgttccaaatacaatttgcactaaaaagattggcattattttcctcatcagcagaatttataacagtgtgtggtatctagaaatacttatatatacaattccacactggaagacactcagcaattaatgaagttaattactgggccaacttgagaggaaaaaatggaaaagaaactaaaatgttgggtgaattctaccaaagtcagccgtggtggctgcactggcacagaatactaaactgagtgtgactattttcactgcaacaaatgaaaaaacaaaatgtgcctgtttaaagcactcagtagagggctgatgaaactaattttttttcctttaagacatgcactcttgagtcctacagtaactgagtgtttgtttagacagcacaagaaggggtgagagtgcgtctcctagccttaatgtgggagggtagtttcagtcactcatcggctttcattattgtgcagaaatattagaaaacctcattgatcaattttatgtatttgaatatcagcaaattgaaattttccataattatcattaatttgtaaccacatccagtgtcatgcttactccttagagttcagatgaattcttaaaattaaaaaaaaactccatagtactaattttgtttctttatatagtttgcgtttgatattagtgcttgcaattgtattaaagtcaaaagctgatttttatggcatacacaagaatgccactttttcttttatttcataccaataatttaaagattgatatgctaaaaacaatttgcacagcactaaagcatgagctactttcatctaaacctgtaaaaatatgaaagatttttatattttttcactgggaagaaattcttcctggatgaaattacaaatatgtgtagaatatatttaataaaagacttataaaatacctaactacaggacttaaaatatagattggcgcgtagtatatagaacaatattccatataaataagtttagcctttataaaaatgaagttgcaggctgacattacattctgtacttactaagtgtcaacagcccttacaaacattattcattgttaatgctttgatgaaaaggctttatatgcagtagatctacgaaaatattgttcatactgatcagaattaaatttgtatagagcagagttttaaaatgaatgtaaatagcactaaacgttttctttctgcaacctgtacttacagattcttcctgtaaactaaataaaaaaaaaatgatagtgc

SEQ ID NO: 333280 - DNA, 1416 bp, Homo sapiens
ttcatactgatcagaattaaatttgtttagtgctatttacattcattttaaaactctgctctatacaaatttaattctgatcagtatgatcagaattaaatttgtatagagcagagttttaaaatgaatgtaaatagcactaaacgttttctttctgcaacctgtacttacagattcttcctgtaaactaaataaaaaaaaaatgatagtgcattttggtggtaattttaaaggtcttgattaggtcaataattgtttaagcaccgtctcattcatgttttctactttcatttcttaagcttttaaaattcatttaattaatattctgttgttgttttggggagtattcccaatgtatctttgatatttaacctggttaatttgtggacagtcacaacaatggatagaattatgtagtctccgttatcactaaaatgttatcttcaagagatgttaaatatttatatgctttgttgactagctgaaatgtgaattctgttagtgttgactaaagaatctggtagttgcttaattgggcaattaaacaatttatggctctattttgtaaaacaaactactggtaattatttttaatacctattttcattctgattactctttttttaagttaaagactatcagttaattaagattgagtttttatgatggttaaaaataattctctattggtttttcaatatatttttctgtgtgttctcagattatatatttccctcaatttagagtttgctaagtgaaataaactggttcactagtagagaaagaattacgtcgcttaatacctaatatcatagttgtacaatatgaaaaaaaagaataaaaagtagcagtaaaattatatactgaaaacaccaaaaatttagatgccttaatagtatatacgtgaaatactcagctgtccctttaaaaataattccttggactgcctggtggttaaaatacgattcctcatatccaaggctacttttgaagatccctctgccaaaaatatagctcacttatctaaaggtgagagctgcatagatccagtaatgtacataaagcctgaatgatgagcctatgtccctgcctaacgctggtgtctcactcatctcttttacctaaattgtcctgaactttgttaagtgttctggacaaggccaagcttttctttattaaaacctcagcatgtctccctgatctgaactatttgctttctcttcaagataagttgtattttaccatggaaaaatacagtatctaacattaccattcacgttaaatgaagtttcctcataacatttatctttagttttatgaagtcatcgtgaccaatgttacagtaatttctgttagctgattgtggtaaacaatgtttaatgtgaaaagaaattaaaactttcttcatctgttgta

SEQ ID NO: 333281 - DNA, 2375 bp, Homo sapiens
agcgggagggaggacgaggacgggggcggcggctgctgcgagggggggcccgtgctctccccgtttcccttagtcgcactcaggcagccgccgccgccgccgctgccgccatgttggtttgagaggcgatgacaggaggcggccgcggcgtgtgggactgaaaagtgaaggaggaggaggagaaacaaagctctgagaagaaaccattcccgggctgaggagaaggaggacccggcctcttccggggaccagccgaagtcggcgtcgcccggagctcgcgaggccggggaggggaggggaagggaaggcggagaccggggaggcggcggcggggaaggcggaggcagaagaggagtggcgaggagccggagacgatgcgccccgaccccagctgctgtccggaggcgcccgcggcctgagcccagaggggctgtggagtgtcccggccggccccgagcacccccgcgctgtcggtcccccgctccggtctttcgctttggcttccaactagttaaatgcccttgagcgcgggtttccgcggcccggctcttcgcccccgcggcgcgagttgagccgtttccccgcgctgtccgcgcgggcgctccgacagcggctctgcagggtccgcggccagcgtccggccaccgctcggccgccactcaaggctcacgcgtcgatgtgtagctacatagttatctgtgtacatccacgctggggcatttttctcctgcttaatgaggacttgactcgggagcaagtgtgaatcattgccggggctgggaaaggaggaaggcgcatttaaccccctcccacccctctccatgtccgtgtgtcactcggctcggtccacctggcgcggccggtcctggggctgctgctgctgttgacgacgacgacgacgacgggggctgcctctgctgtcccgggagtttcctcctgctccggccacacagctcctggggattgttcctcttcgaaccagaacctcggcctgaccggcactttggctccaaaataactttatttttgggggagaaagcacatcacgaaccagtcaaaatcgtggtttatttctgtaacgtgaagacttctgctcttttttctttgtttgtttttttcgtaaacatctgggtgtatatcaaacggcaagatgtccagtaatgtcccggcggatatgataaatttgcgcctcattttggtaagcggaaaaacaaaagagttcctgttttctcctaacgattctgcttctgacattgcaaagcatgtatatgacaattggccaatgggtgagtgatatttttctcttgagtatgaataatgttgattcttatgccctaccttgtctcacaaacattttgaaactgttatataacatttaaaagaacaaccgaaaattgagagtataaggctcagatttagaggatcattgtacccttccttatcttgctcttcagcagtctcattcccaaatggtaaaggagcccagaatgcaatggctctgcttctgtctcaaaaaaaaaattgcctccctcaagtgaattgttggtttattttcttcctttgaacttccccagtgtcatcttgatccttatgtcatgtatcatagtgatatgatttttttcagctgatttcacttaattttattagcagtagcaatttgaacttttaaaggacaagacttattttgacaaagaacatagtatatgtacaaaatgagtcaattagattagtgtttctcaaccttaaataatatacggagcttttctagaggaagataattcttgtagatctctagttgctgacttaaattatttttattataatgcgtattttaaaatgtagaaacttaaacccagttaaaactctttattcttcttaactcatatacacaatcataaaactaaaaaagattgattcagagttatatttgcatataactctgaaaccaataatgttcaagttaacaacattaatgtgctagatgatgtatttttgccaaagccagctcactgcttacagcatgaatactgttgagtttgtcatgcctatgttcctacatagtgtttgatgaccaggttgtctgtagagtcaccataaaacctttatttatacagtataacaaattgttactcagttttctcataggtagaatgcatcatttacttgttaagtgaacccctgttctgatctcattagcctcctaacaattaaagaagtactgactgcttggcaccagtacagtcataaatttaatgcacacgtgagtactaaaaccccaaggctgcacttgggttataaagtcactatttaaatcatctagacaatctcctccagatttcattaaaatgaaaatacagattttccagattttcatt

SEQ ID NO: 333282 - DNA, 788 bp, Homo sapiens
  misc_feature (10)..(10): n is a, c, g, or t
  misc_feature (17)..(17): n is a, c, g, or t
gatccaccgngatccancgttggatccggttggatcgaatttgggatccaaactttgttaagtgttctggacaaggccaagcttttctttattaaaacctcagcatgtctccctgatctgaactatttgctttctcttcaagataagttgtattttaccatggaaaaatacagtatctaacattaccattcacgttaaatgaagtttcctcataacatttatctttagttttatgaagtcatcgtgaccaatgttacagtaatttctgttagctgattgtggtaaacaatgtttaatgtgaaaagaaattaaaactttcttcatctgttgtagaatatttctcttctttaaaatggcttctattcataaaaaaaaaaaaaaaaaaaaaaaaaaaaaaaaaaaaaagaaaacaaaaaaaaaagaaaagaaagaagagagaaaaaaaaaagaaaaaagagaaaagggggggggggggcaaaaaatactccccgggggggggcccatttgcccccgccttttattttgaaaaagggggggcccccaaggggggtttataacaaagcaggcacgcgcgcggcgcggctattaaaaacacgcccctttgcgggggaggacaaaactgcgtcgtgtgggtgtctccttcttgttgagagcacaccaccatcgtgggggggggagcaaacatttgcgcagcccaccccgcctcacgtaattttataccctcgcgggaataatcacaatcatggcgtgtttattgttttaaacccgccttattgtctgcgggagaa

SEQ ID NO: 333283 - DNA, 4374 bp, Homo sapiens
agcgggagggaggacgaggacgggggcggcggctgctgcgagggggggcccgggtatctgcttgtgttccttttatctgagggttgatgtcgacgctcggcgtagttgtggtcatgatcggtttgcctagtgcttgaagaatcgtgagtgccggctcacgagagttgctgcggcaatgatacgatgaaggaggaggaggagaaacaaagctctgagaagaaaccattcccgggctgaggagaaggaggacccggcctcttccggggaccagccgaagtcggcgtcgcccggagctcgcgaggccggggaggggaggggaagggaaggcggagaccggggaggcggcggcggggaaggcggaggcagaagaggagtggcgaggagccggagacgatgcgccccgaccccagctgctgtccggaggcgcccgcggcctgagcccagaggggctgtggagtgtcccggccggccccgagcacccccgcgctgtcggtcccccgctccggtctttcgctttggcttccaactagttaaatgcccttgagcgcgggtttccgcggcccggctcttcgcccccgcggcgcgagttgagccgtttccccgcgctgtccgcgcgggcgctccgacagcggctctgcagggtccgcggccagcgtccggccaccgctcggccgccactcaaggctcacgcgtcgatgtgtagctacatagttatctgtgtacatccacgctggggcatttttctcctgcttaatgaggacttgactcgggagcaagtgtgaatcattgccggggctgggaaaggaggaaggcgcatttaaccccctcccacccctctccatgtccgtgtgtcactcggctcggtccacctggcgcggccggtcctggggctgctgctgctgttgacgacgacgacgacgacgggggctgcctctgctgtcccgggagtttcctcctgctccggccacacagctcctggggattgttcctcttcgaaccagaacctcggcctgaccggcactttggctccaaaataactttatttttgggggagaaagcacatcacgaaccagtcaaaatcgtggtttatttctgtaacgtgaagacttctgctcttttttctttgtttgtttttttcgtaaacatctgggtgtatatcaaacggcaagatgtccagtaatgtcccggcggatatgataaatttgcgcctcattttggtaagcggaaaaacaaaagagttcctgttttctcctaacgattctgcttctgacattgcaaagcatgtatatgacaattggccaatggactgggaagaagagcaggtcagcagtccaaatattctacgacttatttatcaaggacgatttctacatggaaatgtcacattaggagcattaaaacttccttttggcaaaacaacagtgatgcatttggtggccagagagacattaccagagccaaactctcaaggtcagaggaatcgtgagaagactggagagagtaattgttgtgtaatcctgtaaacactgtctgcctagtgtgatgtgatatagtctttgtctttcatgctgctgggacagaaaagacccgacattgcttcagaaaccgttcagaacagtctgcctgtaaacacatggaactgaattaccacatgaacactgtcatcttttctcatgaaagtaaaaagaaccaagaacatttttcactctgattttttatttcttgtattttttgttgagctgttttaacacatattggtttttgaatgcagtcaatctccaggggaaaagttaacaagttatctttcgtagcagaaaccattttgctgccacaaaattttcatcatcagaactaataaatcaagtgttccaaatacaatttgcactaaaaagattggcattattttcctcatcagcagaatttataacagtgtgtggtatctagaaatacttatatatacaattccacactggaagacactcagcaattaatgaagttaattactgggccaacttgagaggaaaaaatggaaaagaaactaaaatgttgggtgaattctaccaaagtcagccgtggtggctgcactggcacagaatactaaactgagtgtgactattttcactgcaacaaatgaaaaaacaaaatgtgcctgtttaaagcactcagtagagggctgatgaaactaattttttttcctttaagacatgcactcttgagtcctacagtaactgagtgtttgtttagacagcacaagaaggggtgagagtgcgtctcctagccttaatgtgggagggtagtttcagtcactcatcggctttcattattgtgcagaaatattagaaaacctcattgatcaattttatgtatttgaatatcagcaaattgaaattttccataattatcattaatttgtaaccacatccagtgtcatgcttactccttagagttcagatgaattcttaaaattaaaaaaaaactccatagtactaattttgtttctttatatagtttgcgtttgatattagtgcttgcaattgtattaaagtcaaaagctgatttttatggcatacacaagaatgccactttttcttttatttcataccaataatttaaagattgatatgctaaaaacaatttgcacagcactaaagcatgagctactttcatctaaacctgtaaaaatatgaaagatttttatattttttcactgggaagaaattcttcctggatgaaattacaaatatgtgtagaatatatttaataaaagacttataaaatacctaactacaggacttaaaatatagattggcgcgtagtatatagaacaatattccatataaataagtttagcctttataaaaatgaagttgcaggctgacattacattctgtacttactaagtgtcaacagcccttacaaacattaaatgtaaatggtttcaaatggtcagcgttgtttaaatgtaatcatgttattttattcattgttaatgctttgatgaaaaggctttatatgcagtagatctacgaaaatattgttcatactgatcagaattaaatttgtatagagcagagttttaaaatgaatgtaaatagcactaaacgttttctttctgcaacctgtacttacagattcttcctgtaaactaaataaaaaaaaaatgatagtgcattttggtggtaattttaaaggtcttgattaggtcaataattgtttaagcaccgtctcattcatgttttctactttcatttcttaagcttttaaaattcatttaattaatattctgttgttgttttggggagtattcccaatgtatctttgatatttaacctggttaatttgtggacagtcacaacaatggatagaattatgtagtctccgttatcactaaaatgttatcttcaagagatgttaaatatttatatgctttgttgactagctgaaatgtgaattctgttagtgttgactaaagaatctggtagttgcttaattgggcaattaaacaatttatggctctattttgtaaaacaaactactggtaattatttttaatacctattttcattctgattactctttttttaagttaaagactatcagttaattaagattgagtttttatgatggttaaaaataattctctattggtttttcaatatatttttctgtgtgttctcagattatatatttccctcaatttagagtttgctaagtgaaataaactggttcactagtagagaaagaattacgtcgcttaatacctaatatcatagttgtacaatatgaaaaaaaagaataaaaagtagcagtaaaattatatactgaaaacaccaaaaatttagatgccttaatagtatatacgtgaaatactcagctgtccctttaaaaataattccttggactgcctggtggttaaaatacgattcctcatatccaaggctacttttgaagatccctctgccaaaaatatagctcacttatctaaaggtgagagctgcatagatccagtaatgtacataaagcctgaatgatgagcctatgtccctgcctaacgctggtgtctcactcatctcttttacctaaattgtcctgaactttgttaagtgttctggacaaggccaagcttttctttattaaaacctcagcatgtctccctgatctgaactatttgctttctcttcaagataagttgtattttaccatggaaaaatacagtatctaacattaccattcacgttaaatgaagtttcctcataacatttatctttagttttatgaagtcatcgtgaccaatgttacagtaatttctgttagctgattgtggtaaacaatgtttaatgtgaaaagaaattaaaactttcttcatctgttgta

SEQ ID NO: 333284 - DNA, 4301 bp, Homo sapiens
agcgggagggaggacgaggacgggggcggcggctgctgcgagggggggcccgtgctctccccgtttcccttagtcgcactcaggcagccgccgccgccgccgctgccgccatgttggtttgagaggcgatgacaggaggcggccgcggcgtgtgggactgaaaagtgaaggaggaggaggagaaacaaagctctgagaagaaaccattcccgggctgaggagaaggaggacccggcctcttccggggaccagccgaagtcggcgtcgcccggagctcgcgaggccggggaggggaggggaagggaaggcggagaccggggaggcggcggcggggaaggcggaggcagaagaggagtggcgaggagccggagacgatgcgccccgaccccagctgctgtccggaggcgcccgcggcctgagcccagaggggctgtggagtgtcccggccggccccgagcacccccgcgctgtcggtcccccgctccggtctttcgctttggcttccaactagttaaatgcccttgagcgcgggtttccgcggcccggctcttcgcccccgcggcgcgagttgagccgtttccccgcgctgtccgcgcgggcgctccgacagcggctctgcagggtccgcggccagcgtccggccaccgctcggccgccactcaaggctcacgcgtcgatgtgtagctacatagttatctgtgtacatccacgctggggcatttttctcctgcttaatgaggacttgactcgggagcaagtgtgaatcattgccggggctgggaaaggaggaaggcgcatttaaccccctcccacccctctccatgtccgtgtgtcactcggctcggtccacctggcgcggccggtcctggggctgctgctgctgttgacgacgacgacgacgacgggggctgcctctgctgtcccgggagtttcctcctgctccggccacacagctcctggggattgttcctcttcgaaccagaacctcggcctgaccggcactttggctccaaaataactttatttttgggggagaaagcacatcacgaaccagtcaaaatcgtggtttatttctgtaacgtgaagacttctgctcttttttctttgtttgtttttttcgtaaacatctgggtgtatatcaaacggcaagatgtccagtaatgtcccggcggatatgataaatttgcgcctcattttggtaagcggaaaaacaaaagagttcctgttttctcctaacgattctgcttctgacattgcaaagcatgtatatgacaattggccaatggactgggaagaagagcaggtcagcagtccaaatattctacgacttatttatcaaggacgatttctacatggaaatgtcacattaggagcattaaaacttccttttggcaaaacaacagtgatgcatttggtggccagagagacattaccagagccaaactctcaaggtcagaggaatcgtgagaagactggagagagtaattgttgtgtaatcctgtaaacactgtctgcctagtgtgatgtgatatagtctttgtctttcatgctgctgggacagaaaagacccgacattgcttcagaaaccgttcagaacagtctgcctgtaaacacatggaactgaattaccacatgaacactgtcatcttttctcatgaaagttgagctgttttaacacatattggtttttgaatgcagtcaatctccaggggaaaagttaacaagttatctttcgtagcagaaaccattttgctgccacaaaattttcatcatcagaactaataaatcaagtgttccaaatacaatttgcactaaaaagattggcattattttcctcatcagcagaatttataacagtgtgtggtatctagaaatacttatatatacaattccacactggaagacactcagcaattaatgaagttaattactgggccaacttgagaggaaaaaatggaaaagaaactaaaatgttgggtgaattctaccaaagtcagccgtggtggctgcactggcacagaatactaaactgagtgtgactattttcactgcaacaaatgaaaaaacaaaatgtgcctgtttaaagcactcagtagagggctgatgaaactaattttttttcctttaagacatgcactcttgagtcctacagtaactgagtgtttgtttagacagcacaagaaggggtgagagtgcgtctcctagccttaatgtgggagggtagtttcagtcactcatcggctttcattattgtgcagaaatattagaaaacctcattgatcaattttatgtatttgaatatcagcaaattgaaattttccataattatcattaatttgtaaccacatccagtgtcatgcttactccttagagttcagatgaattcttaaaattaaaaaaaaactccatagtactaattttgtttctttatatagtttgcgtttgatattagtgcttgcaattgtattaaagtcaaaagctgatttttatggcatacacaagaatgccactttttcttttatttcataccaataatttaaagattgatatgctaaaaacaatttgcacagcactaaagcatgagctactttcatctaaacctgtaaaaatatgaaagatttttatattttttcactgggaagaaattcttcctggatgaaattacaaatatgtgtagaatatatttaataaaagacttataaaatacctaactacaggacttaaaatatagattggcgcgtagtatatagaacaatattccatataaataagtttagcctttataaaaatgaagttgcaggctgacattacattctgtacttactaagtgtcaacagcccttacaaacattaaatgtaaatggtttcaaatggtcagcgttgtttaaatgtaatcatgttattttattcattgttaatgctttgatgaaaaggctttatatgcagtagatctacgaaaatattgttcatactgatcagaattaaatttgtatagagcagagttttaaaatgaatgtaaatagcactaaacgttttctttctgcaacctgtacttacagattcttcctgtaaactaaataaaaaaaaaatgatagtgcattttggtggtaattttaaaggtcttgattaggtcaataattgtttaagcaccgtctcattcatgttttctactttcatttcttaagcttttaaaattcatttaattaatattctgttgttgttttggggagtattcccaatgtatctttgatatttaacctggttaatttgtggacagtcacaacaatggatagaattatgtagtctccgttatcactaaaatgttatcttcaagagatgttaaatatttatatgctttgttgactagctgaaatgtgaattctgttagtgttgactaaagaatctggtagttgcttaattgggcaattaaacaatttatggctctattttgtaaaacaaactactggtaattatttttaatacctattttcattctgattactctttttttaagttaaagactatcagttaattaagattgagtttttatgatggttaaaaataattctctattggtttttcaatatatttttctgtgtgttctcagattatatatttccctcaatttagagtttgctaagtgaaataaactggttcactagtagagaaagaattacgtcgcttaatacctaatatcatagttgtacaatatgaaaaaaaagaataaaaagtagcagtaaaattatatactgaaaacaccaaaaatttagatgccttaatagtatatacgtgaaatactcagctgtccctttaaaaataattccttggactgcctggtggttaaaatacgattcctcatatccaaggctacttttgaagatccctctgccaaaaatatagctcacttatctaaaggtgagagctgcatagatccagtaatgtacataaagcctgaatgatgagcctatgtccctgcctaacgctggtgtctcactcatctcttttacctaaattgtcctgaactttgttaagtgttctggacaaggccaagcttttctttattaaaacctcagcatgtctccctgatctgaactatttgctttctcttcaagataagttgtattttaccatggaaaaatacagtatctaacattaccattcacgttaaatgaagtttcctcataacatttatctttagttttatgaagtcatcgtgaccaatgttacagtaatttctgttagctgattgtggtaaacaatgtttaatgtgaaaagaaattaaaactttcttcatctgttgta

SEQ ID NO: 333285 - DNA, 3151 bp, Homo sapiens
agcgggagggaggacgaggacgggggcggcggctgctgcgagggggggcccgtgctctccccgtttcccttagtcgcactcaggcagccgccgccgccgccgctgccgccatgttggtttgagaggcgatgacaggaggcggccgcggcgtgtgggactgaaaagtgaaggaggaggaggagaaacaaagctctgagaagaaaccattcccgggctgaggagaaggaggacccggcctcttccggggaccagccgaagtcggcgtcgcccggagctcgcgaggccggggaggggaggggaagggaaggcggagaccggggaggcggcggcggggaaggcggaggcagaagaggagtggcgaggagccggagacgatgcgccccgaccccagctgctgtccggaggcgcccgcggcctgagcccagaggggctgtggagtgtcccggccggccccgagcacccccgcgctgtcggtcccccgctccggtctttcgctttggcttccaactagttaaatgcccttgagcgcgggtttccgcggcccggctcttcgcccccgcggcgcgagttgagccgtttccccgcgctgtccgcgcgggcgctccgacagcggctctgcagggtccgcggccagcgtccggccaccgctcggccgccactcaaggctcacgcgtcgatgtgtagctacatagttatctgtgtacatccacgctggggcatttttctcctgcttaatgaggacttgactcgggagcaagtgtgaatcattgccggggctgggaaaggaggaaggcgcatttaaccccctcccacccctctccatgtccgtgtgtcactcggctcggtccacctggcgcggccggtcctggggctgctgctgctgttgacgacgacgacgacgacgggggctgcctctgctgtcccgggagtttcctcctgctccggccacacagctcctggggattgttcctcttcgaaccagaacctcggcctgaccggcactttggctccaaaataactttatttttgggggagaaagcacatcacgaaccagtcaaaatcgtggtttatttctgtaacgtgaagacttctgctcttttttctttgtttgtttttttcgtaaacatctgggtgtatatcaaacggcaagatgtccagtaatgtcccggcggatatgataaatttgcgcctcattttggtaagcggaaaaacaaaagagttcctgttttctcctaacgattctgcttctgacattgcaaagcatgtatatgacaattggccaatggactgggaagaagagcaggtcagcagtccaaatattctacgacttatttatcaaggacgatttctacatggaaatgtcacattaggagcattaaaacttccttttggcaaaacaacagtgatgcatttggtggccagagagacattaccagagccaaactctcaaggtcagaggaatcgtgagaagactggagagagtaattgttgtgtaatcctgtaaacactgtctgcctagtgtgatgtgatatagtctttgtctttcatgctgctgggacagaaaagacccgacattgcttcagaaaccgttcagaacagtctgcctgtaaacacatggaactgaattaccacatgaacactgtcatcttttctcatgaaagtaaaaagaaccaagaacatttttcactctgattttttatttcttgtattttttgttgagctgttttaacacatattggtttttgaatgcagtcaatctccaggggaaaagttaacaagttatctttcgtagcagaaaccattttgctgccacaaaattttcatcatcagaactaataaatcaagtgttccaaatacaatttgcactaaaaagattggcattattttcctcatcagcagaatttataacagtgtgtggtatctagaaatacttatatatacaattccacactggaagacactcagcaattaatgaagttaattactgggccaacttgagaggaaaaaatggaaaagaaactaaaatgttgggtgaattctaccaaagtcagccgtggtggctgcactggcacagaatactaaactgagtgtgactattttcactgcaacaaatgaaaaaacaaaatgtgcctgtttaaagcactcagtagagggctgatgaaactaattttttttcctttaagacatgcactcttgagtcctacagtaactgagtgtttgtttagacagcacaagaaggggtgagagtgcgtctcctagccttaatgtgggagggtagtttcagtcactcatcggctttcattattgtgcagaaatattagaaaacctcattgatcaattttatgtatttgaatatcagcaaattgaaattttccataattatcattaatttgtaaccacatccagtgtcatgcttactccttagagttcagatgaattcttaaaattaaaaaaaaactccatagtactaattttgtttctttatatagtttgcgtttgatattagtgcttgcaattgtattaaagtcaaaagctgatttttatggcatacacaagaatgccactttttcttttatttcataccaataatttaaagattgatatgctaaaaacaatttgcacagcactaaagcatgagctactttcatctaaacctgtaaaaatatgaaagatttttatattttttcactgggaagaaattcttcctggatgaaattacaaatatgtgtagaatatatttaataaaagacttataaaatacctaactacaggacttaaaatatagattggcgcgtagtatatagaacaatattccatataaataagtttagcctttataaaaatgaagttgcaggctgacattacattctgtacttactaagtgtcaacagcccttacaaacattaaatgtaaatggtttcaaatggtcagcgttgtttaaatgtaatcatgttattttattcattgttaatgctttgatgaaaaggctttatatgcagtagatctacgaaaatattgttcatactgatcagaattaaatttgtatagagcagagttttaaaatgaatgtaaatagcactaaacgttttctttctgcaacctgtacttacagattcttcctgtaaactaaataaaaaaaaaatgatagtgc

SEQ ID NO: 333286 - DNA, 105 bp, Homo sapiens
gttttttttttttacttatgttggcaaagtttgttactgggacacgttcatatactgatggtaatgatggaggaaggaagaggggtgcaggtggggctgcctcca

SEQ ID NO: 333287 - DNA, 364 bp, Homo sapiens
tgaactaggcaggtgggcattcccagcagagggaccagcagatgcaaaggcaggaggtagcaatcagtgaagaatgttcaggaaacacaacaggtcatggagcgcagtctaagatgtgtgtgcaggagtagcaagaggagacgccagaaaatgaggccggggcagatcccaaattgtgcataagtcatgctgaagcatcacgcttggtacggcaggcatccgtatgggagccccttaagaatttgatctgatctacattttcctaaaatccccctgggtaggtgcctggtaaatggacaggcagaggaacagaggaaggaggtggccagctggaggtgggtcaaatggtcagggaagagatgac

SEQ ID NO: 333288 - DNA, 559 bp, Homo sapiens
ggatgatactggttgtctagaataagaaacaaaatacaagatttccctgtgcttggcatagaacaatctaaacgcagggcctgatggagcatgtaggttgttgaggatggttggatttcttgttcatctaaagctgtcaaggaggctgggagccaagggaataaaaggcactgcttaatgagttctaatagaagttaacaggtaactttcacagtgatgctagaagtagatgtaatccctctccattatatggcaataataaggaatacttttttctcattccgtgtgtgctctggagagggaaaaaaagcagttgatgttgctgctcagcatcctctcagagcggcatcataaaactcagtccttatattagcaaggttcaatcagacccatgaaatgagggcagcattaaaagaggtgtttcgatgagggatagaggcgggacagtgggagcattgtaagcgtttaatcaggtcacaattgcacttcatcctagggctgccatgggagatctgagttaggcagctgggagtaccaaagaggcatggctccaaaattg

SEQ ID NO: 333289 - DNA, 427 bp, Homo sapiens
tctggcttaaacatggtatttaatagaatctcagtaagtgttgttgatgaatgaaagcagaaaagaatgaatgaatgatatgtggaaaggaaagaaattagaaaggaagaaaggaaggaaagaatgaaagcagggaaaaagaaaggaaaaaatggaggtaaggaaagaatgactcattcaataactaaataaaggaatgatcaattttcaattagtctttgattgatgctattatgttacatgtcaggcttccatacaaaatctgttattttggaaactaatcattcaagattccaagaatttaataaactctcccagcattttctttctgtgtctctttttatagactggagaggcagatttaggtatttttgacaatgaaactaagcaggaggatcaagtccagattgttagggcccttgggata

SEQ ID NO: 333290 - DNA, 559 bp, Homo sapiens
aagaaagaaggaaggaaagaaggaaggaaggaaaagaaagaagaaaggaagaaagaaagaaagaaaagaaagacttaaccaatctttgtatctcagtgtgtttagcacattataagtgctcaataaatgttcactatataaatgaattttgaaacttctctttggcagtaagtagccttttgtttgttgccttccttccttctttccttccttctttctctttctttcgaaagaaaggaagaaaggaaggaaagaatgaaagcagggaaaaagaaaggaaaaaatggaggtaaggaaagaatgactcattcaataactaaataaaggaatgatcaattttcaattagtctttgattgatgctattatgttacatgtcaggcttccatacaaaatctgttattttggaaactaatcattcaagattccaagaatttaataaactctcccagcattttctttctgtgtctctttttatagactggagaggcagatttaggtatttttgacaatgaaactaagcaggaggatcaagtccagattgttagggcccttgggata

SEQ ID NO: 333291 - DNA, 555 bp, Homo sapiens
tggcttcaggggatgaaatgattatccagtggaagttgtagagaggcagatttccacctgcctcaaatgtagggaagaactgataggacctcaagataatatgacctgttatatgaggtagtaagtgggaggtacacatttatggcatgagttcaagcagaggctggataaagtacagagtatttgtttctaacattccttcagctctaagattctattgatcttagttaacagagacacatacatgttgatgagacatgatgaaatcagctagacaccacctcatcaaacagtgttaacatggctggcatgcattaaatatcttcagaaaagctgaggttgtaatttttctgaaagtgattttactatgcaacatcagcccatggtgagactccgtacagtaaaatgtaaatctaaagaccttgaggacatccaacagaaactaaagaactgtgacccaaattaggattgtgattgaatatcctttatgcaccaagcaatagtgcatggtatcattccatgtttgcaaactccaaagagatcagggataaaaat

SEQ ID NO: 333292 - DNA, 902 bp, Homo sapiens
attccagatccttctctcctgagagttcttcagaatatcatgggtagtgtttttatctagatacttagcagttgctggccattatgtttcagtagattttttcaataatttaaaaggatcctaagctctaagtaaagctattgccaaatattttcatttgctaaagcaacatttgcaagccagctaatatttaaaagacagcaaaaagaagagagactttgtacatccatagatgttttaacattacaagaggattttagaaaaacatttggtattgatgtatggtgaaaatcagatggttttatctaacagttgaaactgattacttgttaaatctttattccatcctgcttcttgattataataggcacaaaattctgtaatgaacaaagaatgagtacttttccgtttaattttgcatactagctaaaatttttctttttaaaataacttcaaggaaaaatggggtcaaccctgggctatgagattttgtactagtttattcaaacagattccttttctcctttgcaagtggagcacagtgtccatagacctagatggaaaataatctttgaggaaaaacaaggttttatttaaagaattacgcaggttgacatagtttaaactttggatgcccctctgaataaattgtatgtaaaataacgtagctatttaaaataacatgatttcccttatctcataatctaaaataagaatttctaagagtggttgagggaagggagtaggaaaagaaaagcattttttgtttgtttttgtcaaaattgttttaacattcacctcagaagctgtatatacatttcattcatataacccttaaagaaagcatttagctggccaaatctttgcatgtttatttaacatctatgaatacatccatatgt

SEQ ID NO: 333293 - DNA, 299 bp, Homo sapiens
atggggtctgtagggaactggagcagatgaagaagaggccccagggtggagaggcccaagggtgggcctagagagctctctcaaccctcaggagaaggaataattctcaaaaggggctgagaaggagaagccattggggaaagatgagaatcaagggtgtcgtgccccaggcgccaagtgcaggaactgttccgggaaggaataagtgcccagctgtgtcaaatgctgctgagatacccttccaaggtgcagaaaaaaatttgcacatgtggacccacacgcacctgtgagagagactg

SEQ ID NO: 333294 - DNA, 405 bp, Homo sapiens
aaggattcaggttatttatatataatatgaattttttaattgtataatataatcaattactataaaaaatttagattccattgaatgagcttcaatattatattctaactaggtagaaatttaaaatgtaggaatcatttaaaatacatttttggtacgaaaagcctttaagattaaaaataactgattaatgaccactacattttttcagtaaatcaataattagtctttttaacagttagaaactctcttttaattttttggggttgggggagggctggatctttcatcttcaaacatcacctctctcatccattcattaccatctatactcaatgccctctcttccacagattcaggtttgtgattaatcagtaaggaacttatggaaggagtgcttaatag

SEQ ID NO: 333295 - DNA, 374 bp, Homo sapiens
ctacttaagagaaaaccgatttttagttcatgaaaatttgagatgaatgggggttgggaggaaggcaggaagggtaatgtttactgaaagtgtatttctgaatgacagtggagacaaacaggtgctttccttcctaaccgggaatcccagcataatttagacatgaaaatgcccagaaggcctggcaattgagcctttaatttctacctgtaaattgcaatttatatgttggggatggctctattgagaaaccaaagactatgtaagaacatattgttttcggccctagactagggcactcaatttgttttggtcaaatgaattgcgggaataactaaatctcactgttgttccagcaaaggccttggattaag

SEQ ID NO: 333296 - DNA, 462 bp, Homo sapiens
gttgcggtgagcagaggtcacgccattgcactccagcctgggccacagagcgacactctgtctcaagaaaaaaaaaaaaaaagcctgatgaggatgtgagggtgatctggctgcaacatctgtcaccctattgatcaccagggttggttctgttaccgaccatagtttcttgcgttctccatgcaatagaaattgacatgaggccgaaagacttttcccagacaagacttcattggagcttttgcctggacataagggaggcagcacaagagagaattccctgactgactctgtgcaaagagccggtagggctttttaattaggcaaagcatgagaattgacatcaggggtggggtatgcaggctgggctgggcaaagcatgtgaggggtagggtatgcaggttagcactatttggttgtaatggttaccttgagtaatgggctacctggtggtctagctgg

SEQ ID NO: 333297 - DNA, 314 bp, Homo sapiens
ggtctctgtcacccaggctagactgcagtggcacaatcagagctcactgcagcctcagcctcctgggctcaagcgatcctccagccggactacaggtatgcaccaccatgcctggctaacttttcaaatttttttgtagagacagggtttcaaccatgttgcccaggctggtctcaaactcctgggctcatgggatcctcctgcttgagcctcccaaagtgctgggattataggtgtgagccaccgtgcccagccgaaagttggtgttttaaaatcatggaagaggtttatgagcaggggcaaaggtcagcgca

SEQ ID NO: 333298 - DNA, 255 bp, Homo sapiens
tttagtcagtgcggtgcttaaatcatatacatatgggcttatcttttccaagaaagatattcaacaagctacagtgaagctattattaaagttttcttttctgtttcagatgaagctgaaatattttagggcactttagcatttacattacaaatattcctcctgaggagtgggcacagaatgcacatttcacgaccacatggtctggggctggtttctaggctcctcacttaaccagtcacgtggtcttggcca

SEQ ID NO: 333299 - DNA, 626 bp, Homo sapiens
ctttcaacagctagtgatacttggcttcatataagattacccactaacaatttgatcttgaactctttcctcaaaggaagattttttaaagcatagagcaattatgtatgattccaattcaggacaaagtaggcggtaacttacatttttagctcttaagtgggtgctcacggccatatgtagctcctgagtgtggagattacatcccaaatatagaacaaggctcatctatacagtataattgtggaattctaagtctcagtctccaagccacagaaacgagggagctattcagagaagtggattccttcaagcaaatattctatactttcccccaatcaccatttttttcaataaatcaggttgcagctgagaagatgccaggctcatatattctcccttcaaatttatgtatttgatactttctattcggtttttttggaggtttcctcaacccagaaagggtggctgctgatcatctcttcctgaactattgttacacttgcccaagtacccaagcccttgcgtgtgacacacttgtgcacctggaatctcaattagttccaagcaatataaatagaaaaagtggccactggtaatggatataaaatgaagtggcagaaggg

SEQ ID NO: 333300 - DNA, 537 bp, Homo sapiens
ccctgttccctcaaaagctggcagcctggggaatgttgacagccagcacctttggcttgggctgtggccctctcactgtgagcattgtcagagatggcttcagtcagtctcctttactggctctggagcagccgtgtctactgagtggcagggtttggggactaggctaggctttaaagtctcactagcagggggctgcctggccccaataaccctggaattgacagaatgtccttctctgcctgcagccagccctctgtaaactgtatggccctggggccattttctttgcaggagggaaggtggaactaaggatcccgaatccgtttggaggcagagaggggccaacagggtgtttgaagggagcaaaggcatcgaaatttttggagcatctagaactggggcagtgaatgcagaagagtgggagcacacacacgtttctcctccttgacccagaatgggcacagccttcagagagctcttgccagctcctcactctagcctgggtgaagggggcatctgtgccaaagcaggaag

SEQ ID NO: 333301 - DNA, 126 bp, Homo sapiens
agagaaagtgagtccaaattaaggaaatgaaaaaaagacacaagatataggtggagaaatcttcagtgaaatatatagcataaaaaatataatgacatttgaattggttccaagtctttgctattg

SEQ ID NO: 333302 - DNA, 1218 bp, Homo sapiens
  misc_feature (62)..(62): n is a, c, g, or t
  misc_feature (1042)..(1042): n is a, c, g, or t
gagagattcagctgctttcacaactctggctggattttacctatgtggagagtgtcacccangttagggagcctctggccaggaggaagctgtggcaagatgtgctgcgtctcctgcttggcattgccatcttgctgccacagaacctccactcaatacaccagaaaacagagagtatcttgcagaaattatgttcgaatcatttaacgttccaggactctacattgcagttcaggcagtgctggccttggcggcatcttggacatctcgacaagtgggtgaacgtacattaacggggatagtcattgacagcggagatggagtcacccatgttatcccagtggcagaaggttatgtaattggaagctgcatcaaacacatcccgattgcaggtagagatattacgtatttcattcaacagctgctaagggagagggaggtgggaatccctcctgagcagtcactggagaccgcaaaagccattaaggagaaatactgttacatttgccccgatatagtcaaggaatttgccaagtatgatgtggatccccagaagtggatcaaacagtacacgggtatcaatgcgatcaaccagaagaagtttgttatagacgttggttacgaaagattcctgggacctgaaatattctttcacccggagtttgccaacccagactctatggagtccatctcagatgttgttgatgaagtaatacagaactgccccatcgatgtgcggcgtccgctgtataagatggaacaaattccactgagctatcctcaaggtcacggattccatcctctgtcacctccatttcattgagatgatatattgagcccatgcgtagccttttatttgagatttccaaggccagcaatgttctcttcctctcccttttctttgtataaaaattcattctcaagaaaaactctcatatcaattgtttacatgtcactatggctaagacactaaaagccctctccctgcaaaactggtggcaaagctctctagagaaccacaaactgttgcatccttactacntggggcagcagcaagcccaggtgaagatgtgcatgttcttggagaaagtattaataacataccgacacttacatctgggtgaataatttcatcaaatctcttaactcacgcttgcacaaacttcacctggagagagagagggaaagctgtgccagaaataaatggttattgaggtc

SEQ ID NO: 333303 - DNA, 626 bp, Homo sapiens
  misc_feature (450)..(450): n is a, c, g, or t
tgggaggcagttgccacacacttctacatgaccagatctcttgtgaactcagagctcactcatcacccaagagatggcccacgccatccatgaggaatgcactcccatgatataaacacccccaccaggccccgcctccaagagtggagattacagttcaacacgagatttggtgggggcatatcaaaactacattaaccttaaattatgaagacggtaaactaaataatctgctttctttcctttcctgttttgtgtctgtttttcagatttccaaggccagcaatgttctcttcctctcccttttctttgtataaaaattcattctcaagaaaaactctcatatcaattgtttacatgtcactatggctaagacactaaaagccctctccctgcaaaactggtggcaaagctctctagagaaccacaaactgttgcatccttactacntggggcagcagcaagcccaggtgaagatgtgcatgttcttggagaaagtattaataacataccgacacttacatctgggtgaataatttcatcaaatctcttaactcacgcttgcacaaacttcacctggagagagagagggaaagctgtgccagaaataaatggttattgaggtc

SEQ ID NO: 333304 - DNA, 1064 bp, Homo sapiens
  misc_feature (62)..(62): n is a, c, g, or t
gagagattcagctgctttcacaactctggctggattttacctatgtggagagtgtcacccangttagggagcctctggccaggaggaagctgtggcaagatgtgctgcgtctcctgcttggcattgccatcttgctgccacagaacctccactcaatacaccagaaaacagagagtatcttgcagaaattatgttcgaatcatttaacgttccaggactctacattgcagttcaggcagtgctggccttggcggcatcttggacatctcgacaagtgggtgaacgtacattaacggggatagtcattgacagcggagatggagtcacccatgttatcccagtggcagaaggttatgtaattggaagctgcatcaaacacatcccgattgcaggtagagatattacgtatttcattcaacagctgctaagggagagggaggtgggaatccctcctgagcagtcactggagaccgcaaaagccattaaggagaaatactgttacatttgccccgatatagtcaaggaatttgccaagtatgatgtggatccccagaagtggatcaaacagtacacgggtatcaatgcgatcaaccagaagaagtttgttatagacgttggttacgaaagattcctgggacctgaaatattctttcacccggagtttgccaacccagactctatggagtccatctcagatgttgttgatgaagtaatacagaactgccccatcgatgtgcggcgtccgctgtataagatggaacaaattccactgagctatcctcaaggtcacggattccatcctctgtcacctccatttcattgagatgatatattgagcccatgcgtagccttttatttgaggtattctcatgattttcatttttaattctaggctctacttttgctgaaattttctatttttttcatttgtttcaagagaacccataattgcttattgaagcatttttatgacaattattctaaaattctttgcaggtaatcccagcacctgagtcatctttatgttggagtctcaatcgactcttcattcatttgtgattttt

SEQ ID NO: 333305 - DNA, 1419 bp, Homo sapiens
actcctctccagcaagccgacaaatgatggcacctgcatagagattggttatgtgaaatactccatctttcagctggttatgcagtatctctactatggtggcccagagtcactgctcattaaaaacaatgagatcatggagcttctgtctgctgctaagtttttccagctggaggctttgcagcgacactgtgagattatctgtgcgaaaagcatcaataccgacaactgtgtggatatttacaaccatgccaagtttcttggagtcacagagctctcagcatattgcgaaggctactttctcaaaaacatgatggtcctcattgaaaacgaagcattcaagcagctcctgtatgacaaaaatggtgaagggaccggccaggatgtgctccaggacttacagaggacgttggccatcagaattcagtccatccacttgtcgtcttccaaaggttccgtggtatgaaacgcctagtgcagggaatgcttcccgggaactttccagttctcctgccgcattggctttacacaaacacagacaaattccacctggcacctgtttttggctgggccaaggagctgcctctactgctcccacgtgttcctgttgaaaaacaaaggactttccactggtctgcagatcagatcagctgggtccagagtttaatgggcaactggacaaccaagttaaccccaattgaaagcacccctaggaccattgaacacccactgccggggaccactgtccagtgaatggattgaggccttttaaaggtcactcaggttccaggttgacagttggaggacttcaccgtaccaaccctgaagagattgtattacacattaaggaccttggtagctgtgcttcagcaaacgtcaaccatggtagcaaattggtgaggctgtgaccaataatgaggaaataatctggcaaatttttaggggtgggaacttttttaaatgttcatttagttcgttttcaactaaattgtgtttagggatctgtgtttgagatttttctttatttcttttttttttttaaatagtaagtcacaggtccacactgtgtaaacatgcatctgataagatactgctgatattctaaacaagttgaaataatcttgccttagtgatcatgattacacaaaagaggtgcactgccaataagtatctctaattcaatagttgaaagcaacctgcatgctaatcgtggtttcggggtgagaataaaacacccccacataacatgcatttgcatgggcccgaacctgtgaaatgttacgtttgtgcttcatttttgccaaggtaaaaatgttccatcatttctagctaaaactccatttggtgaaaccaacatatccatttcttttcctagttacggatgatttggggatgcttttgcagaaatgtgttcataga

SEQ ID NO: 333306 - DNA, 1477 bp, Homo sapiens
actcctctccagcaagccgacaaatgatggcacctgcatagagattggttatgtgaaatactccatctttcagctggttatgcagtatctctactatggtggcccagagtcactgctcattaaaaacaatgagatcatggagcttctgtctgctgctaagtttttccagctggaggctttgcagcgacactgtgagattatctgtgcgaaaagcatcaataccgacaactgtgtggatatttacaaccatgccaagtttcttggagtcacagagctctcagcatattgcgaaggctactttctcaaaaacatgatggtcctcattgaaaacgaagcattcaagcagctcctgtatgacaaaaatggtgaagggaccggccaggatgtgctccaggacttacagaggacgttggccatcagaattcagtccatccacttgtcgtcttccaaaggttccgtggtatgaaacgcctagtgcagggaatgcttcccgggaactttccagttctcctgccgcattggctttacacaaacacagacaaattccacctggcacctgtttttggctgggccaaggagctgcctctactgctcccacgtgttcctgttgaaaaacaaaggactttccactggtctgcagatcagatcagctgggtccagagtttaatgggcaactggacaaccaagttaaccccaattgaaagcacccctaggaccattgaacacccactgccggggaccactgtccagtgaatggattgaggccttttaaaggtcactcaggttccaggttgacagttggaggacttcaccgtaccaaccctgaagagattgtattacacattaaggaccttggtagctgtgcttcagcaaacgtcaaccatggtagcaaattggtgaggctgtgaccaataatgaggaaataatctggcaaatttttaggggtgggaacttttttaaatgttcatttaaaaaaaaacaaaaacagggcagtcttgtagtttaaaatatatttctaaaagcttaacagttcgttttcaactaaattgtgtttagggatctgtgtttgagatttttctttatttcttttttttttttaaatagtaagtcacaggtccacactgtgtaaacatgcatctgataagatactgctgatattctaaacaagttgaaataatcttgccttagtgatcatgattacacaaaagaggtgcactgccaataagtatctctaattcaatagttgaaagcaacctgcatgctaatcgtggtttcggggtgagaataaaacacccccacataacatgcatttgcatgggcccgaacctgtgaaatgttacgtttgtgcttcatttttgccaaggtaaaaatgttccatcatttctagctaaaactccatttggtgaaaccaacatatccatttcttttcctagttacggatgatttggggatgcttttgcagaaatgtgttcataga

SEQ ID NO: 333307 - DNA, 1249 bp, Homo sapiens
tctagaaatgacaccattaatacaggcaagactgaagttatgtcaaagggaagattactatgtgtagaccaggaaaacaaagtagttgtgcaggctgtgatctctatcaaatattgaggactgtgtgtttgataaagctcaggttaaattcatcatataaattgacattatgtgcctgagtttggtcaataagattaaatacattttatgagaaagctttaaggtacttaattattttgttaatgcttacagtatttctaataccagatagtcttaagtatctatcatagatagatattcagccaaaatgaagtaggattatataaattagttgatgaaattctgtagttattaaggggaaaatcagagatggaaattaagttgcaattatttgggttagatccacatggcctctattaaaggtgatttacatgtaaaaataagtctaggcaacacagcatgacctggtctcaaaacaaataaacaacaaccataggcaggtatggtggcacacacctgtagtcccagctacttgggagcttgaggcgggaggattgattgagctcaggagttcaaggctggagtgagctatgatcacacaattgatctccagcctgggcagcacagtgagaccctgtctctgaaaatgaaaataaataaataaataaatctttttagagtactttgaaatttgtcgttttattgcataatataaagagattttgtacttttaatcagttcatggtgttataattgaaatgtcactgttacgcagtcataaggtaaacatttagcacttttcctttatatttacccaaaagtgaaaaccagttcttgtttacttctcaaaaaaatgaaaaagaatactttatttgtaatatctttgtagtctcattcacagaattcctaatcccccgcaacccggaggctgtaaaaatgaggataaggggttagaaatttccaagaagtgactgttgttaagatagacattgaaggacagcaaaataagagtagaattaggtatcataaagagcatagtctttgaatccaaggttcagtttaccccgaatctagatgttggatacttcaagagtagaaaattgttctatcacatcttaaaaaactgttgttttaatggtaactattgatttgacccactttaaatgggatatattatatttgcatatagaagatgaagctctagtagcttcaacgtaaaaaaaaaaaatctttgaaatgtatgctcact

SEQ ID NO: 333308 - DNA, 93 bp, Homo sapiens
ggctatgactttatctactaccatggttcttaatactgacatcacactcaactgggaactccagaacacatccattgctacaggtagaagact

SEQ ID NO: 333309 - DNA, 425 bp, Homo sapiens
gggtcccataatgtttgcggggaaggatactttgtcatcagaatagcatccctgtgtccctgttttatgcatcaagattaagtgaaatcattcatgcaaagtggtttgcacggtgccgaacacaaaagaacattcgaatgcacccggggatgatttttttccccaaggtgggactcacctacacaggaagacagagcttcacaaaagcgaagccccagacctcaaagtctctcatgtttctctaccaaaggacccaccaacaaacagttgctgtgaaagttgccccaagctaagcgagttccttggcggtgtgctttgtttcaaaacatgccatcccaaagatctccagactgcttaggtttttaaaccaacatttgtcattttgctgcacttgtctttactcaaaacctcaaagacctaaagtg

SEQ ID NO: 333310 - DNA, 377 bp, Homo sapiens
tctcccctttttctccccttttggtaccgttttcttttttgcatattttactgttgaatttaaatatatctttctacttcattgttagcttaccactcagataatttcccaacagaaaagggtgtttttgtcttcctttgtactttttactttctgcttttaacttgggtaacttttgcatatccactgtctatggcccccactttaagagttttgtaatatcgtttggtttggtgatttgtgtgtggtgttgatcttcctactttctgtgtcttaacacaccccttagatgccgtggggtcgtcgtctttttttgtggggtggactaggtggctcattccctaaaagttctccgaaacattgtgacctaatatcct

SEQ ID NO: 333311 - DNA, 513 bp, Homo sapiens
cccaccacagtgccccaccaaagtgtgcagacttacacacacatacatatgaactgaacacacagtgatggtaaactgggcccttagaggaattagaccaggcccttggcagaattctggcccatcaccttatgtctctggtctcagttacctcatctgtataataggagtaacgctgcttcacaaacgttattcagtgtcaccacgctgaaatggaatcaaaggtattattatcttgaaagagcatggaaaagagtagtcatgcaggtagtccaggaacacagcttaatctggaagggctatttctgtgatcctgggaggtgggcaggcatggcatgagaggcttggctgtcacttcctccccttctgtcctcttccctcttccctctttctcctccctctcttccttctacgttattaaacacctgtgtgtgccagaatataaagacaaatacatcactacatcagcagaagctctcaatcaggtggggaacgtggagatgcacgctgatg

SEQ ID NO: 333312 - DNA, 402 bp, Homo sapiens
aatagaacaccattcagcaatttcattgggattggaaccacctttttctgtttaaacagactgcctgatcttctgcttttccccttgcattttaaagctgcagtctctgtcacatgccgttgagaatgctactctgacttatccttggtctcaaatttcacacctgttagggtaatttgcatttttgacagaccgatgcctcagatagatatctgtatttagatcatgccctaatcaaattttagccaaaatgtgtgagagacaaatatttctactgttacaactttaaacttaagtataataattttctagttctttactaagactcattttcattagcatcatgtttctatcctcaaaattatagtaatagatgctaagcatagatactgattacaaagg

SEQ ID NO: 333313 - DNA, 388 bp, Homo sapiens
agttccaaagagcagtaagtaagcagtaagtgaattagcttagtccctaagcaggacagcaggacatctcacgttttactcagccctcccttaagaacttccctttggcaggtggaattgggatcaccctgagggtttaggattgacatgacaatgggaaatgatgagggctgaagggcaattgagtgccacaaagccaccttgaagccactgagcagtgtctgaggaactgatttcattctgcctctgcctctgaagattttgtgttattgattctaacaaagcacttctcaggtgactcccagactgctggagtagtttgaaagaatagaacccttgagtaaattgtaggccccaggcttcctgcaagaaccaagcgctgaaagaa

SEQ ID NO: 333314 - DNA, 453 bp, Homo sapiens
tcttacctataaaacagaaacacgtttttagcaaggaatgaaatagactgcatggcacaacctaagtggatcttccctctgacaaaagtcattgtactctggttcaggctactagatctagtgaaagcagcagttcaatttaattcaatagataatttatttagcacctactcttggcaaggaaaagttctacacactgcagagatgcagcgatgaactagttcagaatttactggctgtgtacctactgtcggcccacatttcagtgaagaaggtagagatgtgaaaagtctttctagtctaaggcctgactattctctgtcccaaatgcagaatgcagaagatgctaagaaggccaaaagtggctctgtccagctgggaggtcaggctgggctccattgaaggaggaagcatttcaattgcggagtgaggtctccgtatttgggaggcaag

SEQ ID NO: 333315 - DNA, 298 bp, Homo sapiens
aaagccatagtgctcactagcatatttagaaaaatcagaaactaaggttgtatcaagaaccctaccattataacaatatgaaaaaatccatccaaaagaagagtttttagtacttgttcaaatatttgtttaattaattgttgctctcaactgattttggcattctttcagaattggctagtttggttggacagtcagagtctaagttttcatgctcaattcaggagctgatctcagtaattttgatatacttttcttctttaggcagcacagatgaccttaataattatgtttgaag

SEQ ID NO: 333316 - DNA, 457 bp, Homo sapiens
ttttttttttctgagattggttggggtgggggtggggtggtctcactatgttgcccaggctggtcttgaactcctgggctcaagcaatcctcctgccttggcctcccaaaatgctagaattataggcatgagccactgcatccggcccatttggctttaaatatctttcacaaactgttctcatcttacttctccagctaggtcccacagagtcccctgtcctggcaggcaggtcaacgtcggcaacatgctccctcagtgccctggatgaagttgtctctacctcagtggcgctttctcttttctgtttctacatatccttcaggttcaagtcctgattccgacttcaggcctgtcccaacaacctacagtctgcacagacctttttcagatgcagaatgcaggagcaactgctgagctcctagtgttttgctgatgaaaggaccaggtgatttca

SEQ ID NO: 333317 - DNA, 179 bp, Homo sapiens
aggcattctgagtcgatagcagatccccattgtcctgtcatcctccaggtgaggttctgtgtcttacagattaagaacatgaccctaaatcagcagcagatgtttaaaataacacagaaacaaacctcgtatattctatattttccctagccgcttcagaatttgctatgaaatttaag

SEQ ID NO: 333318 - DNA, 645 bp, Homo sapiens
tcgcgacgtgttatccccccagggattccctgggggtaactgagaagtaggtccctaggaaggacttcagttctgtctgtggacaattgggacaaaagggttaagggaaaatcaatgttgttctttggctattaagacaaatcttggaaggttcctagaaacggaggattgttagctgataaattcattcgaacttagaatgaaggaaggaatgaaatggcctcatttgtaatgtactctttttggttagtttgattgttttttacatttataagcctgtttgggtactctgattacttgttagaagactcgtaaggttaaacaatccacattattacagattgtctgatttttacgaccagacaagaagattgaagctctaagtgcctgaaaacccttttctacagagtagttgtttacacttcccttctgagaaccatatgaaaacaaggaccttatttgtctgttcaccactgtacccctagtctagtactctgtgtgtgtgtgtgtgtattacatatttaagtgagggaactttcattcacatgactagaatcaaaacaaaaataacctgcttttatctaaaaggggcagtaaaaactagaggatacctaattatacttctgttcaaatatgaatttaatg

SEQ ID NO: 333319 - DNA, 324 bp, Homo sapiens
ctatctaggctttcccgtcccccatgaaaattgcctttctgacccagcaggccctcaaagcttctaagagtttcggtggaacactgatttctgacacgtgatgtcagcagggaaggggacagcaacagaggtggaggaggtggggagggacagtcactgtcactacagcattcagcagagtcaagggacatggagaatatgaggacactctacccagtactgggaacctaaagacacaaccaggtcaacatccatggttttagaggcagcttggtaacttttcctccacagtggacagagggctctcagggagaggcgtgaagg

SEQ ID NO: 333320 - DNA, 108 bp, Homo sapiens
taaacagttaacagaacaccacacagtaatcagaataaaagaggggccttctttgtaaagaatggtgctctgggccgggcccagtggctcacacctgtaatcccagca

SEQ ID NO: 333321 - DNA, 130 bp, Homo sapiens
ggcccacgccctggaaccttccggagcagctggcagaacccgggctgcggtgctgagactcagacgctggtttccggctcctaactcccgtgctgcttgttagctttctgttacgacgttggctgtgtcg

SEQ ID NO: 333322 - DNA, 359 bp, Homo sapiens
cggaagcacactgcaacagcctaaagatatggtaatagatatatttcagaatagcaagtggtggtatatcttatccatatctttaggctgctgcagaattttaaggttatagataaagctgtgatattttatgcaaagactggctctaggtatttgaggagcacaatacagagattttaaaaagtgattttgtaaaatctacactatggtctctgtttctccaaagtaagtgtttgtgatttgttcctcatactgcagtgagtaaaaaagaaacaagaaaacaacaacataaatattaaagtacgtttcaatgttgggtgaattttgtttttagatgccaataaaacttatttgtttga

SEQ ID NO: 333323 - DNA, 474 bp, Homo sapiens
caagacaccgcattctctcaaaattctgggttaagataattgttttgatagacctttggagcatgtaaaacctatggttagcaggaaatttcaatctcctcaaactgattttaaaaccatacttcatttttttcctcttttagttctataaacatgtggtacagagtgttgagaagtttattcagaaagtaagtatataattttccatacatgtgctgtaattgtagattaatgcctgtactcttctcctttaaatcaaatacccaagtttaaattgttttgatggactgttaaaaagtgattccagttattttattttccaattaagaaataaaataaaagtgcctttcagataattttacttaggtttgtattctgcctatgttcatgtgcctaaatgtaagcagagccagtttgaggatcggtgtcatgtgtattaaggattcagagattgcgtgtttgcagtcctgttta

SEQ ID NO: 333324 - DNA, 542 bp, Homo sapiens
  misc_feature (498)..(498): n is a, c, g, or t
gtattggattaatactctcctagttggtcttcctttgttgtattttgtgataaaaaattgagtacggttagttcctcttacatcagccagccattgagatacatatctattgtatctcttctaagtgttttctttagatgaaatattttagtgtctttcctttgtgtctcatgtttcatggttttttgaactccatagtatcctaatcagattaatctgggcagaaatctagagtggcacctacggttgtggatatatcttaaagatgtgccaaggtagatgaaggatttagatgtgaaataaatgaatacaaagaagaaaatgaaaagttgcacctatccaaaggaaatcaatttcaactattttgtttagagtgggaaactgtgaaaagctcagaacctgttaaagagacggtccagacaactcagagcccaactccagttgaaaaggagacagtggtcacaacccaggcagaggttgcggtgagccaagattgtnccattgcactccagcctgggcaacaagagcgaaacttccgtttc

SEQ ID NO: 333325 - DNA, 294 bp, Homo sapiens
ggtccagtcgccagggggcgcgctagccggcgccgcggatccccgaactgcgcggcccgactcgagtccgccatattggatgccgcagccgctgctgccagcgcttcctcctctgtcttcgccgagcggggctggttcctgcggcccgagcggcggggaggtgaaacaggagcccgtcggaggaaggggcagaagggagtggagagtgtaggggaaggggctagagggagggggaccgaaacggagcggggcagagaagagaaggcgccgcggcccagcccctcccccgcccgc

SEQ ID NO: 333326 - DNA, 4635 bp, Homo sapiens
ccctttggtggtgaaagattgaataggatatcaaaacaaggaatgaagaatgagagcaaaaattttgaagattaacttgtctatttcaaaatttaaatggaagagagaaagggaattacttcttgctcaatttctggtatcctgttttgggaggacagaattcaggcaaattctattatactatgcttgatcagtatcactgtttatgggtctatttttaaaggaaaatacattccaggaccttaacaacacgtatttattaatttttggaatttcactcactgataaggtttcataaccaaccaagacaaaactgatgtttatggtagggtaagcttgaataaagggatttaagaacaaagttcaaaacttctaacttttggtagatattcagaagctaagatgtgtgtgtgtgtgtgtgtgtgtgtgtgtgtgtgtgtgtgtgtgtgtgtgtttaatgtacctaattctgtaaaggattttaagtgattttttcaaagtggacacaataaaataaaaacaatatgcgtgcatgtgttttataaaagtaataaaacaagttattctgctttttctagtcttagttacttacttacatatttatttggggggtgtgatgttctttttaaaaggaactcctgtgacacctgttactccggccaatgtggtccaaggcttacctgatccgtgggtatctcagataacaaatacagatacacttgcggctgtagctcagatcttgcaaagtcctcaaggccagcagcttcaacaattaatacaaaccttacagatacaacaacagaagccccagccttccattctgcaggccctagatgctggtcttgttgttcagttgcaagctcttacggcacaacttacagctgcagctgcagctgccaacactcttactcccttagaacagggagtctcctttaacaagaagttgatggataggtttgattttggggaagactctgagcatagtgaagaacccaaaaaggaaattccagcttcacaactttctcacgtttcagaatctgtgaacaattccatttttcatcagatagcagaacaactacaacagcaaaacctagaacatctcagacagcagctcttggagcagcaacagcctcaaaaggccactcctcaggatagtcaggaaggaacctttgggtcagagcattcagcgtcaccatcacaagggagtagtcagcagcattttcttgaacctgaagtcaatttggatgattccatagatattcagcaacaggatatggatatagatgaagggcaagatggagtggaagaggaggtctttgaacaagaagctaagaaagtggcggttcgctcaagatcaagaacacattcacgatctcgttcaagatcaccaagaaaacgaaggtctaggtcacggtctggctctagaaagcgtaaacacagaaagcgatcacgctcccgctcaagagaaagaaagaggaaatcatcacggtcgtattcaagtgaaaggagagccagagaaagggagaaagaacgacagaaaaagggattacctccaattagatctaaaacactaagtgtatgtagtactactctctgggttgggcaagtggacaagaaggcaacacagcaagacttaaccaacctgtttgaagagtttggacagattgaatccattaatatgattcctccccggggctgtgcttatgtctgcatggttcatcgacaagatgcatttcgagctcttcagaaactcagttctggatcatataaaattgggtccaaggtcattaagatcgcttgggctttaaacaaaggtgtaaaaacagaatacaaacaattctgggatgtggatcttggagttacatatataccatgggaaaaagttaaagtggatgacttggaaggttttgcagaaggaggcatgattgatcaggagactgtaaatactgagtgggaaactgtgaaaagctcagaacctgttaaagagacggtccagacaactcagagcccaactccagttgaaaaggagacagtggtcacaacccaggcagaggttttccctcctcctgttgctatgttgcagattccagtggcgccagccgtgcctacagttagtttagtcccaccagcatttcctgtgtcgatgccggttcctcctcctggattcagtccaatccctccacctccttttttaagagcaagttttaacccttcacaaccaccacctggtttcatgccgcctccagttcccccacctgttgtgccaccccctacgattccaccagtagtaccaacatctttagtgcagccgtcattatccatgacaccggaaactgtgaaagatgttggatttggtagccttgttataccaggcggttctgttgccagcaatcttgctacttccgctctgccagctggaaatgtttttaatgctccaactaaacaggcagagcctgaagaaaaagtacctcatcttatagaccaccagatttcttctggtgaaaacaccagatcagtgattccaaatgatatttcaagtaatgctgcaattttaggaggacagccgccaaatgtgacaagcaattctggaattctgggagtccaaagaccaaatgtatcaagtaattctgaaattcttggggtccggccatctaatgtttccagtagttctgggattattgcagcccaaccaccaaatattctaaataactctggaatattgggaatacagccacccagtgtgtcaaatagttctggacttttgggagtgctacccccaaatatacctaacaattctggacttgtaggagtacagccaccaaatgttccaaatactcctggacttctgggaacacagccaccagctggacctcaaaacttaccccctttaagtatccctaatcaaaggatgcccacaatgccaatgttagacattcgtccgggactaataccacaggcacctgggccaagattccctttaatacagcctggaattccaccccaacggggaatcccacccccatcggtacttgattcagctcttcatccaccaccccgtggaccttttcctccaggagatatttttagtcaaccagaaagaccttttttagctcctggaagacaaagcgtagacaatgttactaacccagaaaaaaggataccacttgggaatgataacattcaacaggaaggagatagagattaccggtttcctcctatagaaaccagggaaagcattagtagacctccccctgtggatgttagagatgtggttgggcggcctatagatccaagagaaggtcctggacggcctccactagatggtagggatcattttggaagacctcctgtagatataagagagaatcttgtgaggccaggtatagatcatcttggtcgaagagaccactttggctttaatccagagaagccctgggggcatagaggagattttgatgagagagagcatcgggttctaccggtctatggtggtccaaaaggcttacatgaagaaagaggtagatttcggtctggaaactatcgatttgatcctagaagtggtccttggaaccgaggatttggacaagaagttcacagagattttgatgaccgcagaagaccctgggagaggcaaagggatagggatgacagagattttgatttctgcagagaaatgaatggaaatcgtcttggacgagacagaattcaaaacacttgggttccccctcctcatgctcgggtttttgattattttgaaggggccacttctcaacgaaaaggtgataatgtgcctcaggttaatggtgaaaatacagagagacatgctcagccaccacctataccagtacagaatgatcctgaactttatgaaaaactgacatcttcaaatgaaataaacaaggagaagagtgacacagttgctgatatagaaagtgaaccagtggtagaaagcacagaaactgaggggacataatcatcactcagtaggtaaaagataccttttgtaaagttgtcatctctctgtaatagataatggctgactggaccatagttgttcacttttgtctgccagaattaagttaatctgatgttcatgttcacctttctcttaaaataattgtacaactgacttgtatagacattgttcttaatatgaacatggtaggtaaactttttttttatttttttctgataaaatacaaatgttggccccagattcttttaacgtcaaggaaatgaataacagcttgtcagagacttcctatggaagaaagaattttttagatactatcattaggttggatatggtaatagatatatttcagaatagcaagtggtggtatatcttatccatatctttaggctgctgcagaattttaaggttatagataaagctgtgatattttatgcaaagactggctctaggtatttgaggagcacaatacagagattttaaaaagtgattttgtaaaatctacactatggtctctgtttctccaaagtaagtgtttgtgatttgttcctcatactgcagtgagtaaaaaagaaacaagaaaacaacaacataaatattaaagtacgtttcaatgttgggtgaattttgtttttagatgccaataaaacttatttgtttga

SEQ ID NO: 333327 - DNA, 5228 bp, Homo sapiens
ggtccagtcgccagggggcgcgctagccggcgccgcggatccccgaactgcgcggcccgactcgagtccgccatattggatgccgcagccgctgctgccagcgcttcctcctctgtcttcgccgagcggggctggttcctgcggcccgagcggcggggagcgccccctcctcgcggccacgcagcagcccgcgtctcgctctccccacccagtgcagtggccgccgcctcttccgccgccgggctcggggcctccgcagcgacaacatggaggccgtgaagaccttcaatagcgagttgtattccctgaatgactataaaccacccatttcgaaagcgaaaatgacccaaattactaaggcagccatcaaagctattaagttctataaacatgtggtacagagtgttgagaagtttattcagaaatgtaaaccagaatacaaagtacctggactttatgttattgactccattgtgcgacaatcccgacatcagtttggtcaagaaaaggatgtgtttgcacccagatttagtaataacatcattagcactttccagaatttatatcgttgccctggggatgacaagagtaaaatagtgagagtactaaacttatggcagaagaataatgtatttaagagtgagattattcagccccttttggatatggcagccgggattccgcctccagttgtcacacctgttttggccagcactaccactgctatgagcaatactccaggaactcctgtgacacctgttactccggccaatgtggtccaaggcttacctgatccgtgggtatctcagataacaaatacagatacacttgcggctgtagctcagatcttgcaaagtcctcaaggccagcagcttcaacaattaatacaaaccttacagatacaacaacagaagccccagccttccattctgcaggccctagatgctggtcttgttgttcagttgcaagctcttacggcacaacttacagctgcagctgcagctgccaacactcttactcccttagaacagggagtctcctttaacaagaagttgatggataggtttgattttggggaagactctgagcatagtgaagaacccaaaaaggaaattccagcttcacaactttctcacgtttcagaatctgtgaacaattccatttttcatcagatagcagaacaactacaacagcaaaacctagaacatctcagacagcagctcttggagcagcaacagcctcaaaaggccactcctcaggatagtcaggaaggaacctttgggtcagagcattcagcgtcaccatcacaagggagtagtcagcagcattttcttgaacctgaagtcaatttggatgattccatagatattcagcaacaggtaaaagtaaatgtttttctgggtcataaatttctaaaagtagctaaagaaatcataaaatattttatactagcagtgccctgaatatatttttcccacacttaagctccactttgtaattgtttcacctattaggccaagcttgtccaaggcctaagcatggcccctaggccaagcacatggcccagaactgctttgaatgcagcccaacacaaatttgtaaactttcttaaaacaatatgagatttgtttttgcgatttttttttttttttaagcttatcagctgtcattagtgttagtatattttacgtgtggccaaagacattacttcttctaatggggcccagggaagccaaaagattggacacccctgtattaggcattaatgctcccatcgtcaatatttttaaaaacagaattgtcaatgtataactctgtctcaaccagcctttctgtttgtttgctgttcttttgactttcaaggatatggatatagatgaagggcaagatggagtggaagaggaggtctttgaacaagaagctaagaaagtggcggttcgctcaagatcaagaacacattcacgatctcgttcaagatcaccaagaaaacgaaggtctaggtcacggtctggctctagaaagcgtaaacacagaaagcgatcacgctcccgctcaagagaaagaaagaggaaatcatcacggtcgtattcaagtgaaaggagagccagagaaagggagaaagaacgacagaaaaagggattacctccaattagatctaaaacactaagtgtatgtagtactactctctgggttgggcaagtggacaagaaggcaacacagcaagacttaaccaacctgtttgaagagtttggacagattgaatccattaatatgattcctccccggggctgtgcttatgtctgcatggttcatcgacaagatgcatttcgagctcttcagaaactcagttctggatcatataaaattgggtccaaggtcattaagatcgcttgggctttaaacaaaggtgtaaaaacagaatacaaacaattctgggatgtggatcttggagttacatatataccatgggaaaaagttaaagtggatgacttggaaggttttgcagaaggaggcatgattgatcaggagactgtaaatactgagtgggaaactgtgaaaagctcagaacctgttaaagagacggtccagacaactcagagcccaactccagttgaaaaggagacagtggtcacaacccaggcagaggttttccctcctcctgttgctatgttgcagattccagtggcgccagccgtgcctacagttagtttagtcccaccagcatttcctgtgtcgatgccggttcctcctcctggattcagtccaatccctccacctccttttttaagagcaagttttaacccttcacaaccaccacctggtttcatgccgcctccagttcccccacctgttgtgccaccccctacgattccaccagtagtaccaacatctttagtgcagccgtcattatccatgacaccggaaactgtgaaagatgttggatttggtagccttgttataccaggcggttctgttgccagcaatcttgctacttccgctctgccagctggaaatgtttttaatgctccaactaaacaggcagagcctgaagaaaaagtacctcatcttatagaccaccagatttcttctggtgaaaacaccagatcagtgattccaaatgatatttcaagtaatgctgcaattttaggaggacagccgccaaatgtgacaagcaattctggaattctgggagtccaaagaccaaatgtatcaagtaattctgaaattcttggggtccggccatctaatgtttccagtagttctgggattattgcagcccaaccaccaaatattctaaataactctggaatattgggaatacagccacccagtgtgtcaaatagttctggacttttgggagtgctacccccaaatatacctaacaattctggacttgtaggagtacagccaccaaatgttccaaatactcctggacttctgggaacacagccaccagctggacctcaaaacttaccccctttaagtatccctaatcaaaggatgcccacaatgccaatgttagacattcgtccgggactaataccacaggcacctgggccaagattccctttaatacagcctggaattccaccccaacggggaatcccacccccatcggtacttgattcagctcttcatccaccaccccgtggaccttttcctccaggagatatttttagtcaaccagaaagaccttttttagctcctggaagacaaagcgtagacaatgttactaacccagaaaaaaggataccacttgggaatgataacattcaacaggaaggagatagagattaccggtttcctcctatagaaaccagggaaagcattagtagacctccccctgtggatgttagagatgtggttgggcggcctatagatccaagagaaggtcctggacggcctccactagatggtagggatcattttggaagacctcctgtagatataagagagaatcttgtgaggccaggtatagatcatcttggtcgaagagaccactttggctttaatccagagaagccctgggggcatagaggagattttgatgagagagagcatcgggttctaccggtctatggtggtccaaaaggcttacatgaagaaagaggtagatttcggtctggaaactatcgatttgatcctagaagtggtccttggaaccgaggatttggacaagaagttcacagagattttgatgaccgcagaagaccctgggagaggcaaagggatagggatgacagagattttgatttctgcagagaaatgaatggaaatcgtcttggacgagacagaattcaaaacacttgggttccccctcctcatgctcgggtttttgattattttgaaggggccacttctcaacgaaaaggtgataatgtgcctcaggttaatggtgaaaatacagagagacatgctcagccaccacctataccagtacagaatgatcctgaactttatgaaaaactgacatcttcaaatgaaataaacaaggagaagagtgacacagttgctgatatagaaagtgaaccagtggtagaaagcacagaaactgaggggacataatcatcactcagtaggtaaaagataccttttgtaaagttgtcatctctctgtaatagataatggctgactggaccatagttgttcacttttgtctgccagaattaagttaatctgatgttcatgttcacctttctcttaaaataattgtacaactgacttgtatagacattgttcttaatatgaacatggtaggtaaactttttttttatttttttctgataaaatacaaatgttggccccagattcttttaacgtcaaggaaatgaataacagcttgtcagagacttcctatggaagaaagaattttttagatactatcattaggttggatatggtaatagatatatttcagaatagcaagtggtggtatatcttatccatatctttaggctgctgcagaattttaaggttatagataaagctgtgatattttatgcaaagactggctctaggtatttgaggagcacaatacagagattttaaaaagtgattttgtaaaatctacactatggtctctgtttctccaaagtaagtgtttgtgatttgttcctcatactgcagtgagtaaaaaagaaacaagaaaacaacaacataaatattaaagtacgtttcaatgttgggtgaattttgtttttagatgccaataaaacttatttgtttga

SEQ ID NO: 333328 - DNA, 3058 bp, Homo sapiens
gtattggattaatactctcctagttggtcttcctttgttgtattttgtgataaaaaattgagtacggttagttcctcttacatcagccagccattgagatacatatctattgtatctcttctaagtgttttctttagatgaaatattttagtgtctttcctttgtgtctcatgtttcatggttttttgaactccatagtatcctaatcagattaatctgggcagaaatctagagtggcacctacggttgtggatatatcttaaagatgtgccaaggtagatgaaggatttagatgtgaaataaatgaatacaaagaagaaaatgaaaagttgcacctatccaaaggaaatcaatttcaactattttgtttagagtgggaaactgtgaaaagctcagaacctgttaaagagacggtccagacaactcagagcccaactccagttgaaaaggagacagtggtcacaacccaggcagaggttttccctcctcctgttgctatgttgcagattccagtggcgccagccgtgcctacagttagtttagtcccaccagcatttcctgtgtcgatgccggttcctcctcctggattcagtccaatccctccacctccttttttaagagcaagttttaacccttcacaaccaccacctggtttcatgccgcctccagttcccccacctgttgtgccaccccctacgattccaccagtagtaccaacatctttagtgcagccgtcattatccatgacaccggaaactgtgaaagatgttggatttggtagccttgttataccaggcggttctgttgccagcaatcttgctacttccgctctgccagctggaaatgtttttaatgctccaactaaacaggcagagcctgaagaaaaagtacctcatcttatagaccaccagatttcttctggtgaaaacaccagatcagtgattccaaatgatatttcaagtaatgctgcaattttaggaggacagccgccaaatgtgacaagcaattctggaattctgggagtccaaagaccaaatgtatcaagtaattctgaaattcttggggtccggccatctaatgtttccagtagttctgggattattgcagcccaaccaccaaatattctaaataactctggaatattgggaatacagccacccagtgtgtcaaatagttctggacttttgggagtgctacccccaaatatacctaacaattctggacttgtaggagtacagccaccaaatgttccaaatactcctggacttctgggaacacagccaccagctggacctcaaaacttaccccctttaagtatccctaatcaaaggatgcccacaatgccaatgttagacattcgtccgggactaataccacaggcacctgggccaagattccctttaatacagcctggaattccaccccaacggggaatcccacccccatcggtacttgattcagctcttcatccaccaccccgtggaccttttcctccaggagatatttttagtcaaccagaaagaccttttttagctcctggaagacaaagcgtagacaatgttactaacccagaaaaaaggataccacttgggaatgataacattcaacaggaaggagatagagattaccggtttcctcctatagaaaccagggaaagcattagtagacctccccctgtggatgttagagatgtggttgggcggcctatagatccaagagaaggtcctggacggcctccactagatggtagggatcattttggaagacctcctgtagatataagagagaatcttgtgaggccaggtatagatcatcttggtcgaagagaccactttggctttaatccagagaagccctgggggcatagaggagattttgatgagagagagcatcgggttctaccggtctatggtggtccaaaaggcttacatgaagaaagaggtagatttcggtctggaaactatcgatttgatcctagaagtggtccttggaaccgaggatttggacaagaagttcacagagattttgatgaccgcagaagaccctgggagaggcaaagggatagggatgacagagattttgatttctgcagagaaatgaatggaaatcgtcttggacgagacagaattcaaaacacttgggttccccctcctcatgctcgggtttttgattattttgaaggggccacttctcaacgaaaaggtgataatgtgcctcaggttaatggtgaaaatacagagagacatgctcagccaccacctataccagtacagaatgatcctgaactttatgaaaaactgacatcttcaaatgaaataaacaaggagaagagtgacacagttgctgatatagaaagtgaaccagtggtagaaagcacagaaactgaggggacataatcatcactcagtaggtaaaagataccttttgtaaagttgtcatctctctgtaatagataatggctgactggaccatagttgttcacttttgtctgccagaattaagttaatctgatgttcatgttcacctttctcttaaaataattgtacaactgacttgtatagacattgttcttaatatgaacatggtaggtaaactttttttttatttttttctgataaaatacaaatgttggccccagattcttttaacgtcaaggaaatgaataacagcttgtcagagacttcctatggaagaaagaattttttagatactatcattaggttggatatggtaatagatatatttcagaatagcaagtggtggtatatcttatccatatctttaggctgctgcagaattttaaggttatagataaagctgtgatattttatgcaaagactggctctaggtatttgaggagcacaatacagagattttaaaaagtgattttgtaaaatctacactatggtctctgtttctccaaagtaagtgtttgtgatttgttcctcatactgcagtgagtaaaaaagaaacaagaaaacaacaacataaatattaaagtacgtttcaatgttgggtgaattttgtttttagatgccaataaaacttatttgtttga

SEQ ID NO: 333329 - DNA, 5111 bp, Homo sapiens
ggtccagtcgccagggggcgcgctagccggcgccgcggatccccgaactgcgcggcccgactcgagtccgccatattggatgccgcagccgctgctgccagcgcttcctcctctgtcttcgccgagcggggctggttcctgcggcccgagcggcggggagcgccccctcctcgcggccacgcagcagcccgcgtctcgctctccccacccagtgcagtggccgccgcctcttccgccgccgggctcggggcctccgcagcgacaacatggaggccgtgaagaccttcaatagcgagttgtattccctgaatgactataaaccacccatttcgaaagcgaaaatgacccaaattactaaggcagccatcaaagctattaagttctataaacatgtggtacagagtgttgagaagtttattcagaaatgtaaaccagaatacaaagtacctggactttatgttattgactccattgtgcgacaatcccgacatcagtttggtcaagaaaaggatgtgtttgcacccagatttagtaataacatcattagcactttccagaatttatatcgttgccctggggatgacaagagtaaaatagtgagagtactaaacttatggcagaagaataatgtatttaagagtgagattattcagccccttttggatatggcagccgggattccgcctccagttgtcacacctgttttggccagcactaccactgctatgagcaatactccaggaactcctgtgacacctgttactccggccaatgtggtccaaggcttacctgatccgtgggtatctcagataacaaatacagatacacttgcggctgtagctcagatcttgcaaagtcctcaaggccagcagcttcaacaattaatacaaaccttacagatacaacaacagaagccccagccttccattctgcaggccctagatgctggtcttgttgttcagttgcaagctcttacggcacaacttacagctgcagctgcagctgccaacactcttactcccttagaacagggagtctcctttaacaagaagttgatggataggtttgattttggggaagactctgagcatagtgaagaacccaaaaaggaaattccagcttcacaactttctcacgtttcagaatctgtgaacaattccatttttcatcagatagcagaacaactacaacagcaaaacctagaacatctcagacagcagctcttggagcagcaacagcctcaaaaggccactcctcaggatagtcaggaaggaacctttgggtcagagcattcagcgtcaccatcacaagggagtagtcagcagcattttcttgaacctgaagtcaatttggatgattccatagatattcagcaacaggatatggatatagatgaagggcaagatggagtggaagaggaggtctttgaacaagaagctaagaaagtggcggttcgctcaagatcaagaacacattcacgatctcgttcaagatcaccaagaaaacgaaggtctaggtcacggtctggctctagaaagcgtaaacacagaaagcgatcacgctcccgctcaagagaaagaaagaggaaatcatcacggtcgtattcaagtgaaaggagagccagagaaagggagaaagaacgacagaaaaagggattacctccaattagatctaaaacactaagtgtatgtagtactactctctgggttgggcaagtggacaagaaggcaacacagcaagacttaaccaacctgtttgaagagtttggacagattgaatccattaatatgattcctccccggggctgtgcttatgtctgcatggttcatcgacaagatgcatttcgagctcttcagaaactcagttctggatcatataaaattgggtccaaggtcattaagatcgcttgggctttaaacaaaggtgtaaaaacagaatacaaacaattctgggatgtggatcttggagttacatatataccatgggaaaaagttaaagtggatgacttggaaggttttgcagaaggaggcatgattgatcaggagactgtaaatactgagtgggaaactgtgaaaagctcagaacctgttaaagagacggtccagacaactcagagcccaactccagttgaaaaggagacagtggtcacaacccaggcagaggttttccctcctcctgttgctatgttgcagattccagtggcgccagccgtgcctacagttagtttagtcccaccagcatttcctgtgtcgatgccggttcctcctcctggattcagtccaatccctccacctccttttttaagagcaagttttaacccttcacaaccaccacctggtttcatgccgcctccagttcccccacctgttgtgccaccccctacgattccaccagtagtaccaacatctttagtgcagccgtcattatccatgacaccggaaactgtgaaagatgttggatttggtagccttgttataccaggcggttctgttgccagcaatcttgctacttccgctctgccagctggaaatgtttttaatgctccaactaaacaggcagagcctgaagaaaaagtacctcatcttatagaccaccagatttcttctggtgaaaacaccagatcagtgattccaaatgatatttcaagtaatgctgcaattttaggaggacagccgccaaatgtgacaagcaattctggaattctgggagtccaaagaccaaatgtatcaagtaattctgaaattcttggggtccggccatctaatgtttccagtagttctgggattattgcagcccaaccaccaaatattctaaataactctggaatattgggaatacagccacccagtgtgtcaaatagttctggacttttgggagtgctacccccaaatatacctaacaattctggacttgtaggagtacagccaccaaatgttccaaatactcctggacttctgggaacacagccaccagctggacctcaaaacttaccccctttaagtatccctaatcaaaggatgcccacaatgccaatgttagacattcgtccgggactaataccacaggcacctgggccaagattccctttaatacagcctggaattccaccccaacggggaatcccacccccatcggtacttgattcagctcttcatccaccaccccgtggaccttttcctccaggagatatttttagtcaaccagaaagaccttttttagctcctggaagacaaagcgtagacaatgttactaacccagaaaaaaggataccacttgggaatgataacattcaacaggaaggagatagagattaccggtttcctcctatagaaaccagggaaagcattagtagacctccccctgtggatgttagagatgtggttgggcggcctatagatccaagagaaggtcctggacggcctccactagatggtagggatcattttggaagacctcctgtagatataagagagaatcttgtgaggccaggtatagatcatcttggtcgaagagaccactttggctttaatccagagaagccctgggggcatagaggagattttgatgagagagagcatcgggttctaccggtctatggtggtccaaaaggcttacatgaagaaagaggtagatttcggtctggaaactatcgatttgatcctagaagtggtccttggaaccgaggatttggacaagaagttcacagagattttgatgaccgcagaagaccctgggagaggcaaagggatagggatgacagagattttgatttctgcagagaaatgaatggaaatcgtcttggacgagacagaattcaaaacacttgggttccccctcctcatgctcgggtttttgattattttgaaggggccacttctcaacgaaaaggtgataatgtgcctcaggttaatggtgaaaatacagagagacatgctcagccaccacctataccagtacagaatgatcctgaactttatgaaaaactgacatcttcaaatgaaataaacaaggagaagagtgacacagttgctgatatagaaagtgaaccagtggtagaaagcacagaaactgaggggacataatcatcactcagtaggtaaaagataccttttgtaaagttgtcatctctctgtaatagataatggctgactggaccatagttgttcacttttgtctgccagaattaagttaatctgatgttcatgttcacctttctcttaaaataattgtacaactgacttgtatagacattgttcttaatatgaacatggtaggtaaactttttttttatttttttctgataaaatacaaatgttggccccagattcttttaacgtcaaggaaatgaataacagcttgtcagagacttcctatggaagaaagaattttttagatactatcattaggttggatatggtaatagatatatttcagaatagcaagtggtggtatatcttatccatatctttaggctgctgcagaattttaaggttatagataaagctgtgatattttatgcaaagactggctctaggtatttgaggagcacaatacagagattttaaaaagtgattttgtaaaatctacactatggtctctgtttctccaaagtaagtgtttgtgatttgttcctcatactgcagtgagtaaaaaagaaacaagaaaacaacaacataaatattaaagtacgtttcaatgttgggtgaattttgtttttagatgccaataaaacttatttgtttgataacagtgttctaggaattgtatttttttaacctataaattcttaaaaccttgaattattattagcatgtgcttattttttgcaaaagctttctatcataacaacaatgaactatgtggtggaaaaagcatgtactttgatataaaaatcatgcagcctcctcagtatgtgtataatatctgtgtatgtttattgtggaagtcgtgtagtttttttctgtttctctgtatgtccgtcttcatgcacatacagagaaaatagaaaggtgagaaagtttagataataaaatattcttttaaatctggtagaatattggagaaatctggctaattaacatgggttatagttaaagctcttggtcttgatg

SEQ ID NO: 333330 - DNA, 4501 bp, Homo sapiens
ggtccagtcgccagggggcgcgctagccggcgccgcggatccccgaactgcgcggcccgactcgagtccgccatattggatgccgcagccgctgctgccagcgcttcctcctctgtcttcgccgagcggggctggttcctgcggcccgagcggcggggagcgccccctcctcgcggccacgcagcagcccgcgtctcgctctccccacccagtgcagtggccgccgcctcttccgccgccgggctcggggcctccgcagcgacaacatggaggccgtgaagaccttcaatagcgagttgtattccctgaatgactataaaccacccatttcgaaagcgaaaatgacccaaattactaaggcagccatcaaagctattaagttctataaacatgtggtacagagtgttgagaagtttattcagaaatgtaaaccagaatacaaagtacctggactttatgttattgactccattgtgcgacaatcccgacatcagtttggtcaagaaaaggatgtgtttgcacccagatttagtaataacatcattagcactttccagaatttatatcgttgccctggggatgacaagagtaaaatagtgagagtactaaacttatggcagaagaataatgtatttaagagtgagattattcagccccttttggatatggcagccgggattccgcctccagttgtcacacctgttttggccagcactaccactgctatgagcaatactccaggaactcctgtgacacctgttactccggccaatgtggtccaaggcttacctgatccgtgggtatctcagataacaaatacagatacacttgcggctgtagctcagatcttgcaaagtcctcaaggccagcagcttcaacaattaatacaaaccttacagatacaacaacagaagccccagccttccattctgcaggccctagatgctggtcttgttgttcagttgcaagctcttacggcacaacttacagctgcagctgcagctgccaacactcttactcccttagaacagggagtctcctttaacaagaagttgatggataggtttgattttggggaagactctgagcatagtgaagaacccaaaaaggaaattccagcttcacaactttctcacgtttcagaatctgtgaacaattccatttttcatcagatagcagaacaactacaacagcaaaacctagaacatctcagacagcagctcttggagcagcaacagcctcaaaaggccactcctcaggatagtcaggaaggaacctttgggtcagagcattcagcgtcaccatcacaagggagtagtcagcagcattttcttgaacctgaagtcaatttggatgattccatagatattcagcaacaggatatggatatagatgaagggcaagatggagtggaagaggaggtctttgaacaagaagctaagaaagtggcggttcgctcaagatcaagaacacattcacgatctcgttcaagatcaccaagaaaacgaaggtctaggtcacggtctggctctagaaagcgtaaacacagaaagcgatcacgctcccgctcaagagaaagaaagaggaaatcatcacggtcgtattcaagtgaaaggagagccagagaaagggagaaagaacgacagaaaaagggattacctccaattagatctaaaacactaagtgtatgtagtactactctctgggttgggcaagtggacaagaaggcaacacagcaagacttaaccaacctgtttgaagagtttggacagattgaatccattaatatgattcctccccggggctgtgcttatgtctgcatggttcatcgacaagatgcatttcgagctcttcagaaactcagttctggatcatataaaattgggtccaaggtcattaagatcgcttgggctttaaacaaaggtgtaaaaacagaatacaaacaattctgggatgtggatcttggagttacatatataccatgggaaaaagttaaagtggatgacttggaaggttttgcagaaggaggcatgattgatcaggagactgtaaatactgagtgggaaactgtgaaaagctcagaacctgttaaagagacggtccagacaactcagagcccaactccagttgaaaaggagacagtggtcacaacccaggcagaggttttccctcctcctgttgctatgttgcagattccagtggcgccagccgtgcctacagttagtttagtcccaccagcatttcctgtgtcgatgccggttcctcctcctggattcagtccaatccctccacctccttttttaagagcaagttttaacccttcacaaccaccacctggtttcatgccgcctccagttcccccacctgttgtgccaccccctacgattccaccagtagtaccaacatctttagtgcagccgtcattatccatgacaccggaaactgtgaaagatgttggatttggtagccttgttataccaggcggttctgttgccagcaatcttgctacttccgctctgccagctggaaatgtttttaatgctccaactaaacaggcagagcctgaagaaaaagtacctcatcttatagaccaccagatttcttctggtgaaaacaccagatcagtgattccaaatgatatttcaagtaatgctgcaattttaggaggacagccgccaaatgtgacaagcaattctggaattctgggagtccaaagaccaaatgtatcaagtaattctcaaaacttaccccctttaagtatccctaatcaaaggatgcccacaatgccaatgttagacattcgtccgggactaataccacaggcacctgggccaagattccctttaatacagcctggaattccaccccaacggggaatcccacccccatcggtacttgattcagctcttcatccaccaccccgtggaccttttcctccaggagatatttttagtcaaccagaaagaccttttttagctcctggaagacaaagcgtagacaatgttactaacccagaaaaaaggataccacttgggaatgataacattcaacaggaaggagatagagattaccggtttcctcctatagaaaccagggaaagcattagtagacctccccctgtggatgttagagatgtggttgggcggcctatagatccaagagaaggtcctggacggcctccactagatggtagggatcattttggaagacctcctgtagatataagagagaatcttgtgaggccaggtatagatcatcttggtcgaagagaccactttggctttaatccagagaagccctgggggcatagaggagattttgatgagagagagcatcgggttctaccggtctatggtggtccaaaaggcttacatgaagaaagaggtagatttcggtctggaaactatcgatttgatcctagaagtggtccttggaaccgaggatttggacaagaagttcacagagattttgatgaccgcagaagaccctgggagaggcaaagggatagggatgacagagattttgatttctgcagagaaatgaatggaaatcgtcttggacgagacagaattcaaaacacttgggttccccctcctcatgctcgggtttttgattattttgaaggggccacttctcaacgaaaaggtgataatgtgcctcaggttaatggtgaaaatacagagagacatgctcagccaccacctataccagtacagaatgatcctgaactttatgaaaaactgacatcttcaaatgaaataaacaaggagaagagtgacacagttgctgatatagaaagtgaaccagtggtagaaagcacagaaactgaggggacataatcatcactcagtaggtaaaagataccttttgtaaagttgtcatctctctgtaatagataatggctgactggaccatagttgttcacttttgtctgccagaattaagttaatctgatgttcatgttcacctttctcttaaaataattgtacaactgacttgtatagacattgttcttaatatgaacatggtaggtaaactttttttttatttttttctgataaaatacaaatgttggccccagattcttttaacgtcaaggaaatgaataacagcttgtcagagacttcctatggaagaaagaattttttagatactatcattaggttggatatggtaatagatatatttcagaatagcaagtggtggtatatcttatccatatctttaggctgctgcagaattttaaggttatagataaagctgtgatattttatgcaaagactggctctaggtatttgaggagcacaatacagagattttaaaaagtgattttgtaaaatctacactatggtctctgtttctccaaagtaagtgtttgtgatttgttcctcatactgcagtgagtaaaaaagaaacaagaaaacaacaacataaatattaaagtacgtttcaatgttgggtgaattttgtttttagatgccaataaaacttatttgtttga

SEQ ID NO: 333331 - DNA, 4690 bp, Homo sapiens
ggtccagtcgccagggggcgcgctagccggcgccgcggatccccgaactgcgcggcccgactcgagtccgccatattggatgccgcagccgctgctgccagcgcttcctcctctgtcttcgccgagcggggctggttcctgcggcccgagcggcggggagcgccccctcctcgcggccacgcagcagcccgcgtctcgctctccccacccagtgcagtggccgccgcctcttccgccgccgggctcggggcctccgcagcgacaacatggaggccgtgaagaccttcaatagcgagttgtattccctgaatgactataaaccacccatttcgaaagcgaaaatgacccaaattactaaggcagccatcaaagctattaagttctataaacatgtggtacagagtgttgagaagtttattcagaaatgtaaaccagaatacaaagtacctggactttatgttattgactccattgtgcgacaatcccgacatcagtttggtcaagaaaaggatgtgtttgcacccagatttagtaataacatcattagcactttccagaatttatatcgttgccctggggatgacaagagtaaaatagtgagagtactaaacttatggcagaagaataatgtatttaagagtgagattattcagccccttttggatatggcagccgggattccgcctccagttgtcacacctgttttggccagcactaccactgctatgagcaatactccaggaactcctgtgacacctgttactccggccaatgtggtccaaggcttacctgatccgtgggtatctcagataacaaatacagatacacttgcggctgtagctcagatcttgcaaagtcctcaaggccagcagcttcaacaattaatacaaaccttacagatacaacaacagaagccccagccttccattctgcaggccctagatgctggtcttgttgttcagttgcaagctcttacggcacaacttacagctgcagctgcagctgccaacactcttactcccttagaacagggagtctcctttaacaagaagttgatggataggtttgattttggggaagactctgagcatagtgaagaacccaaaaaggaaattccagcttcacaactttctcacgtttcagaatctgtgaacaattccatttttcatcagatagcagaacaactacaacagcaaaacctagaacatctcagacagcagctcttggagcagcaacagcctcaaaaggccactcctcaggatagtcaggaaggaacctttgggtcagagcattcagcgtcaccatcacaagggagtagtcagcagcattttcttgaacctgaagtcaatttggatgattccatagatattcagcaacaggatatggatatagatgaagggcaagatggagtggaagaggaggtctttgaacaagaagctaagaaagtggcggttcgctcaagatcaagaacacattcacgatctcgttcaagatcaccaagaaaacgaaggtctaggtcacggtctggctctagaaagcgtaaacacagaaagcgatcacgctcccgctcaagagaaagaaagaggaaatcatcacggtcgtattcaagtgaaaggagagccagagaaagggagaaagaacgacagaaaaagggattacctccaattagatctaaaacactaagtgtatgtagtactactctctgggttgggcaagtggacaagaaggcaacacagcaagacttaaccaacctgtttgaagagtttggacagattgaatccattaatatgattcctccccggggctgtgcttatgtctgcatggttcatcgacaagatgcatttcgagctcttcagaaactcagttctggatcatataaaattgggtccaaggtcattaagatcgcttgggctttaaacaaaggtgtaaaaacagaatacaaacaattctgggatgtggatcttggagttacatatataccatgggaaaaagttaaagtggatgacttggaaggttttgcagaaggaggcatgattgatcaggagactgtaaatactgagtgggaaactgtgaaaagctcagaacctgttaaagagacggtccagacaactcagagcccaactccagttgaaaaggagacagtggtcacaacccaggcagaggttttccctcctcctgttgctatgttgcagattccagtggcgccagccgtgcctacagttagtttagtcccaccagcatttcctgtgtcgatgccggttcctcctcctggattcagtccaatccctccacctccttttttaagagcaagttttaacccttcacaaccaccacctggtttcatgccgcctccagttcccccacctgttgtgccaccccctacgattccaccagtagtaccaacatctttagtgcagccgtcattatccatgacaccggaaactgtgaaagatgttggatttggtagccttgttataccaggcggttctgttgccagcaatcttgctacttccgctctgccagctggaaatgtttttaatgctccaactaaacaggcagagcctgaagaaaaagtacctcatcttatagaccaccagatttcttctggtgaaaacaccagatcagtgattccaaatgatatttcaagtaatgctgcaattttaggaggacagccgccaaatgtgacaagcaattctggaattctgggagtccaaagaccaaatgtatcaagtaattctgaaattcttggggtccggccatctaatgtttccagtagttctgggattattgcagcccaaccaccaaatattctaaataactctggaatattgggaatacagccacccagtgtgtcaaatagttctggacttttgggagtgctacccccaaatatacctaacaattctggacttgtaggagtacagccaccaaatgttccaaatactcctggacttctgggaacacagccaccagctggacctcaaaacttaccccctttaagtatccctaatcaaaggatgcccacaatgccaatgttagacattcgtccgggactaataccacaggcacctgggccaagattccctttaatacagcctggaattccaccccaacggggaatcccacccccatcggtacttgattcagctcttcatccaccaccccgtggaccttttcctccaggagatatttttagtcaaccagaaagaccttttttagctcctggaagacaaagcgtagacaatgttactaacccagaaaaaaggataccacttgggaatgataacattcaacaggaaggagatagagattaccggtttcctcctatagaaaccagggaaagcattagtagacctccccctgtggatgttagagatgtggttgggcggcctatagatccaagagaaggtcctggacggcctccactagatggtagggatcattttggaagacctcctgtagatataagagagaatcttgtgaggccaggtatagatcatcttggtcgaagagaccactttggctttaatccagagaagccctgggggcatagaggagattttgatgagagagagcatcgggttctaccggtctatggtggtcctcctagaagtggtccttggaaccgaggatttggacaagaagttcacagagattttgatgaccgcagaagaccctgggagaggcaaagggatagggatgacagagattttgatttctgcagagaaatgaatggaaatcgtcttggacgagacagaattcaaaacacttgggttccccctcctcatgctcgggtttttgattattttgaaggggccacttctcaacgaaaaggtgataatgtgcctcaggttaatggtgaaaatacagagagacatgctcagccaccacctataccagtacagaatgatcctgaactttatgaaaaactgacatcttcaaatgaaataaacaaggagaagagtgacacagttgctgatatagaaagtgaaccagtggtagaaagcacagaaactgaggggacataatcatcactcagtaggtaaaagataccttttgtaaagttgtcatctctctgtaatagataatggctgactggaccatagttgttcacttttgtctgccagaattaagttaatctgatgttcatgttcacctttctcttaaaataattgtacaactgacttgtatagacattgttcttaatatgaacatggtaggtaaactttttttttatttttttctgataaaatacaaatgttggccccagattcttttaacgtcaaggaaatgaataacagcttgtcagagacttcctatggaagaaagaattttttagatactatcattaggttggatatggtaatagatatatttcagaatagcaagtggtggtatatcttatccatatctttaggctgctgcagaattttaaggttatagataaagctgtgatattttatgcaaagactggctctaggtatttgaggagcacaatacagagattttaaaaagtgattttgtaaaatctacactatggtctctgtttctccaaagtaagtgtttgtgatttgttcctcatactgcagtgagtaaaaaagaaacaagaaaacaacaacataaatattaaagtacgtttcaatgttgggtgaattttgtttttagatgccaataaaacttatttgtttga

SEQ ID NO: 333332 - DNA, 3478 bp, Homo sapiens
ggtccagtcgccagggggcgcgctagccggcgccgcggatccccgaactgcgcggcccgactcgagtccgccatattggatgccgcagccgctgctgccagcgcttcctcctctgtcttcgccgagcggggctggttcctgcggcccgagcggcggggagcgccccctcctcgcggccacgcagcagcccgcgtctcgctctccccacccagtgcagtggccgccgcctcttccgccgccgggctcggggcctccgcagcgacaacatggaggccgtgaagaccttcaatagcgagttgtattccctgaatgactataaaccacccatttcgaaagcgaaaatgacccaaattactaaggcagccatcaaagctattaagttctataaacatgtggtacagagtgttgagaagtttattcagaaatgtaaaccagaatacaaagtacctggactttatgttattgactccattgtgcgacaatcccgacatcagtttggtcaagaaaaggatgtgtttgcacccagatttagtaataacatcattagcactttccagaatttatatcgttgccctggggatgacaagagtaaaatagtgagagtactaaacttatggcagaagaataatgtatttaagagtgagattattcagccccttttggatatggcagccgggattccgcctccagttgtcacacctgttttggccagcactaccactgctatgagcaatactccaggaactcctgtgacacctgttactccggccaatgtggtccaaggcttacctgatccgtgggtatctcagataacaaatacagatacacttgcggctgtagctcagatcttgcaaagtcctcaaggccagcagcttcaacaattaatacaaaccttacagatacaacaacagaagccccagccttccattctgcaggccctagatgctggtcttgttgttcagttgcaagctcttacggcacaacttacagctgcagctgcagctgccaacactcttactcccttagaacagggagtctcctttaacaagaagttgatggataggtttgattttggggaagactctgagcatagtgaagaacccaaaaaggaaattccagcttcacaactttctcacgtttcagaatctgtgaacaattccatttttcatcagatagcagaacaactacaacagcaaaacctagaacatctcagacagcagctcttggagcagcaacagcctcaaaaggccactcctcaggatagtcaggaaggaacctttgggtcagagcattcagcgtcaccatcacaagggagtagtcagcagcattttcttgaacctgaagtcaatttggatgattccatagatattcagcaacaggatatggatatagatgaagggcaagatggagtggaagaggaggtctttgaacaagaagctaagaaagtggcggttcgctcaagatcaagaacacattcacgatctcgttcaagatcaccaagaaaacgaaggtctaggtcacggtctggctctagaaagcgtaaacacagaaagcgatcacgctcccgctcaagagaaagaaagaggaaatcatcacggtcgtattcaagtgaaaggagagccagagaaagggagaaagaacgacagaaaaagggattacctccaattagatctaaaacactaagtgtatgtagtactactctctgggttgggcaagtggacaagaaggcaacacagcaagacttaaccaacctgtttgaagagtttggacagattgaatccattaatatgattcctccccggggctgtgcttatgtctgcatggttcatcgacaagatgcatttcgagctcttcagaaactcagttctggatcatataaaattgggtccaaggtcattaagatcgcttgggctttaaacaaaggtgtaaaaacagaatacaaacaattctgggatgtggatcttggagttacatatataccatgggaaaaagttaaagtggatgacttggaaggttttgcagaaggaggcatgattgatcaggagactgtaaatactgagtgggaaactgtgaaaagctcagaacctgttaaagagacggtccagacaactcagagcccaactccagttgaaaaggagacagtggtcacaacccaggcagaggttttccctcctcctgttgctatgttgcagattccagtggcgccagccgtgcctacagttagtttagtcccaccagcatttcctgtgtcgatgccggttcctcctcctggattcagtccaatccctccacctccttttttaagagcaagttttaacccttcacaaccaccacctggtttcatgccgcctccagttcccccacctgttgtgccaccccctacgattccaccagtagtaccaacatctttagtgcagccgtcattatccatgacaccggaaactgtgaaagatgttggatttggtagccttgttataccaggcggttctgttgccagcaatcttgctacttccgctctgccagctggaaatgtttttaatgctccaactaaacaggcagagcctgaagaaaaagtacctcatcttatagaccaccagatttcttctggtgaaaacaccagatcagtgattccaaatgatatttcaagtaatgctgcaattttaggaggacagccgccaaatgtgacaagcaattctggaattctgggagtccaaagaccaaatgtatcaagtaattctgaaattcttggggtccggccatctaatgtttccagtagttctgggattattgcagcccaaccaccaaatattctaaataactctggaatattgggaatacagccacccagtgtgtcaaatagttctggacttttgggagtgctacccccaaatatacctaacaattctggacttgtaggagtacagccaccaaatgttccaaatactcctggacttctgggaacacagccaccagctggacctcaaaacttaccccctttaagtatccctaatcaaaggatgcccacaatgccaatgttagacattcgtccgggactaataccacaggcacctgggccaagattccctttaatacagcctggaattccaccccaacggggaatcccacccccatcggtacttgattcagctcttcatccaccaccccgtggaccttttcctccaggagatatttttagtcaaccagaaagaccttttttagctcctggaagacaaagcgtagacaatgttactaacccagaaaaaaggataccacttgggaatgataacattcaacaggaaggagatagagatttccataaattgaagcaaagccgattctttgatgaaaatgaatcccctgttgatccgcagcatggctctaaactggcgcgattataatggggatgatggtaacgtaggtgagtatgaggccggcagcggctgagctggcttacatgaggacagaagatggtcgtgtg

SEQ ID NO: 333333 - DNA, 2854 bp, Homo sapiens
ggtccagtcgccagggggcgcgctagccggcgccgcggatccccgaactgcgcggcccgactcgagtccgccatattggatgccgcagccgctgctgccagcgcttcctcctctgtcttcgccgagcggggctggttcctgcggcccgagcggcggggagcgccccctcctcgcggccacgcagcagcccgcgtctcgctctccccacccagtgcagtggccgccgcctcttccgccgccgggctcggggcctccgcagcgacaacatggaggccgtgaagaccttcaatagcgagttgtattccctgaatgactataaaccacccatttcgaaagcgaaaatgacccaaattactaaggcagccatcaaagctattaagttctataaacatgtggtacagagtgttgagaagtttattcagaaatgtaaaccagaatacaaagtacctggactttatgttattgactccattgtgcgacaatcccgacatcagtttggtcaagaaaaggatgtgtttgcacccagatttagtaataacatcattagcactttccagaatttatatcgttgccctggggatgacaagagtaaaatagtgagagtactaaacttatggcagaagaataatgtatttaagagtgagattattcagccccttttggatatggcagccgggattccgcctccagttgtcacacctgttttggccagcactaccactgctatgagcaatactccaggaactcctgtgacacctgttactccggccaatgtggtccaaggcttacctgatccgtgggtatctcagataacaaatacagatacacttgcggctgtagctcagatcttgcaaagtcctcaaggccagcagcttcaacaattaatacaaaccttacagatacaacaacagaagccccagccttccattctgcaggccctagatgctggtcttgttgttcagttgcaagctcttacggcacaacttacagctgcagctgcagctgccaacactcttactcccttagaacagggagtctcctttaacaagaagttgatggataggtttgattttggggaagactctgagcatagtgaagaacccaaaaaggaaattccagcttcacaactttctcacgtttcagaatctgtgaacaattccatttttcatcagatagcagaacaactacaacagcaaaacctagaacatctcagacagcagctcttggagcagcaacagcctcaaaaggccactcctcaggatagtcaggaaggaacctttgggtcagagcattcagcgtcaccatcacaagggagtagtcagcagcattttcttgaacctgaagtcaatttggatgattccatagatattcagcaacaggatatggatatagatgaagggcaagatggagtggaagaggaggtctttgaacaagaagctaagaaagtggcggttcgctcaagatcaagaacacattcacgatctcgttcaagatcaccaagaaaacgaaggtctaggtcacggtctggctctagaaagcgtaaacacagaaagcgatcacgctcccgctcaagagaaagaaagaggaaatcatcacggtcgtattcaagtgaaaggagagccagagaaagggagaaagaacgacagaaaaagggattacctccaattagatctaaaacactaagtgtatgtagtactactctctgggttgggcaagtggacaagaaggcaacacagcaagacttaaccaacctgtttgaagagtttggacagattgaatccattaatatgattcctccccggggctgtgcttatgtctgcatggttcatcgacaagatgcatttcgagctcttcagaaactcagttctggatcatataaaattgggtccaaggtcattaagatcgcttgggctttaaacaaaggtgtaaaaacagaatacaaacaattctgggatgtggatcttggagttacatatataccatgggaaaaagttaaagtggatgacttggaaggttttgcagaaggaggcatgattgatcaggagactgtaaatactgagtgggaaactgtgaaaagctcagaacctgttaaagagacggtccagacaactcagagcccaactccagttgaaaaggagacagtggtcacaacccaggcagaggttttccctcctcctgttgctatgttgcagattccagtggcgccagccgtgcctacagttagtttagtcccaccagcatttcctgtgtcgatgccggttcctcctcctggattcagtccaatccctccacctccttttttaagagcaagttttaacccttcacaaccaccacctggtaaggaatttttgttttaatatttgaactctatttagattatcatttaagttgtgtttcttccagatttaagtaccatagagcagtggttctgagaccttagcatgcatagccttgttaaagcgcagattgctgggcccagcctccactgtttttgctttactcagtctgtggtaggggccagagaattttattttctaacttgttctcaggatgcagattggtgggagcaagatgcgcatcttgctcccatcagagtcgtgtaaggcaactgtcctggaggttgtatgctgcatgccactgactcactgatgtcctcatggtccattcctgagaattccagtggtgagaactggctctcagatgaacttgtctggtcacaggaaatccctactgaaaaagacctgcttctttgtggtgaaggagctatgatttcaatatgttctttggtagcgaaaggatccattctgcgtatttaactgatggtgcatccatgggcaggagagctgagtggcag

SEQ ID NO: 333334 - DNA, 726 bp, Homo sapiens
cggaagcacactgcaacagcctaaagatatggtaatagatatatttcagaatagcaagtggtggtatatcttatccatatctttaggctgctgcagaattttaaggttatagataaagctgtgatattttatgcaaagactggctctaggtatttgaggagcacaatacagagattttaaaaagtgattttgtaaaatctacactatggtctctgtttctccaaagtaagtgtttgtgatttgttcctcatactgcagtgagtaaaaaagaaacaagaaaacaacaacataaatattaaagtacgtttcaatgttgggtgaattttgtttttagatgccaataaaacttatttgtttgataacagtgttctaggaattgtatttttttaacctataaattcttaaaaccttgaattattattagcatgtgcttattttttgcaaaagctttctatcataacaacaatgaactatgtggtggaaaaagcatgtactttgatataaaaatcatgcagcctcctcagtatgtgtataatatctgtgtatgtttattgtggaagtcgtgtagtttttttctgtttctctgtatgtccgtcttcatgcacatacagagaaaatagaaaggtgagaaagtttagataataaaatattcttttaaatctggtagaatattggagaaatctggctaattaacatgggttatagttaaagctcttggtcttgatg

SEQ ID NO: 333335 - DNA, 260 bp, Homo sapiens
tttgactttcaaggatatggatatagatgaagggcaagatggagtggaagaggaggtctttgaacaagaagctaagaaagtggcggttcgctcaagatcaagaacacattcacgatctcgttcaaggttctacaatgatatttaataatagccgtgtgtgaactttaaaatgttggctttatttctttgcatcaggatgaaaggaaatgtttccttgggatgacatattttttctcagtctctcggaaaaaaagttattc

SEQ ID NO: 333336 - DNA, 4663 bp, Homo sapiens
gccgctgagggagcccttccccgccagcgcgtgcccttccactccgccccgaggtcgcagcggcccgctctcccgccagcgccccctcctcgcggccacgcagcagcccgcgtctcgctctccccacccagtgcagtggccgccgcctcttccgccgccgggctcggggcctccgcagcgacaacatggaggccgtgaagaccttcaatagcgagttgtattccctgaatgactataaaccacccatttcgaaagcgaaaatgacccaaattactaaggcagccatcaaagctattaagttctataaacatgtggtacagagtgttgagaagtttattcagaaatgtaaaccagaatacaaagtacctggactttatgttattgactccattgtgcgacaatcccgacatcagtttggtcaagaaaaggatgtgtttgcacccagatttagtaataacatcattagcactttccagaatttatatcgttgccctggggatgacaagagtaaaatagtgagagtactaaacttatggcagaagaataatgtatttaagagtgagattattcagccccttttggatatggcagccgggattccgcctccagttgtcacacctgttttggccagcactaccactgctatgagcaatactccaggaactcctgtgacacctgttactccggccaatgtggtccaaggcttacctgatccgtgggtatctcagataacaaatacagatacacttgcggctgtagctcagatcttgcaaagtcctcaaggccagcagcttcaacaattaatacaaaccttacagatacaacaacagaagccccagccttccattctgcaggccctagatgctggtcttgttgttcagttgcaagctcttacggcacaacttacagctgcagctgcagctgccaacactcttactcccttagaacagggagtctcctttaacaagaagttgatggataggtttgattttggggaagactctgagcatagtgaagaacccaaaaaggaaattccagcttcacaactttctcacgtttcagaatctgtgaacaattccatttttcatcagatagcagaacaactacaacagcaaaacctagaacatctcagacagcagctcttggagcagcaacagcctcaaaaggccactcctcaggatagtcaggaaggaacctttgggtcagagcattcagcgtcaccatcacaagggagtagtcagcagcattttcttgaacctgaagtcaatttggatgattccatagatattcagcaacaggatatggatatagatgaagggcaagatggagtggaagaggaggtctttgaacaagaagctaagaaagtggcggttcgctcaagatcaagaacacattcacgatctcgttcaagatcaccaagaaaacgaaggtctaggtcacggtctggctctagaaagcgtaaacacagaaagcgatcacgctcccgctcaagagaaagaaagaggaaatcatcacggtcgtattcaagtgaaaggagagccagagaaagggagaaagaacgacagaaaaagggattacctccaattagatctaaaacactaagtgtatgtagtactactctctgggttgggcaagtggacaagaaggcaacacagcaagacttaaccaacctgtttgaagagtttggacagattgaatccattaatatgattcctccccggggctgtgcttatgtctgcatggttcatcgacaagatgcatttcgagctcttcagaaactcagttctggatcatataaaattgggtccaaggtcattaagatcgcttgggctttaaacaaaggtgtaaaaacagaatacaaacaattctgggatgtggatcttggagttacatatataccatgggaaaaagttaaagtggatgacttggaaggttttgcagaaggaggcatgattgatcaggagactgtaaatactgagtgggaaactgtgaaaagctcagaacctgttaaagagacggtccagacaactcagagcccaactccagttgaaaaggagacagtggtcacaacccaggcagaggttttccctcctcctgttgctatgttgcagattccagtggcgccagccgtgcctacagttagtttagtcccaccagcatttcctgtgtcgatgccggttcctcctcctggattcagtccaatccctccacctccttttttaagagcaagttttaacccttcacaaccaccacctggtttcatgccgcctccagttcccccacctgttgtgccaccccctacgattccaccagtagtaccaacatctttagtgcagccgtcattatccatgacaccggaaactgtgaaagatgttggatttggtagccttgttataccaggcggttctgttgccagcaatcttgctacttccgctctgccagctggaaatgtttttaatgctccaactaaacaggcagagcctgaagaaaaagtacctcatcttatagaccaccagatttcttctggtgaaaacaccagatcagtgattccaaatgatatttcaagtaatgctgcaattttaggaggacagccgccaaatgtgacaagcaattctggaattctgggagtccaaagaccaaatgtatcaagtaattctgaaattcttggggtccggccatctaatgtttccagtagttctgggattattgcagcccaaccaccaaatattctaaataactctggaatattgggaatacagccacccagtgtgtcaaatagttctggacttttgggagtgctacccccaaatatacctaacaattctggacttgtaggagtacagccaccaaatgttccaaatactcctggacttctgggaacacagccaccagctggacctcaaaacttaccccctttaagtatccctaatcaaaggatgcccacaatgccaatgttagacattcgtccgggactaataccacaggcacctgggccaagattccctttaatacagcctggaattccaccccaacggggaatcccacccccatcggtacttgattcagctcttcatccaccaccccgtggaccttttcctccaggagatatttttagtcaaccagaaagaccttttttagctcctggaagacaaagcgtagacaatgttactaacccagaaaaaaggataccacttgggaatgataacattcaacaggaaggagatagagattaccggtttcctcctatagaaaccagggaaagcattagtagacctccccctgtggatgttagagatgtggttgggcggcctatagatccaagagaaggtcctggacggcctccactagatggtagggatcattttggaagacctcctgtagatataagagagaatcttgtgaggccaggtatagatcatcttggtcgaagagaccactttggctttaatccagagaagccctgggggcatagaggagattttgatgagagagagcatcgggttctaccggtctatggtggtccaaaaggcttacatgaagaaagaggtagatttcggtctggaaactatcgatttgatcctagaagtggtccttggaaccgaggatttggacaagaagttcacagagattttgatgaccgcagaagaccctgggagaggcaaagggatagggatgacagagattttgatttctgcagagaaatgaatggaaatcgtcttggacgagacagaattcaaaacacttgggttccccctcctcatgctcgggtttttgattattttgaaggggccacttctcaacgaaaaggtgataatgtgcctcaggttaatggtgaaaatacagagagacatgctcagccaccacctataccagtacagaatgatcctgaactttatgaaaaactgacatcttcaaatgaaataaacaaggagaagagtgacacagttgctgatatagaaagtgaaccagtggtagaaagcacagaaactgaggggacataatcatcactcagtaggtaaaagataccttttgtaaagttgtcatctctctgtaatagataatggctgactggaccatagttgttcacttttgtctgccagaattaagttaatctgatgttcatgttcacctttctcttaaaataattgtacaactgacttgtatagacattgttcttaatatgaacatggtaggtaaactttttttttatttttttctgataaaatacaaatgttggccccagattcttttaacgtcaaggaaatgaataacagcttgtcagagacttcctatggaagaaagaattttttagatactatcattaggttggatatggtaatagatatatttcagaatagcaagtggtggtatatcttatccatatctttaggctgctgcagaattttaaggttatagataaagctgtgatattttatgcaaagactggctctaggtatttgaggagcacaatacagagattttaaaaagtgattttgtaaaatctacactatggtctctgtttctccaaagtaagtgtttgtgatttgttcctcatactgcagtgagtaaaaaagaaacaagaaaacaacaacataaatattaaagtacgtttcaatgttgggtgaattttgtttttagatgccaataaaacttatttgtttga

SEQ ID NO: 333337 - DNA, 4744 bp, Homo sapiens
ggtccagtcgccagggggcgcgctagccggcgccgcggatccccgaactgcgcggcccgactcgagtccgccatattggatgccgcagccgctgctgccagcgcttcctcctctgtcttcgccgagcggggctggttcctgcggcccgagcggcggggagcgccccctcctcgcggccacgcagcagcccgcgtctcgctctccccacccagtgcagtggccgccgcctcttccgccgccgggctcggggcctccgcagcgacaacatggaggccgtgaagaccttcaatagcgagttgtattccctgaatgactataaaccacccatttcgaaagcgaaaatgacccaaattactaaggcagccatcaaagctattaagttctataaacatgtggtacagagtgttgagaagtttattcagaaatgtaaaccagaatacaaagtacctggactttatgttattgactccattgtgcgacaatcccgacatcagtttggtcaagaaaaggatgtgtttgcacccagatttagtaataacatcattagcactttccagaatttatatcgttgccctggggatgacaagagtaaaatagtgagagtactaaacttatggcagaagaataatgtatttaagagtgagattattcagccccttttggatatggcagccgggattccgcctccagttgtcacacctgttttggccagcactaccactgctatgagcaatactccaggaactcctgtgacacctgttactccggccaatgtggtccaaggcttacctgatccgtgggtatctcagataacaaatacagatacacttgcggctgtagctcagatcttgcaaagtcctcaaggccagcagcttcaacaattaatacaaaccttacagatacaacaacagaagccccagccttccattctgcaggccctagatgctggtcttgttgttcagttgcaagctcttacggcacaacttacagctgcagctgcagctgccaacactcttactcccttagaacagggagtctcctttaacaagaagttgatggataggtttgattttggggaagactctgagcatagtgaagaacccaaaaaggaaattccagcttcacaactttctcacgtttcagaatctgtgaacaattccatttttcatcagatagcagaacaactacaacagcaaaacctagaacatctcagacagcagctcttggagcagcaacagcctcaaaaggccactcctcaggatagtcaggaaggaacctttgggtcagagcattcagcgtcaccatcacaagggagtagtcagcagcattttcttgaacctgaagtcaatttggatgattccatagatattcagcaacaggatatggatatagatgaagggcaagatggagtggaagaggaggtctttgaacaagaagctaagaaagtggcggttcgctcaagatcaagaacacattcacgatctcgttcaagatcaccaagaaaacgaaggtctaggtcacggtctggctctagaaagcgtaaacacagaaagcgatcacgctcccgctcaagagaaagaaagaggaaatcatcacggtcgtattcaagtgaaaggagagccagagaaagggagaaagaacgacagaaaaagggattacctccaattagatctaaaacactaagtgtatgtagtactactctctgggttgggcaagtggacaagaaggcaacacagcaagacttaaccaacctgtttgaagagtttggacagattgaatccattaatatgattcctccccggggctgtgcttatgtctgcatggttcatcgacaagatgcatttcgagctcttcagaaactcagttctggatcatataaaattgggtccaaggtcattaagatcgcttgggctttaaacaaaggtgtaaaaacagaatacaaacaattctgggatgtggatcttggagttacatatataccatgggaaaaagttaaagtggatgacttggaaggttttgcagaaggaggcatgattgatcaggagactgtaaatactgagtgggaaactgtgaaaagctcagaacctgttaaagagacggtccagacaactcagagcccaactccagttgaaaaggagacagtggtcacaacccaggcagaggttttccctcctcctgttgctatgttgcagattccagtggcgccagccgtgcctacagttagtttagtcccaccagcatttcctgtgtcgatgccggttcctcctcctggattcagtccaatccctccacctccttttttaagagcaagttttaacccttcacaaccaccacctggtttcatgccgcctccagttcccccacctgttgtgccaccccctacgattccaccagtagtaccaacatctttagtgcagccgtcattatccatgacaccggaaactgtgaaagatgttggatttggtagccttgttataccaggcggttctgttgccagcaatcttgctacttccgctctgccagctggaaatgtttttaatgctccaactaaacaggcagagcctgaagaaaaagtacctcatcttatagaccaccagatttcttctggtgaaaacaccagatcagtgattccaaatgatatttcaagtaatgctgcaattttaggaggacagccgccaaatgtgacaagcaattctggaattctgggagtccaaagaccaaatgtatcaagtaattctgaaattcttggggtccggccatctaatgtttccagtagttctgggattattgcagcccaaccaccaaatattctaaataactctggaatattgggaatacagccacccagtgtgtcaaatagttctggacttttgggagtgctacccccaaatatacctaacaattctggacttgtaggagtacagccaccaaatgttccaaatactcctggacttctgggaacacagccaccagctggacctcaaaacttaccccctttaagtatccctaatcaaaggatgcccacaatgccaatgttagacattcgtccgggactaataccacaggcacctgggccaagattccctttaatacagcctggaattccaccccaacggggaatcccacccccatcggtacttgattcagctcttcatccaccaccccgtggaccttttcctccaggagatatttttagtcaaccagaaagaccttttttagctcctggaagacaaagcgtagacaatgttactaacccagaaaaaaggataccacttgggaatgataacattcaacaggaaggagatagagattaccggtttcctcctatagaaaccagggaaagcattagtagacctccccctgtggatgttagagatgtggttgggcggcctatagatccaagagaaggtcctggacggcctccactagatggtagggatcattttggaagacctcctgtagatataagagagaatcttgtgaggccaggtatagatcatcttggtcgaagagaccactttggctttaatccagagaagccctgggggcatagaggagattttgatgagagagagcatcgggttctaccggtctatggtggtccaaaaggcttacatgaagaaagaggtagatttcggtctggaaactatcgatttgatcctagaagtggtccttggaaccgaggatttggacaagaagttcacagagattttgatgaccgcagaagaccctgggagaggcaaagggatagggatgacagagattttgatttctgcagagaaatgaatggaaatcgtcttggacgagacagaattcaaaacacttgggttccccctcctcatgctcgggtttttgattattttgaaggggccacttctcaacgaaaaggtgataatgtgcctcaggttaatggtgaaaatacagagagacatgctcagccaccacctataccagtacagaatgatcctgaactttatgaaaaactgacatcttcaaatgaaataaacaaggagaagagtgacacagttgctgatatagaaagtgaaccagtggtagaaagcacagaaactgaggggacataatcatcactcagtaggtaaaagataccttttgtaaagttgtcatctctctgtaatagataatggctgactggaccatagttgttcacttttgtctgccagaattaagttaatctgatgttcatgttcacctttctcttaaaataattgtacaactgacttgtatagacattgttcttaatatgaacatggtaggtaaactttttttttatttttttctgataaaatacaaatgttggccccagattcttttaacgtcaaggaaatgaataacagcttgtcagagacttcctatggaagaaagaattttttagatactatcattaggttggatatggtaatagatatatttcagaatagcaagtggtggtatatcttatccatatctttaggctgctgcagaattttaaggttatagataaagctgtgatattttatgcaaagactggctctaggtatttgaggagcacaatacagagattttaaaaagtgattttgtaaaatctacactatggtctctgtttctccaaagtaagtgtttgtgatttgttcctcatactgcagtgagtaaaaaagaaacaagaaaacaacaacataaatattaaagtacgtttcaatgttgggtgaattttgtttttagatgccaataaaacttatttgtttga

SEQ ID NO: 333338 - DNA, 4154 bp, Homo sapiens
gcatgggagggaggaagagaggtttggggtgcggtggcaggtgatatagggaaagttctcacgtttcagaatctgtgaacaattccatttttcatcagatagcagaacaactacaacagcaaaacctagaacatctcagacagcagctcttggagcagcaacagcctcaaaaggccactcctcaggatagtcaggaaggaacctttgggtcagagcattcagcgtcaccatcacaagggagtagtcagcagcattttcttgaacctgaagtcaatttggatgattccatagatattcagcaacaggtaaaagtaaatgtttttctgggtcataaatttctaaaagtagctaaagaaatcataaaatattttatactagcagtgccctgaatatatttttcccacacttaagctccactttgtaattgtttcacctattaggccaagcttgtccaaggcctaagcatggcccctaggccaagcacatggcccagaactgctttgaatgcagcccaacacaaatttgtaaactttcttaaaacaatatgagatttgtttttgcgatttttttttttttttaagcttatcagctgtcattagtgttagtatattttacgtgtggccaaagacattacttcttctaatggggcccagggaagccaaaagattggacacccctgtattaggcattaatgctcccatcgtcaatatttttaaaaacagaattgtcaatgtataactctgtctcaaccagcctttctgtttgtttgctgttcttttgactttcaaggatatggatatagatgaagggcaagatggagtggaagaggaggtctttgaacaagaagctaagaaagtggcggttcgctcaagatcaagaacacattcacgatctcgttcaagatcaccaagaaaacgaaggtctaggtcacggtctggctctagaaagcgtaaacacagaaagcgatcacgctcccgctcaagagaaagaaagaggaaatcatcacggtcgtattcaagtgaaaggagagccagagaaagggagaaagaacgacagaaaaagggattacctccaattagatctaaaacactaagtgtatgtagtactactctctgggttgggcaagtggacaagaaggcaacacagcaagacttaaccaacctgtttgaagagtttggacagattgaatccattaatatgattcctccccggggctgtgcttatgtctgcatggttcatcgacaagatgcatttcgagctcttcagaaactcagttctggatcatataaaattgggtccaaggtcattaagatcgcttgggctttaaacaaaggtgtaaaaacagaatacaaacaattctgggatgtggatcttggagttacatatataccatgggaaaaagttaaagtggatgacttggaaggttttgcagaaggaggcatgattgatcaggagactgtaaatactgagtgggaaactgtgaaaagctcagaacctgttaaagagacggtccagacaactcagagcccaactccagttgaaaaggagacagtggtcacaacccaggcagaggttttccctcctcctgttgctatgttgcagattccagtggcgccagccgtgcctacagttagtttagtcccaccagcatttcctgtgtcgatgccggttcctcctcctggattcagtccaatccctccacctccttttttaagagcaagttttaacccttcacaaccaccacctggtttcatgccgcctccagttcccccacctgttgtgccaccccctacgattccaccagtagtaccaacatctttagtgcagccgtcattatccatgacaccggaaactgtgaaagatgttggatttggtagccttgttataccaggcggttctgttgccagcaatcttgctacttccgctctgccagctggaaatgtttttaatgctccaactaaacaggcagagcctgaagaaaaagtacctcatcttatagaccaccagatttcttctggtgaaaacaccagatcagtgattccaaatgatatttcaagtaatgctgcaattttaggaggacagccgccaaatgtgacaagcaattctggaattctgggagtccaaagaccaaatgtatcaagtaattctgaaattcttggggtccggccatctaatgtttccagtagttctgggattattgcagcccaaccaccaaatattctaaataactctggaatattgggaatacagccacccagtgtgtcaaatagttctggacttttgggagtgctacccccaaatatacctaacaattctggacttgtaggagtacagccaccaaatgttccaaatactcctggacttctgggaacacagccaccagctggacctcaaaacttaccccctttaagtatccctaatcaaaggatgcccacaatgccaatgttagacattcgtccgggactaataccacaggcacctgggccaagattccctttaatacagcctggaattccaccccaacggggaatcccacccccatcggtacttgattcagctcttcatccaccaccccgtggaccttttcctccaggagatatttttagtcaaccagaaagaccttttttagctcctggaagacaaagcgtagacaatgttactaacccagaaaaaaggataccacttgggaatgataacattcaacaggaaggagatagagattaccggtttcctcctatagaaaccagggaaagcattagtagacctccccctgtggatgttagagatgtggttgggcggcctatagatccaagagaaggtcctggacggcctccactagatggtagggatcattttggaagacctcctgtagatataagagagaatcttgtgaggccaggtatagatcatcttggtcgaagagaccactttggctttaatccagagaagccctgggggcatagaggagattttgatgagagagagcatcgggttctaccggtctatggtggtccaaaaggcttacatgaagaaagaggtagatttcggtctggaaactatcgatttgatcctagaagtggtccttggaaccgaggatttggacaagaagttcacagagattttgatgaccgcagaagaccctgggagaggcaaagggatagggatgacagagattttgatttctgcagagaaatgaatggaaatcgtcttggacgagacagaattcaaaacacttgggttccccctcctcatgctcgggtttttgattattttgaaggggccacttctcaacgaaaaggtgataatgtgcctcaggttaatggtgaaaatacagagagacatgctcagccaccacctataccagtacagaatgatcctgaactttatgaaaaactgacatcttcaaatgaaataaacaaggagaagagtgacacagttgctgatatagaaagtgaaccagtggtagaaagcacagaaactgaggggacataatcatcactcagtaggtaaaagataccttttgtaaagttgtcatctctctgtaatagataatggctgactggaccatagttgttcacttttgtctgccagaattaagttaatctgatgttcatgttcacctttctcttaaaataattgtacaactgacttgtatagacattgttcttaatatgaacatggtaggtaaactttttttttatttttttctgataaaatacaaatgttggccccagattcttttaacgtcaaggaaatgaataacagcttgtcagagacttcctatggaagaaagaattttttagatactatcattaggttggatatggtaatagatatatttcagaatagcaagtggtggtatatcttatccatatctttaggctgctgcagaattttaaggttatagataaagctgtgatattttatgcaaagactggctctaggtatttgaggagcacaatacagagattttaaaaagtgattttgtaaaatctacactatggtctctgtttctccaaagtaagtgtttgtgatttgttcctcatactgcagtgagtaaaaaagaaacaagaaaacaacaacataaatattaaagtacgtttcaatgttgggtgaattttgtttttagatgccaataaaacttatttgtttga

SEQ ID NO: 333339 - DNA, 4901 bp, Homo sapiens
ggtccagtcgccagggggcgcgctagccggcgccgcggatccccgaactgcgcggcccgactcgagtccgccatattggatgccgcagccgctgctgccagcgcttcctcctctgtcttcgccgagcggggctggttcctgcggcccgagcggcggggagcgccccctcctcgcggccacgcagcagcccgcgtctcgctctccccacccagtgcagtggccgccgcctcttccgccgccgggctcggggcctccgcagcgacaacatggaggccgtgaagaccttcaatagcgagttgtattccctgaatgactataaaccacccatttcgaaagcgaaaatgacccaaattactaaggcagccatcaaagctattaagttctataaacatgtggtacagagtgttgagaagtttattcagaaatgtaaaccagaatacaaagtacctggactttatgttattgactccattgtgcgacaatcccgacatcagtttggtcaagaaaaggatgtgtttgcacccagatttagtaataacatcattagcactttccagaatttatatcgttgccctggggatgacaagagtaaaatagtgagagtactaaacttatggcagaagaataatgtatttaagagtgagattattcagccccttttggatatggcagccgggattccgcctccagttgtcacacctgttttggccagcactaccactgctatgagcaatactccaggaactcctgtgacacctgttactccggccaatgtggtccaaggcttacctgatccgtgggtatctcagataacaaatacagatacacttgcggctgtagctcagatcttgcaaagtcctcaaggccagcagcttcaacaattaatacaaaccttacagatacaacaacagaagccccagccttccattctgcaggccctagatgctggtcttgttgttcagttgcaagctcttacggcacaacttacagctgcagctgcagctgccaacactcttactcccttagaacagggagtctcctttaacaagaagttgatggataggtttgattttggggaagactctgagcatagtgaagaacccaaaaaggaaattccagcttcacaactttctcacgtttcagaatctgtgaacaattccatttttcatcagatagcagaacaactacaacagcaaaacctagaacatctcagacagcagctcttggagcagcaacagcctcaaaaggccactcctcaggatagtcaggaaggaacctttgggtcagagcattcagcgtcaccatcacaagggagtagtcagcagcattttcttgaacctgaagtcaatttggatgattccatagatattcagcaacaggatatggatatagatgaagggcaagatggagtggaagaggaggtctttgaacaagaagctaagaaagtggcggttcgctcaagatcaagaacacattcacgatctcgttcaagatcaccaagaaaacgaaggtctaggtcacggtctggctctagaaagcgtaaacacagaaagcgatcacgctcccgctcaagagaaagaaagaggaaatcatcacggtcgtattcaagtgaaaggagagccagagaaagggagaaagaacgacagaaaaagggattacctccaattagatctaaaacactaagtgtatgtagtactactctctgggttgggcaagtggacaagaaggcaacacagcaagacttaaccaacctgtttgaagagtttggacagattgaatccattaatatgattcctccccggggctgtgcttatgtctgcatggttcatcgacaagatgcatttcgagctcttcagaaactcagttctggatcatataaaattgggtccaaggtcattaagatcgcttgggctttaaacaaaggtgtaaaaacagaatacaaacaattctgggatgtggatcttggagttacatatataccatgggaaaaagttaaagtggatgacttggaaggttttgcagaaggaggcatgattgatcaggagactgtaaatactgagtgggaaactgtgaaaagctcagaacctgttaaagagacggtccagacaactcagagcccaactccagttgaaaaggagacagtggtcacaacccaggcagaggttttccctcctcctgttgctatgttgcagattccagtggcgccagccgtgcctacagttagtttagtcccaccagcatttcctgtgtcgatgccggttcctcctcctggattcagtccaatccctccacctccttttttaagagcaagttttaacccttcacaaccaccacctggtttcatgccgcctccagttcccccacctgttgtgccaccccctacgattccaccagtagtaccaacatctttagtgcagccgtcattatccatgacaccggaaactgtgaaagatgttggatttggtagccttgttataccaggcggttctgttgccagcaatcttgctacttccgctctgccagctggaaatgtttttaatgctccaactaaacaggcagagcctgaagaaaaagtacctcatcttatagaccaccagatttcttctggtgaaaacaccagatcagtgattccaaatgatatttcaagtaatgctgcaattttaggaggacagccgccaaatgtgacaagcaattctggaattctgggagtccaaagaccaaatgtatcaagtaattctgaaattcttggggtccggccatctaatgtttccagtagttctgggattattgcagcccaaccaccaaatattctaaataactctggaatattgggaatacagccacccagtgtgtcaaatagttctggacttttgggagtgctacccccaaatatacctaacaattctggacttgtaggagtacagccaccaaatgttccaaatactcctggacttctgggaacacagccaccagctggacctcaaaacttaccccctttaagtatccctaatcaaaggatgcccacaatgccaatgttagacattcgtccgggactaataccacaggcacctgggccaagattccctttaatacagcctggaattccaccccaacggggaatcccacccccatcggtacttgattcagctcttcatccaccaccccgtggaccttttcctccaggagatatttttagtcaaccagaaagaccttttttagctcctggaagacaaagcgtagacaatgttactaacccagaaaaaaggataccacttgggaatgataacattcaacaggaaggagatagagattaccggtttcctcctatagaaaccagggaaagcattagtagacctccccctgtggatgttagagatgtggttgggcggcctatagatccaagagaaggtcctggacggcctccactagatggtagggatcattttggaagacctcctgtagatataagagagaatcttgtgaggccaggtatagatcatcttggtcgaagagaccactttggctttaatccagagaagccctgggggcatagaggagattttgatgagagagagcatcgggttctaccggtctatggtggtccaaaaggcttacatgaagaaagaggtagatttcggtctggaaactatcgatttgatcctagaagtggtccttggaaccgaggatttggacaagaagttcacagagattttgatgaccgcagaagaccctgggagaggcaaagggatagggatgacagagattttgatttctgcagagaaatgaatggaaatcgtcttggacgagacagaattcaaaacacttgggttccccctcctcatgctcgggtttttgattattttgaaggggccacttctcaacgaaaaggtgataatgtgcctcaggttaatggtgaaaatacagagagacatgctcagccaccacctataccagtacagaatgatcctgaactttatgaaaaactgacatcttcaaatgaaataaacaaggagaagagtgacacagttgctgatatagaaagtgaaccagtggtagaaagcacagaaactgaggggacataatcatcactcagtaggtaaaagataccttttgtaaagttgtcatctctctgtaatagataatggctgactggaccatagttgttcacttttgtctgccagaattaagttaatctgatgttcatgttcacctttctcttaaaataattgtacaactgacttgtatagacattgttcttaatatgaacatggtaggtaaactttttttttatttttttctgataaaatacaaatgttggccccagattcttttaacgtcaaggaaatgaataacagcttgtcagagacttcctatggaagaaagaattttttagatactatcattaggttggatatggtaatagatatatttcagaatagcaagtggtggtatatcttatccatatctttaggctgctgcagaattttaaggttatagataaagctgtgatattttatgcaaagactggctctaggtatttgaggagcacaatacagagattttaaaaagtgattttgtaaaatctacactatggtctctgtttctccaaagtaagtgtttgtgatttgttcctcatactgcagtgagtaaaaaagaaacaagaaaacaacaacataaatattaaagtacgtttcaatgttgggtgaattttgtttttagatgccaataaaacttatttgtttgaaaaaaaaaaaaaaaaaaaacttttgtgggcggcccggcccgaaaaatttttaaaccatccttgggcgcggcgccaggtaatggacacggtcctccggtcccagggacccgcccgcacagggtggtttcaccaaaaaaccggggccgctctcgcaacc

SEQ ID NO: 333340 - DNA, 5242 bp, Homo sapiens
ggtccagtcgccagggggcgcgctagccggcgccgcggatccccgaactgcgcggcccgactcgagtccgccatattggatgccgcagccgctgctgccagcgcttcctcctctgtcttcgccgagcggggctggttcctgcggcccgagcggcggggagcgccccctcctcgcggccacgcagcagcccgcgtctcgctctccccacccagtgcagtggccgccgcctcttccgccgccgggctcggggcctccgcagcgacaacatggaggccgtgaagaccttcaatagcgagttgtattccctgaatgactataaaccacccatttcgaaagcgaaaatgacccaaattactaaggcagccatcaaagctattaagttctataaacatgtggtacagagtgttgagaagtttattcagaaatgtaaaccagaatacaaagtacctggactttatgttattgactccattgtgcgacaatcccgacatcagtttggtcaagaaaaggatgtgtttgcacccagatttagtaataacatcattagcactttccagaatttatatcgttgccctggggatgacaagagtaaaatagtgagagtactaaacttatggcagaagaataatgtatttaagagtgagattattcagccccttttggatatggcagccgggattccgcctccagttgtcacacctgttttggccagcactaccactgctatgagcaatactccaggaactcctgtgacacctgttactccggccaatgtggtccaaggcttacctgatccgtgggtatctcagataacaaatacagatacacttgcggctgtagctcagatcttgcaaagtcctcaaggccagcagcttcaacaattaatacaaaccttacagatacaacaacagaagccccagccttccattctgcaggccctagatgctggtcttgttgttcagttgcaagctcttacggcacaacttacagctgcagctgcagctgccaacactcttactcccttagaacagggagtctcctttaacaagaagttgatggataggtttgattttggggaagactctgagcatagtgaagaacccaaaaaggaaattccagcttcacaactttctcacgtttcagaatctgtgaacaattccatttttcatcagatagcagaacaactacaacagcaaaacctagaacatctcagacagcagctcttggagcagcaacagcctcaaaaggccactcctcaggatagtcaggaaggaacctttgggtcagagcattcagcgtcaccatcacaagggagtagtcagcagcattttcttgaacctgaagtcaatttggatgattccatagatattcagcaacaggatatggatatagatgaagggcaagatggagtggaagaggaggtctttgaacaagaagctaagaaagtggcggttcgctcaagatcaagaacacattcacgatctcgttcaagatcaccaagaaaacgaaggtctaggtcacggtctggctctagaaagcgtaaacacagaaagcgatcacgctcccgctcaagagaaagaaagaggaaatcatcacggtcgtattcaagtgaaaggagagccagagaaagggagaaagaacgacagaaaaagggattacctccaattagatctaaaacactaagtgtatgtagtactactctctgggttgggcaagtggacaagaaggcaacacagcaagacttaaccaacctgtttgaagagtttggacagattgaatccattaatatgattcctccccggggctgtgcttatgtctgcatggttcatcgacaagatgcatttcgagctcttcagaaactcagttctggatcatataaaattgggtccaaggtcattaagatcgcttgggctttaaacaaaggtgtaaaaacagaatacaaacaattctgggatgtggatcttggagttacatatataccatgggaaaaagttaaagtggatgacttggaaggttttgcagaaggaggcatgattgatcaggagactgtaaatactgagtgggaaactgtgaaaagctcagaacctgttaaagagacggtccagacaactcagagcccaactccagttgaaaaggagacagtggtcacaacccaggcagaggttttccctcctcctgttgctatgttgcagattccagtggcgccagccgtgcctacagttagtttagtcccaccagcatttcctgtgtcgatgccggttcctcctcctggattcagtccaatccctccacctccttttttaagagcaagttttaacccttcacaaccaccacctggtttcatgccgcctccagttcccccacctgttgtgccaccccctacgattccaccagtagtaccaacatctttagtgcagccgtcattatccatgacaccggaaactgtgaaagatgttggatttggtagccttgttataccaggcggttctgttgccagcaatcttgctacttccgctctgccagctggaaatgtttttaatgctccaactaaacaggcagagcctgaagaaaaagtacctcatcttatagaccaccagatttcttctggtgaaaacaccagatcagtgattccaaatgatatttcaagtaatgctgcaattttaggaggacagccgccaaatgtgacaagcaattctggaattctgggagtccaaagaccaaatgtatcaagtaattctgaaattcttggggtccggccatctaatgtttccagtagttctgggattattgcagcccaaccaccaaatattctaaataactctggaatattgggaatacagccacccagtgtgtcaaatagttctggacttttgggagtgctacccccaaatatacctaacaattctggacttgtaggagtacagccaccaaatgttccaaatactcctggacttctgggaacacagccaccagctggacctcaaaacttaccccctttaagtatccctaatcaaaggatgcccacaatgccaatgttagacattcgtccgggactaataccacaggcacctgggccaagattccctttaatacagcctggaattccaccccaacggggaatcccacccccatcggtacttgattcagctcttcatccaccaccccgtggaccttttcctccaggagatatttttagtcaaccagaaagaccttttttagctcctggaagacaaagcgtagacaatgttactaacccagaaaaaaggataccacttgggaatgataacattcaacaggaaggagatagagattaccggtttcctcctatagaaaccagggaaagcattagtagacctccccctgtggatgttagagatgtggttgggcggcctatagatccaagagaaggtcctggacggcctccactagatggtagggatcattttggaagacctcctgtagatataagagagaatcttgtgaggccaggtatagatcatcttggtcgaagagaccactttggctttaatccagagaagccctgggggcatagaggagattttgatgagagagagcatcgggttctaccggtctatggtggtccaaaaggcttacatgaagaaagaggtagatttcggtctggaaactatcgatttgatcctagaagtggtccttggaaccgaggatttggacaagaagttcacagagattttgatgaccgcagaagaccctgggagaggcaaagggatagggatgacagagattttgatttctgcagagaaatgaatggaaatcgtcttggacgagacagaattcaaaacacttgggttccccctcctcatgctcgggtttttgattattttgaaggggccacttctcaacgaaaaggtgataatgtgcctcaggttaatggtgaaaatacagagagacatgctcagccaccacctataccagtacagaatgatcctgaactttatgaaaaactgacatcttcaaatgaaataaacaaggagaagagtgacacagttgctgatatagaaagtgaaccagtggtagaaagcacagaaactgaggggacataatcatcactcagtaggcaagatgatgatgaatgaagtcctggcagcttcctgtgtcccaggccttgtagaaataaatgagacagacgtgcttcaaagttctaatgtgcatcacatcggatcttgtttaaggaagcgttaaaaggaacccgccgttacctattgagaaggctctgtactctcaggcattgtttctgattgaatccagaggttgcaagcatgccttcctgtattacctgttggagcaggtttaattttataaattttaaacacaaactctatgagtttctagttcataattgttctttttggggatccactcagatgaacagtattgcatctgtaagagatacccacttcccaggaccagatttgattggaatatcagtggcaacagactccatctgtagctcatccagtaccagtgatggaaaggacagatggcaaggaaaccctttcggggggaaaaagaaagtcatattgtgttggacctacagattactagaaacatagctttagtaaaccaaggctttttttcttgaacacaatctgtgtagactgtgtagttcttgattggtggctttaatccattatcattaggtatctccttgaacgttctcaaacactgaaagtcttaagctttcattaaaaaaaaaagagtaaatgcagctttcagaaaatccaggattctgtacagtcttcgagtgtttcacttcagcctccctgtcctgttattaccaacagcaggtacccgggtggtagacaagaagcctcatgggatagataaggaaatgaagataaacaaacatatcacactgtatcgtaaacatactttataagtacatttcttattagcttcttatccaggtagagattataaaaatttgctgcaagtatccagaccagaatttatgttttggaaattatcagtgttcacaatacctgcagggaagaaaaaaatacaaaaactcaaatatgaatactctttacacccaaaagaatatttttatcattcttttatttgtttttggctctgtcaaaaattaaagtgcttggaatgctgtagtctgtggtctcttgaaatttaatcaatgagaacttagcattttcacagtatgctgtcactttggacattcataataaaaattgaaactaaaaaaaaa

SEQ ID NO: 333341 - DNA, 1760 bp, Homo sapiens
gaggatcctgcgctttaactgcggttacaatggatgcccacaatgccaatgttagacattcgtccgggactaataccacaggcacctgggccaagattccctttaatacagcctggaattccaccccaacggggaatcccacccccatcggtacttgattcagctcttcatccaccaccccgtggaccttttcctccaggagatatttttagtcaaccagaaagaccttttttagctcctggaagacaaagcgtagacaatgttactaacccagaaaaaaggataccacttgggaatgataacattcaacaggaaggagatagagattaccggtttcctcctatagaaaccagggaaagcattagtagacctccccctgtggatgttagagatgtggttgggcggcctatagatccaagagaaggtcctggacggcctccactagatggtagggatcattttggaagacctcctgtagatataagagagaatcttgtgaggccaggtatagatcatcttggtcgaagagaccactttggctttaatccagagaagccctgggggcatagaggagattttgatgagagagagcatcgggttctaccggtctatggtggtccaaaaggcttacatgaagaaagaggtagatttcggtctggaaactatcgatttgatcctagaagtggtccttggaaccgaggatttggacaagaagttcacagagattttgatgaccgcagaagaccctgggagaggcaaagggatagggatgacagagattttgatttctgcagagaaatgaatggaaatcgtcttggacgagacagaattcaaaacacttgggttccccctcctcatgctcgggtttttgattattttgaaggggccacttctcaacgaaaaggtgataatgtgcctcaggttaatggtgaaaatacagagagacatgctcagccaccacctataccagtacagaatgatcctgaactttatgaaaaactgacatcttcaaatgaaataaacaaggagaagagtgacacagttgctgatatagaaagtgaaccagtggtagaaagcacagaaactgaggggacataatcatcactcagtaggtaaaagataccttttgtaaagttgtcatctctctgtaatagataatggctgactggaccatagttgttcacttttgtctgccagaattaagttaatctgatgttcatgttcacctttctcttaaaataattgtacaactgacttgtatagacattgttcttaatatgaacatggtaggtaaactttttttttatttttttctgataaaatacaaatgttggccccagattcttttaacgtcaaggaaatgaataacagcttgtcagagacttcctatggaagaaagaattttttagatactatcattaggttggatatggtaatagatatatttcagaatagcaagtggtggtatatcttatccatatctttaggctgctgcagaattttaaggttatagataaagctgtgatattttatgcaaagactggctctaggtatttgaggagcacaatacagagattttaaaaagtgattttgtaaaatctacactatggtctctgtttctccaaagtaagtgtttgtgatttgttcctcatactgcagtgagtaaaaaagaaacaagaaaacaacaacataaatattaaagtacgtttcaatgttgggtgaattttgtttttagatgccaataaaacttatttgtttga

SEQ ID NO: 333342 - DNA, 3521 bp, Homo sapiens
  misc_feature (3319)..(3319): n is a, c, g, or t
ggtccagtcgccagggggcgcgctagccggcgccgcggatccccgaactgcgcggcccgactcgagtccgccatattggatgccgcagccgctgctgccagcgcttcctcctctgtcttcgccgagcggggctggttcctgcggcccgagcggcggggagcgccccctcctcgcggccacgcagcagcccgcgtctcgctctccccacccagtgcagtggccgccgcctcttccgccgccgggctcggggcctccgcagcgacaacatggaggccgtgaagaccttcaatagcgagttgtattccctgaatgactataaaccacccatttcgaaagcgaaaatgacccaaattactaaggcagccatcaaagctattaagttctataaacatgtggtacagagtgttgagaagtttattcagaaatgtaaaccagaatacaaagtacctggactttatgttattgactccattgtgcgacaatcccgacatcagtttggtcaagaaaaggatgtgtttgcacccagatttagtaataacatcattagcactttccagaatttatatcgttgccctggggatgacaagagtaaaatagtgagagtactaaacttatggcagaagaataatgtatttaagagtgagattattcagccccttttggatatggcagccgggattccgcctccagttgtcacacctgttttggccagcactaccactgctatgagcaatactccaggaactcctgtgacacctgttactccggccaatgtggtccaaggcttacctgatccgtgggtatctcagataacaaatacagatacacttgcggctgtagctcagatcttgcaaagtcctcaaggccagcagcttcaacaattaatacaaaccttacagatacaacaacagaagccccagccttccattctgcaggccctagatgctggtcttgttgttcagttgcaagctcttacggcacaacttacagctgcagctgcagctgccaacactcttactcccttagaacagggagtctcctttaacaagaagttgatggataggtttgattttggggaagactctgagcatagtgaagaacccaaaaaggaaattccagcttcacaactttctcacgtttcagaatctgtgaacaattccatttttcatcagatagcagaacaactacaacagcaaaacctagaacatctcagacagcagctcttggagcagcaacagcctcaaaaggccactcctcaggatagtcaggaaggaacctttgggtcagagcattcagcgtcaccatcacaagggagtagtcagcagcattttcttgaacctgaagtcaatttggatgattccatagatattcagcaacaggatatggatatagatgaagggcaagatggagtggaagaggaggtctttgaacaagaagctaagaaagtggcggttcgctcaagatcaagaacacattcacgatctcgttcaagatcaccaagaaaacgaaggtctaggtcacggtctggctctagaaagcgtaaacacagaaagcgatcacgctcccgctcaagagaaagaaagaggaaatcatcacggtcgtattcaagtgaaaggagagccagagaaagggagaaagaacgacagaaaaagggattacctccaattagatctaaaacactaagtgtatgtagtactactctctgggttgggcaagtggacaagaaggcaacacagcaagacttaaccaacctgtttgaagagtttggacagattgaatccattaatatgattcctccccggggctgtgcttatgtctgcatggttcatcgacaagatgcatttcgagctcttcagaaactcagttctggatcatataaaattgggtccaaggtcattaagatcgcttgggctttaaacaaaggtgtaaaaacagaatacaaacaattctgggatgtggatcttggagttacatatataccatgggaaaaagttaaagtggatgacttggaaggttttgcagaaggaggcatgattgatcaggagactgtaaatactgagtgggaaactgtgaaaagctcagaacctgttaaagagacggtccagacaactcagagcccaactccagttgaaaaggagacagtggtcacaacccaggcagaggttttccctcctcctgttgctatgttgcagattccagtggcgccagccgtgcctacagttagtttagtcccaccagcatttcctgtgtcgatgccggttcctcctcctggattcagtccaatccctccacctccttttttaagagcaagttttaacccttcacaaccaccacctggtttcatgccgcctccagttcccccacctgttgtgccaccccctacgattccaccagtagtaccaacatctttagtgcagccgtcattatccatgacaccggaaactgtgaaagatgttggatttggtagccttgttataccaggcggttctgttgccagcaatcttgctacttccgctctgccagctggaaatgtttttaatgctccaactaaacaggcagagcctgaagaaaaagtacctcatcttatagaccaccagatttcttctggtgaaaacaccagatcaggtaaataataataataaaatttaaaaaaagaggttgcctctctgtatttggtgtttaattctggggtggcatgcgtttgtaaccacttcaatctacagatgctgaaatgtcgcactttttttttaaaagagatcactatgtcctaaaatttctatttgaaaaagtggccttctgttcaggataatctagatttcaatatgtttccattaagaccctcacaccaccacccccttttttttgtcctattgggactacttcagtgtgttgtcaaaataatactgcacaaaatctgtatacttataggaagataaaaatgaacaagtattgggtgtgagtaacttctatcgggaacttacttctaataggtattatccagctagctctagaagataaatatggtgtttgaaagcagtaagtcctttttctatggtcccactgttggtacattaagaattatggtttagaggcacttgaccttgatgcctgtttgggtctcttctaagcatacttttctttcctttctttcctgtcctaaagccttttaaacctccactcctgttcttaaaaaaaaaaaaaaaaaaaaaaaaaggggggggggaaaaaatatccccgggggggggcccaagtttagggcgtacccgggttttttgtacaggtgggccccaaataggagcggaattaaaaacgaaggaangggcggggtgtaccagggcgggctggggacacctggtcggttgggtctttgggaggacctacttctgggggggcaaattttggccaaaccacgaataaagccgaggattttacttccggtaagcgccacggattggggtgaattggtggtttatagtattataataatattatctaataaatattttacaaataactattca

SEQ ID NO: 333343 - DNA, 379 bp, Homo sapiens
  misc_feature (4)..(4): n is a, c, g, or t
  misc_feature (12)..(12): n is a, c, g, or t
  misc_feature (73)..(73): n is a, c, g, or t
  misc_feature (90)..(90): n is a, c, g, or t
  misc_feature (96)..(96): n is a, c, g, or t
tcgncatactgntccgtagtgtcagatggccgccgtatcctacgagccccatggaagacgttggaaatagcanggatccaccctttgacnccttcngaacattcggcacgaggctccccgtactggtgccgccgcagtggccaagttgcgacactgcccacggcccctccctctgatgcagattcagggcttctcttcgatcatgttgggttttgattctgtttttccttgactgcaaaaccctctttcctctcctcttttgggacaagagccctggttttctacgctgcccttggccaccacactgcctgccccacgagctgggaggcaggttttgtacggtacgttgttattgatatgatataaaacatcaaacgtc

SEQ ID NO: 333344 - DNA, 747 bp, Homo sapiens
ccactgtgggctcagcacccacacaactgcacaagcccacctttcctgttccttctcaggtggctcacccagaaaggcgcccggcagaagaaaatcaacgagtggctggggattaaaaatgagactgaggaccagtacgcactcatggaggacgagtgctttttagagatgctttctatttcaatgttggcatactgcctgagggtattgcagttgtgggtgcattccctaatttgtatgatcaagatgaactggcccttttctacttccaagcttttaacagataccaccatatttgacagaattcccagagtgaattgcttgtgttattagtagattcagtgcccccagctgggataggcaagccatgacagcttccctgtttcacctacagaagtcttatctgagggatctattcacagtaagcaccaaggtctccatgtcttgaggtcagtttcattgtcttttgaaaagtgcatgcttcatttgaacaattcattcagcagcagatggactttcagtgatttaaaataaaattttgatccaaagctcaggacacaaaccacagtggtaaaattgagtagcatataatatcagactaaattatctgtaattttccacaacccagatgtatgtgtttatgtgtgtttaaataatatgttagatacacgtgtatacatacacccatatacaacagatccaagactggctgaccttcctttgaaatggttgaatctgctgtgtata

SEQ ID NO: 333345 - DNA, 4417 bp, Homo sapiens
tgggcactgagcacattcggttatttccagaaacgctccgcggtcttggggatcagcctcagttgtgccagtgcggccgtagagagtgttcggccatttccgaaagcgctcgggcgtctctaagcccagccgagcccagtctcggatccctcgccgacccgattgcactcggctacctctggaaacgctcggctgtctcgggggcaccctctagtccaccagtcccgcgggattacgttcggctacttccggaaacactcgggtgcccccttacctcaggctccgcctcggcctcggttcatccgcccggctcgaatgcgctcgggcatttccgccgggggcgggccaggccgctcggaaccgtggcggcggcggaggcggggatcccgcggctgcggcgacggtggccgcggtggagccacggggcgggcttggcttggtgtgacggcggctgcggcggcggtggcggccgcgaccaggtcggcgtcctcagctggccgagcatggtggcagcctgcacccttggctcccttgtctggtgcagccagcagagccgccagccttgggcgcccatggccctccgtgtgagggcgtgagcggcctgccccagcctcacctgctgatggaggactcaatggcccagtgacctgacaccacaccaccaactccctcccaccagctgacgaatggtggacccagtgacgagtggcccttgtaagggtcatggaataatttgaagcgaggcatgagcggcccctgtggtcgcctgtgactgctggagatagaggtcccagcaccccaagccaacccagcggaccctcccagccctgcttcaaccaatggggccagtggggctccaagcagccacctaaccatccagaccccaccccactcacgcggccatggcgggccctgagggcttccagtaccgcgctctgtacccgttccgccgggagcggccggaggacctggagctgctgcccggcgacgtgctggtagtgagccgggcggccttgcaggcgctgggcgtggccgagggtggcgagcgctgcccacagagcgtgggctggatgcccggcctcaacgagcgcacacggcagcgaggtgacttccctggcacctatgtggagttcctggggcccgtggccctggcccggcccggccctcgcccacggggcccccgcccactgcccgccaggccccgtgatggggcccctgagccaggcctcacactccccgacttgcccgagcagttctccccacctgatgtggctccccctcttctggtgaagcttgtggaggccattgaaaggacagggctggacagcgaatctcactaccgcccggagctgcccgcaccgcgtacagactggtccctgagcgacgtggatcagtgggacacggcagccctggctgacggcattaagagcttcctgctggcactgcccgcgccgctcgtgacccccgaggcctcggccgaggcgcgccgggccctgcgggaggccgcggggcccgtggggccggcgctggagccaccgacgctgccgctgcaccgcgcgctcacgctgcgcttcctgctccagcacctgggccgcgtggcccgccgcgccccggccctgggtcccgcggtccgggccctgggcgccacctttgggccgctgctgctgcgcgcgccgccgccgccgtcctcgccgccgccagggggcgctcccgacgggagtgagcccagccctgacttcccggcgctgctggtggagaagctgcttcaggaacacttggaagagcaggaggttgcgcccccagcgctgccgcctaaaccccccaaggcaaagccggcccccacagtcctggccaatggagggagcccaccctccctgcaggatgctgagtggtactggggggacatttcaagggaggaggtgaacgagaaactccgggacactcccgatggcaccttcctagtccgagatgcttctagcaagatccagggcgagtacacgctgaccctcaggaaaggcgggaacaataagctgatcaaggtcttccaccgagatgggcactatggcttctcagagccactcaccttctgctccgttgtggacctcatcaatcactaccgccacgagtctctggcccagtacaatgccaagctggacacacggctcctctaccctgtgtccaaataccagcaggaccagattgtcaaggaggacagcgtggaggcagtgggcgcccagcttaaggtctatcaccagcagtaccaggacaagagccgcgagtatgaccagctttatgaagagtacacacggacctcccaggagctgcagatgaagcgtactgcaattgaggccttcaatgagactatcaagatctttgaagagcagggccagactcaagagaaatgcagcaaggaatacctggagcgcttccggcgtgagggcaacgagaaagagatgcaaaggatcctgctgaactccgagcggctcaagtcccgcattgccgagatccatgagagccgcacgaagctggagcagcagctgcgggcccaggcctcggacaacagagagatcgacaagcgcatgaacagcctcaagccggacctcatgcagctgcgcaagatccgagaccagtacctcgtgtggctcacccagaaaggcgcccggcagaagaaaatcaacgagtggctggggattaaaaatgagactgaggaccagtacgcactcatggaggacgaggacgatctcccgcaccacgaggaacgcacttggtacgtgggcaagatcaaccgcacgcaggcagaggagatgctgagcggcaagcgggatggcaccttcctcatccgcgagagcagccagcggggctgctacgcctgctccgtggtagtggacggcgacaccaagcactgcgtcatctaccgcacggccaccggcttcggcttcgcggagccctacaacctgtacgggtcgctgaaggagctggtgctgcactaccagcacgcctcgctggtgcagcacaacgacgcgctcaccgtcaccctggcgcacccagtgcgcgccccgggccccggcccgccgcctgccgcccgctgagcaccgaggacccgccccaagcagagccgcccctgggcccgtctgcgccggaggctgcggcggcgggagccacggaccagaccagccacatccaggggtcctcatttctccggctctggctcttgtttggggttctctcaccctctttctctttccttccctcccccattctccagatctccctctgtctccttttctctgtctttcttggcccctgtctctctccatgttgggggtcctaactcccccaccccatatctacgtgtcctccgggcattgccctctccatggctctggtcaccctgaccctctgccctgcccaccgcaggtcccccggggtcccggaagccccttctggctgcacctgccatgtttacagagggcccctgggctgcgcggccccagcctgggcaccctgatttttaagccatagacctggggtcagggcaggaaggaacttcactctgctgcttccgagaacctcggccgtgacattcggggccgggcgggacccgccccacagactccaacttcccctccaaaccccgaagtgaaacccgccaccgggttacccccacaagggggccgctgcgagaagttcacccacccccgaaaaaataattaaactcgcaggccaggcacggtggctcatgcctgtaatcccagcactttgggaggccaagacgggcggatcttttgaggtcgggagttggaggccagcctggccaaaatggcaaaaccccgcatctactaaaatacaaaaattagccgggcgtggtggcggccgcctgtaatcccagctacttgggaggctgaggcgtgagaatctcttgaacccaggagatggaggttgcagtgagcagagatcgtgccactgcactccagcctgggtaacagagggagactcctccgtctcaaaaaaataaataaataaacttgtgagctggccccaacccctcctaggaatcacagctccccgtactggtgccgccgcagtggccaagttgcgacactgcccacggcccctccctctgatgcagattcagggcttctcttcgatcatgttgggttttgattctgtttttccttgactgcaaaaccctctttcctctcctcttttgggacaagagccctggttttctacgctgcccttggccaccacactgcccacggccctccctctgatgcagattcagggcttctcttcgatcatgtgggtttgattctgtttttccttgactgaaaaccctctttcctctcctcttttgggacaagagccctggttttctacgctgccttggcaccacactgctgccccacgagctgga

SEQ ID NO: 333346 - DNA, 4101 bp, Homo sapiens
tgggcactgagcacattcggttatttccagaaacgctccgcggtcttggggatcagcctcagttgtgccagtgcggccgtagagagtgttcggccatttccgaaagcgctcgggcgtctctaagcccagccgagcccagtctcggatccctcgccgacccgattgcactcggctacctctggaaacgctcggctgtctcgggggcaccctctagtccaccagtcccgcgggattacgttcggctacttccggaaacactcgggtgcccccttacctcaggctccgcctcggcctcggttcatccgcccggctcgaatgcgctcgggcatttccgccgggggcgggccaggccgctcggaaccgtggcggcggcggaggcggggatcccgcggctgcggcgacggtggccgcggtggagccacggggcgggcttggcttggtgtgacggcggctgcggcggcggtggcggccgcgaccaggtcggcgtcctcagctggccgagcatggtggcagcctgcacccttggctcccttgtctggtgcagccagcagagccgccagccttgggcgcccatggccctccgtgtgagggcgtgagcggcctgccccagcctcacctgctgatggaggactcaatggcccagtgacctgacaccacaccaccaactccctcccaccagctgacgaatggtggacccagtgacgagtggcccttgtaagggtcatggaataatttgaagcgaggcatgagcggcccctgtggtcgcctgtgactgctggagatagaggtcccagcaccccaagccaacccagcggaccctcccagccctgcttcaaccaatggggccagtggggctccaagcagccacctaaccatccagaccccaccccactcacgcggccatggcgggccctgagggcttccagtaccgcgctctgtacccgttccgccgggagcggccggaggacctggagctgctgcccggcgacgtgctggtagtgagccgggcggccttgcaggcgctgggcgtggccgagggtggcgagcgctgcccacagagcgtgggctggatgcccggcctcaacgagcgcacacggcagcgaggtgacttccctggcacctatgtggagttcctggggcccgtggccctggcccggcccggccctcgcccacggggcccccgcccactgcccgccaggccccgtgatggggcccctgagccaggcctcacactccccgacttgcccgagcagttctccccacctgatgtggctccccctcttctggtgaagcttgtggaggccattgaaaggacagggctggacagcgaatctcactaccgcccggagctgcccgcaccgcgtacagactggtccctgagcgacgtggatcagtgggacacggcagccctggctgacggcattaagagcttcctgctggcactgcccgcgccgcgccgtcctcgccgccgccagggggcgctcccgacgggagtgagcccagccctgacttcccggcgctgctggtggagaagctgcttcaggaacacttggaagagcaggaggttgcgcccccagcgctgccgcctaaaccccccaaggcaaagccggcccccacagtcctggccaatggagggagcccaccctccctgcaggatgctgagtggtactggggggacatttcaagggaggaggtgaacgagaaactccgggacactcccgatggcaccttcctagtccgagatgcttctagcaagatccagggcgagtacacgctgaccctcaggaaaggcgggaacaataagctgatcaaggtcttccaccgagatgggcactatggcttctcagagccactcaccttctgctccgttgtggacctcatcaatcactaccgccacgagtctctggcccagtacaatgccaagctggacacacggctcctctaccctgtgtccaaataccagcaggaccagattgtcaaggaggacagcgtggaggcagtgggcgcccagcttaaggtctatcaccagcagtaccaggacaagagccgcgagtatgaccagctttatgaagagtacacacggacctcccaggagctgcagatgaagcgtactgcaattgaggccttcaatgagactatcaagatctttgaagagcagggccagactcaagagaaatgcagcaaggaatacctggagcgcttccggcgtgagggcaacgagaaagagatgcaaaggatcctgctgaactccgagcggctcaagtcccgcattgccgagatccatgagagccgcacgaagctggagcagcagctgcgggcccaggcctcggacaacagagagatcgacaagcgcatgaacagcctcaagccggacctcatgcagctgcgcaagatccgagaccagtacctcgtgtggctcacccagaaaggcgcccggcagaagaaaatcaacgagtggctggggattaaaaatgagactgaggaccagtacgcactcatggaggacgaggacgatctcccgcaccacgaggaacgcacttggtacgtgggcaagatcaaccgcacgcaggcagaggagatgctgagcggcaagcgggatggcaccttcctcatccgcgagagcagccagcggggctgctacgcctgctccgtggtagtggacggcgacaccaagcactgcgtcatctaccgcacggccaccggcttcggcttcgcggagccctacaacctgtacgggtcgctgaaggagctggtgctgcactaccagcacgcctcgctggtgcagcacaacgacgcgctcaccgtcaccctggcgcacccagtgcgcgccccgggccccggcccgccgcctgccgcccgctgagcaccgaggacccgccccaagcagagccgcccctgggcccgtctgcgccggaggctgcggcggcgggagccacggaccagaccagccacatccaggggtcctcatttctccggctctggctcttgtttggggttctctcaccctctttctctttccttccctcccccattctccagatctccctctgtctccttttctctgtctttcttggcccctgtctctctccatgttgggggtcctaactcccccaccccatatctacgtgtcctccgggcattgccctctccatggctctggtcaccctgaccctctgccctgcccaccgcaggtcccccggggtcccggaagccccttctggctgcacctgccatgtttacagagggcccctgggctgcgcggccccagcctgggcaccctgatttttaagccatagacctggggtcagggcaggaaggaacttcactctgctgcttccgagaacctcggccgtgacattcggggccgggcgggacccgccccacagactccaacttcccctccaaaccccgaagtgaaacccgccaccgggttacccccacaagggggccgctgcgagaagttcacccacccccgaaaaaataattaaactcgcaggccaggcacggtggctcatgcctgtaatcccagcactttgggaggccaagacgggcggatcttttgaggtcgggagttggaggccagcctggccaaaatggcaaaaccccgcatctactaaaatacaaaaattagccgggcgtggtggcggccgcctgtaatcccagctacttgggaggctgaggcgtgagaatctcttgaacccaggagatggaggttgcagtgagcagagatcgtgccactgcactccagcctgggtaacagagggagactcctccgtctcaaaaaaataaataaataaacttgtgagctggccccaacccctcctaggaatcacagctccccgtactggtgccgccgcagtggccaagttgcgacactgcccacggcccctccctctgatgcagattcagggcttctcttcgatcatgttgggttttgattctgtttttccttgactgcaaaaccctctttcctctcctcttttgggacaagagccctggttttctacgctgcccttggccaccacactgcctgccccacgagctgggaggcaggttttgtacggtacgttgttattgatatgatataaaacatcaaacgtc

SEQ ID NO: 333347 - DNA, 2156 bp, Homo sapiens
attccgccacgtatctagcaggaccagattgtcaaggaggacagcgtggaggcagtgggcgcccagcttaaggtctatcaccagcagtaccaggacaagagccgcgagtatgaccagctttatgaagagtacacacggacctcccaggagctgcagatgaagcgtactgcaattgaggccttcaatgagactatcaagatctttgaagagcagggccagactcaagagaaatgcagcaaggaatacctggagcgcttccggcgtgagggcaacgagaaagagatgcaaaggatcctgctgaactccgagcggctcaagtcccgcattgccgagatccatgagagccgcacgaagctggagcagcagctgcgggcccaggcctcggacaacagagagatcgacaagcgcatgaacagcctcaagccggacctcatgcagctgcgcaagatccgagaccagtacctcgtgtggctcacccagaaaggcgcccggcagaagaaaatcaacgagtggctggggattaaaaatgagactgaggaccagtacgcactcatggaggacgaggacgatctcccgcaccacgaggaacgcacttggtacgtgggcaagatcaaccgcacgcaggcagaggagatgctgagcggcaagcgggatggcaccttcctcatccgcgagagcagccagcggggctgctacgcctgctccgtggtagtggacggcgacaccaagcactgcgtcatctaccgcacggccaccggcttcggcttcgcggagccctacaacctgtacgggtcgctgaaggagctggtgctgcactaccagcacgcctcgctggtgcagcacaacgacgcgctcaccgtcaccctggcgcacccagtgcgcgccccgggccccggcccgccgcctgccgcccgctgagcaccgaggacccgccccaagcagagccgcccctgggcccgtctgcgccggaggctgcggcggcgggagccacggaccagaccagccacatccaggggtcctcatttctccggctctggctcttgtttggggttctctcaccctctttctctttccttccctcccccattctccagatctccctctgtctccttttctctgtctttcttggcccctgtctctctccatgttgggggtcctaactcccccaccccatatctacgtgtcctccgggcattgccctctccatggctctggtcaccctgaccctctgccctgcccaccgcaggtcccccggggtcccggaagccccttctggctgcacctgccatgtttacagagggcccctgggctgcgcggccccagcctgggcaccctgatttttaagccatagacctggggtcagggcaggaaggaacttcactctgctgcttccgagaacctcggccgtgacattcggggccgggcgggacccgccccacagactccaacttcccctccaaaccccgaagtgaaacccgccaccgggttacccccacaagggggccgctgcgagaagttcacccacccccgaaaaaataattaaactcgcaggccaggcacggtggctcatgcctgtaatcccagcactttgggaggccaagacgggcggatcttttgaggtcgggagttggaggccagcctggccaaaatggcaaaaccccgcatctactaaaatacaaaaattagccgggcgtggtggcggccgcctgtaatcccagctacttgggaggctgaggcgtgagaatctcttgaacccaggagatggaggttgcagtgagcagagatcgtgccactgcactccagcctgggtaacagagggagactcctccgtctcaaaaaaataaataaataaacttgtgagctggccccaacccctcctaggaatcacagctccccgtactggtgccgccgcagtggccaagttgcgacactgcccacggcccctccctctgatgcagattcagggcttctcttcgatcatgttgggttttgattctgtttttccttgactgcaaaaccctctttcctctcctcttttgggacaagagccctggttttctacgctgcccttggccaccacactgcctgccccacgagctgggaggcaggttttgtacggtacgttgttattgatatgatataaaacatcaaacgtc

SEQ ID NO: 333348 - DNA, 3326 bp, Homo sapiens
tgggcactgagcacattcggttatttccagaaacgctccgcggtcttggggatcagcctcagttgtgccagtgcggccgtagagagtgttcggccatttccgaaagcgctcgggcgtctctaagcccagccgagcccagtctcggatccctcgccgacccgattgcactcggctacctctggaaacgctcggctgtctcgggggcaccctctagtccaccagtcccgcgggattacgttcggctacttccggaaacactcgggtgcccccttacctcaggctccgcctcggcctcggttcatccgcccggctcgaatgcgctcgggcatttccgccgggggcgggccaggccgctcggaaccgtggcggcggcggaggcggggatcccgcggctgcggcgacggtggccgcggtggagccacggggcgggcttggcttggtgtgacggcggctgcggcggcggtggcggccgcgaccaggtcggcgtcctcagctggccgagcatggtggcagcctgcacccttggctcccttgtctggtgcagccagcagagccgccagccttgggcgcccatggccctccgtgtgagggcgtgagcggcctgccccagcctcacctgctgatggaggactcaatggcccagtgacctgacaccacaccaccaactccctcccaccagctgacgaatggtggacccagtgacgagtggcccttgtaagggtcatggaataatttgaagcgaggcatgagcggcccctgtggtcgcctgtgactgctggagatagaggtcccagcaccccaagccaacccagcggaccctcccagccctgcttcaaccaatggggccagtggggctccaagcagccacctaaccatccagaccccaccccactcacgcggccatggcgggccctgagggcttccagtaccgcgctctgtacccgttccgccgggagcggccggaggacctggagctgctgcccggcgacgtgctggtagtgagccgggcggccttgcaggcgctgggcgtggccgagggtggcgagcgctgcccacagagcgtgggctggatgcccggcctcaacgagcgcacacggcagcgaggtgacttccctggcacctatgtggagttcctggggcccgtggccctggcccggcccggccctcgcccacggggcccccgcccactgcccgccaggccccgtgatggggcccctgagccaggcctcacactccccgacttgcccgagcagttctccccacctgatgtggctccccctcttctggtgaagcttgtggaggccattgaaaggacagggctggacagcgaatctcactaccgcccggagctgcccgcaccgcgtacagactggtccctgagcgacgtggatcagtgggacacggcagccctggctgacggcattaagagcttcctgctggcactgcccgcgccgctcgtgacccccgaggcctcggccgaggcgcgccgggccctgcgggaggccgcggggcccgtggggccggcgctggagccaccgacgctgccgctgcaccgcgcgctcacgctgcgcttcctgctccagcacctgggccgcgtggcccgccgcgccccggccctgggtcccgcggtccgggccctgggcgccacctttgggccgctgctgctgcgcgcgccgccgccgccgtcctcgccgccgccagggggcgctcccgacgggagtgagcccagccctgacttcccggcgctgctggtggagaagctgcttcaggaacacttggaagagcaggaggttgcgcccccagcgctgccgcctaaaccccccaaggcaaagccggcccccacagtcctggccaatggagggagcccaccctccctgcaggatgctgagtggtactggggggacatttcaagggaggaggtgaacgagaaactccgggacactcccgatggcaccttcctagtccgagatgcttctagcaagatccagggcgagtacacgctgaccctcaggaaaggcgggaacaataagctgatcaaggtcttccaccgagatgggcactatggcttctcagagccactcaccttctgctccgttgtggacctcatcaatcactaccgccacgagtctctggcccagtacaatgccaagctggacacacggctcctctaccctgtgtccaaataccagcaggaccagattgtcaaggaggacagcgtggaggcagtgggcgcccagcttaaggtctatcaccagcagtaccaggacaagagccgcgagtatgaccagctttatgaagagtacacacggacctcccaggagctgcagatgaagcgtactgcaattgaggccttcaatgagactatcaagatctttgaagagcagggccagactcaagagaaatgcagcaaggaatacctggagcgcttccggcgtgagggcaacgagaaagagatgcaaaggatcctgctgaactccgagcggctcaagtcccgcattgccgagatccatgagagccgcacgaagctggagcagcagctgcgggcccaggcctcggacaacagagagatcgacaagcgcatgaacagcctcaagccggacctcatgcagctgcgcaagatccgagaccagtacctcgtgtggctcacccagaaaggcgcccggcagaagaaaatcaacgagtggctggggattaaaaatgagactgaggaccagtacgcactcatggaggacgaggacgatctcccgcaccacgaggaacgcacttggtacgtgggcaagatcaaccgcacgcaggcagaggagatgctgagcggcaagcgggatggcaccttcctcatccgcgagagcagccagcggggctgctacgcctgctccgtggtagtggacggcgacaccaagcactgcgtcatctaccgcacggccaccggcttcggcttcgcggagccctacaacctgtacgggtcgctgaaggagctggtgctgcactaccagcacgcctcgctggtgcagcacaacgacgcgctcaccgtcaccctggcgcacccagtgcgcgccccgggccccggcccgccgcctgccgcccgctgagcaccgaggacccgccaagagagcgcctgggccgttggcgagtgcgggcgggagcagacaaacagcactcagggtccaatctccggctgctgttgggtttcacctttttttctctcccatttcaatccttgtcttttggtttggccgtctctcagtggggtaacccccattgtccggagccctgttggccactcgccggcggacttggtatagggggcccaatgggatcacacacgg

SEQ ID NO: 333349 - DNA, 2857 bp, Homo sapiens
tgggcactgagcacattcggttatttccagaaacgctccgcggtcttggggatcagcctcagttgtgccagtgcggccgtagagagtgttcggccatttccgaaagcgctcgggcgtctctaagcccagccgagcccagtctcggatccctcgccgacccgattgcactcggctacctctggaaacgctcggctgtctcgggggcaccctctagtccaccagtcccgcgggattacgttcggctacttccggaaacactcgggtgcccccttacctcaggctccgcctcggcctcggttcatccgcccggctcgaatgcgctcgggcatttccgccgggggcgggccaggccgctcggaaccgtggcggcggcggaggcggggatcccgcggctgcggcgacggtggccgcggtggagccacggggcgggcttggcttggtgtgacggcggctgcggcggcggtggcggccgcgaccaggtcggcgtcctcagctggccgagcatggtggcagcctgcacccttggctcccttgtctggtgcagccagcagagccgccagccttgggcgcccatggccctccgtgtgagggcgtgagcggcctgccccagcctcacctgctgatggaggactcaatggcccagtgacctgacaccacaccaccaactccctcccaccagctgacgaatggtggacccagtgacgagtggcccttgtaagggtcatggaataatttgaagcgaggcatgagcggcccctgtggtcgcctgtgactgctggagatagaggtcccagcaccccaagccaacccagcggaccctcccagccctgcttcaaccaatggggccagtggggctccaagcagccacctaaccatccagaccccaccccactcacgcggccatggcgggccctgagggcttccagtaccgcgctctgtacccgttccgccgggagcggccggaggacctggagctgctgcccggcgacgtgctggtagtgagccgggcggccttgcaggcgctgggcgtggccgagggtggcgagcgctgcccacagagcgtgggctggatgcccggcctcaacgagcgcacacggcagcgaggtgacttccctggcacctatgtggagttcctggggcccgtggccctggcccggcccggccctcgcccacggggcccccgcccactgcccgccaggccccgtgatggggcccctgagccaggcctcacactccccgacttgcccgagcagttctccccacctgatgtggctccccctcttctggtgaagcttgtggaggccattgaaaggacagggctggacagcgaatctcactaccgcccggagctgcccgcaccgcgtacagactggtccctgagcgacgtggatcagtgggacacggcagccctggctgacggcattaagagcttcctgctggcactgcccgcgccgctcgtgacccccgaggcctcggccgaggcgcgccgggccctgcgggaggccgcggggcccgtggggccggcgctggagccaccgacgctgccgctgcaccgcgcgctcacgctgcgcttcctgctccagcacctgggccgcgtggcccgccgcgccccggccctgggtcccgcggtccgggccctgggcgccacctttgggccgctgctgctgcgcgcgccgccgccgccgtcctcgccgccgccagggggcgctcccgacgggagtgagcccagccctgacttcccggcgctgctggtggagaagctgcttcaggaacacttggaagagcaggaggttgcgcccccagcgctgccgcctaaaccccccaaggcaaagccggcccccacagtcctggccaatggagggagcccaccctccctgcaggatgctgagtggtactggggggacatttcaagggaggaggtgaacgagaaactccgggacactcccgatggcaccttcctagtccgagatgcttctagcaagatccagggcgagtacacgctgaccctcaggaaaggcgggaacaataagctgatcaaggtcttccaccgagatgggcactatggcttctcagagccactcaccttctgctccgttgtggacctcatcaatcactaccgccacgagtctctggcccagtacaatgccaagctggacacacggctcctctaccctgtgtccaaataccagcaggaccagattgtcaaggaggacagcgtggaggcagtgggcgcccagcttaaggtctatcaccagcagtaccaggacaagagccgcgagtatgaccagctttatgaagagtacacacggacctcccaggagctgcagatgaagcgtactgcaattgaggccttcaatgagactatcaagatctttgaagagcagggccagactcaagagaaatgcagcaaggaatacctggagcgcttccggcgtgagggcaacgagaaagagatgcaaaggatcctgctgaactccgagcggctcaagtcccgcattgccgagatccatgagagccgcacgaagctggagcagcagctgcgggcccaggcctcggacaacagagagatcgacaagcgcatgaacagcctcaagccggacctcatgcagctgcgcaagatccgagaccagtacctcgtgtggctcacccagaaaggcgcccggcagaagaaaatcaacgagtggctggggattaaaaatgagactgaggagtgagtgaccgtctggagggaggcagggagggcttcccagaggagggggccatttggggtgggtttcgaagaatgagtaggagttcaccagggaggaaaagttgtccaggcagctggggagcctcggaggctggcaggtgagtgacc

SEQ ID NO: 333350 - DNA, 2222 bp, Homo sapiens
tgggcactgagcacattcggttatttccagaaacgctccgcggtcttggggatcagcctcagttgtgccagtgcggccgtagagagtgttcggccatttccgaaagcgctcgggcgtctctaagcccagccgagcccagtctcggatccctcgccgacccgattgcactcggctacctctggaaacgctcggctgtctcgggggcaccctctagtccaccagtcccgcgggattacgttcggctacttccggaaacactcgggtgcccccttacctcaggctccgcctcggcctcggttcatccgcccggctcgaatgcgctcgggcatttccgccgggggcgggccaggccgctcggaaccgtggcggcggcggaggcggggatcccgcggctgcggcgacggtggccgcggtggagccacggggcgggcttggcttggtgtgacggcggctgcggcggcggtggcggccgcgaccaggtcggcgtcctcagctggccgagcatggtggcagcctgcacccttggctcccttgtctggtgcagccagcagagccgccagccttgggcgcccatggccctccgtgtgagggcgtgagcggcctgccccagcctcacctgctgatggaggactcaatggcccagtgacctgacaccacaccaccaactccctcccaccagctgacgaatggtggacccagtgacgagtggcccttgtaagggtcatggaataatttgaagcgaggcatgagcggcccctgtggtcgcctgtgactgctggagatagaggtcccagcaccccaagccaacccagcggaccctcccagccctgcttcaaccaatggggccagtggggctccaagcagccacctaaccatccagaccccaccccactcacgcggccatggcgggccctgagggcttccagtaccgcgctctgtacccgttccgccgggagcggccggaggacctggagctgctgcccggcgacgtgctggtagtgagccgggcggccttgcaggcgctgggcgtggccgagggtggcgagcgctgcccacagagcgtgggctggatgcccggcctcaacgagcgcacacggcagcgaggtgacttccctggcacctatgtggagttcctggggcccgtggccctggcccggcccggccctcgcccacggggcccccgcccactgcccgccaggccccgtgatggggcccctgagccaggcctcacactccccgacttgcccgagcagttctccccacctgatgtggctccccctcttctggtgaagcttgtggaggccattgaaaggacagggctggacagcgaatctcactaccgcccggagctgcccgcaccgcgtacagactggtccctgagcgacgtggatcagtgggacacggcagccctggctgacggcattaagagcttcctgctggcactgcccgcgccgctcgtgacccccgaggcctcggccgaggcgcgccgggccctgcgggaggccgcggggcccgtggggccggcgctggagccaccgacgctgccgctgcaccgcgcgctcacgctgcgcttcctgctccagcacctgggccgcgtggcccgccgcgccccggccctgggtcccgcggtccgggccctgggcgccacctttgggccgctgctgctgcgcgcgccgccgccgccgtcctcgccgccgccagggggcgctcccgacgggagtgagcccagccctgacttcccggcgctgctggtggagaagctgcttcaggaacacttggaagagcaggaggttgcgcccccagcgctgccgcctaaaccccccaaggcaaagccggcccccacagtcctggccaatggagggagcccaccctccctgcaggatgctgagtggtactggggggacatttcaagggaggaggtgaacgagaaactccgggacactcccgatggcaccttcctagtccgagatgcttctagcaagatccagggcgagtacacgctgaccctcaggtgggggcctgtccctgcaaggataaccgggggtcacaggtcacagagaccgggagttcagaggggatagaacatgtgcggtttcaagaatggagggccaggcacggtggcttacacctgtaatcccagcactttgggaggctgaggctggcagaacacctgaggtcaggagtttaaaaccagcctggccaacatggtgaaaccccgtctc

SEQ ID NO: 333351 - DNA, 253 bp, Homo sapiens
gtgagtcctgactggccctcgtggcgggggcggctgggagtgtgcttaaatgcggggcgcccgggggcagtgccgggccccggtggaagccagaacgcaagcgccaggctgcgtcgggccccgcgggaactgggggggccgcaggcaagggggggcctcgggctcggctccgcagcggtgcagcctccttgggacggtcggggcagaatggggagagactccccgcgtccaagataccggactggagccgagg

SEQ ID NO: 333352 - DNA, 4327 bp, Homo sapiens
tgggcactgagcacattcggttatttccagaaacgctccgcggtcttggggatcagcctcagttgtgccagtgcggccgtagagagtgttcggccatttccgaaagcgctcgggcgtctctaagcccagccgagcccagtctcggatccctcgccgacccgattgcactcggctacctctggaaacgctcggctgtctcgggggcaccctctagtccaccagtcccgcgggattacgttcggctacttccggaaacactcgggtgcccccttacctcaggctccgcctcggcctcggttcatccgcccggctcgaatgcgctcgggcatttccgccgggggcgggccaggccgctcggaaccgtggcggcggcggaggcggggatcccgcggctgcggcgacggtggccgcggtggagccacggggcgggcttggcttggtgtgacggcggctgcggcggcggtggcggccgcgaccaggtcggcgtcctcagctggccgagcatggtggcagcctgcacccttggctcccttgtctggtgcagccagcagagccgccagccttgggcgcccatggccctccgtgtgagggcgtgagcggcctgccccagcctcacctgctgatggaggactcaatggcccagtgacctgacaccacaccaccaactccctcccaccagctgacgaatggtggacccagtgacgagtggcccttgtaagggtcatggaataatttgaagcgaggcatgagcggcccctgtggtcgcctgtgactgctggagatagaggtcccagcaccccaagccaacccagcggaccctcccagccctgcttcaaccaatggggccagtggggctccaagcagccacctaaccatccagaccccaccccactcacgcggccatggcgggccctgagggcttccagtaccgcgctctgtacccgttccgccgggagcggccggaggacctggagctgctgcccggcgacgtgctggtagtgagccgggcggccttgcaggcgctgggcgtggccgagggtggcgagcgctgcccacagagcgtgggctggatgcccggcctcaacgagcgcacacggcagcgaggtgacttccctggcacctatgtggagttcctggggcccgtggccctggcccggcccggccctcgcccacggggcccccgcccactgcccgccaggccccgtgatggggcccctgagccaggcctcacactccccgacttgcccgagcagttctccccacctgatgtggctccccctcttctggtgaagcttgtggaggccattgaaaggacagggctggacagcgaatctcactaccgcccggagctgcccgcaccgcgtacagactggtccctgagcgacgtggatcagtgggacacggcagccctggctgacggcattaagagcttcctgctggcactgcccgcgccgctcgtgacccccgaggcctcggccgaggcgcgccgggccctgcgggaggccgcggggcccgtggggccggcgctggagccaccgacgctgccgctgcaccgcgcgctcacgctgcgcttcctgctccagcacctgggccgcgtggcccgccgcgccccggccctgggtcccgcggtccgggccctgggcgccacctttgggccgctgctgctgcgcgcgccgccgccgccgtcctcgccgccgccagggggcgctcccgacgggagtgagcccagccctgacttcccggcgctgctggtggagaagctgcttcaggaacacttggaagagcaggaggttgcgcccccagcgctgccgcctaaaccccccaaggcaaagccggcccccacagtcctggccaatggagggagcccaccctccctgcaggatgctgagtggtactggggggacatttcaagggaggaggtgaacgagaaactccgggacactcccgatggcaccttcctagtccgagatgcttctagcaagatccagggcgagtacacgctgaccctcaggaaaggcgggaacaataagctgatcaaggtcttccaccgagatgggcactatggcttctcagagccactcaccttctgctccgttgtggacctcatcaatcactaccgccacgagtctctggcccagtacaatgccaagctggacacacggctcctctaccctgtgtccaaataccagcaggaccagattgtcaaggaggacagcgtggaggcagtgggcgcccagcttaaggtctatcaccagcagtaccaggacaagagccgcgagtatgaccagctttatgaagagtacacacggacctcccaggagctgcagatgaagcgtactgcaattgaggccttcaatgagactatcaagatctttgaagagcagggccagactcaagagaaatgcagcaaggaatacctggagcgcttccggcgtgagggcaacgagaaagagatgcaaaggatcctgctgaactccgagcggctcaagtcccgcattgccgagatccatgagagccgcacgaagctggagcagcagctgcgggcccaggcctcggacaacagagagatcgacaagcgcatgaacagcctcaagccggacctcatgcagctgcgcaagatccgagaccagtacctcgtgtggctcacccagaaaggcgcccggcagaagaaaatcaacgagtggctggggattaaaaatgagactgaggaccagtacgcactcatggaggacgaggacgatctcccgcaccacgaggaacgcacttggtacgtgggcaagatcaaccgcacgcaggcagaggagatgctgagcggcaagcgggatggcaccttcctcatccgcgagagcagccagcggggctgctacgcctgctccgtggtagtggacggcgacaccaagcactgcgtcatctaccgcacggccaccggcttcggcttcgcggagccctacaacctgtacgggtcgctgaaggagctggtgctgcactaccagcacgcctcgctggtgcagcacaacgacgcgctcaccgtcaccctggcgcacccagtgcgcgccccgggccccggcccgccgcctgccgcccgctgagcaccgaggacccgccccaagcagagccgcccctgggcccgtctgcgccggaggctgcggcggcgggagccacggaccagaccagccacatccaggggtcctcatttctccggctctggctcttgtttggggttctctcaccctctttctctttccttccctcccccattctccagatctccctctgtctccttttctctgtctttcttggcccctgtctctctccatgttgggggtcctaactcccccaccccatatctacgtgtcctccgggcattgccctctccatggctctggtcaccctgaccctctgccctgcccaccgcaggtcccccggggtcccggaagccccttctggctgcacctgccatgtttacagagggcccctgggctgcgcggccccagcctgggcaccctgatttttaagccatagacctggggtcagggcaggaaggaacttcactctgctgcttccgagaacctcggccgtgacattcggggccgggcgggacccgccccacagactccaacttcccctccaaaccccgaagtgaaacccgccaccgggttacccccacaagggggccgctgcgagaagttcacccacccccgaaaaaataattaaactcgcaggccaggcacggtggctcatgcctgtaatcccagcactttgggaggccaagacgggcggatcttttgaggtcgggagttggaggccagcctggccaaaatggcaaaaccccgcatctactaaaatacaaaaattagccgggcgtggtggcggccgcctgtaatcccagctacttgggaggctgaggcgtgagaatctcttgaacccaggagatggaggttgcagtgagcagagatcgtgccactgcactccagcctgggtaacagagggagactcctccgtctcaaaaaaataaataaataaacttgtgagctggccccaacccctcctaggaatcacagctccccgtactggtgccgccgcagtggccaagttgcgacactgcccacggcccctccctctgatgcagattcagggcttctcttcgatcatgttgggttttgattctgtttttccttgactgcaaaaccctctttcctctcctcttttgggacaagagccctggttttctacgctgcccttggccaccacactgcctgccccacgagctgggaggcaggttttgtacggtacgttgttattgatatgatataaaacatcaaacgtc

SEQ ID NO: 333353 - DNA, 3062 bp, Homo sapiens
cgaggtcggggcagcatttgagagctgactcgcctgtccccttcacccccagggctggacagcgaatctcactaccgcccggagctgcccgcaccgcgtacagactggtccctgagcgacgtggatcagtgggacacggcagccctggctgacggcattaagagcttcctgctggcactgcccgcgccgctcgtgacccccgaggcctcggccgaggcgcgccgggccctgcgggaggccgcggggcccgtggggccggcgctggagccaccgacgctgccgctgcaccgcgcgctcacgctgcgcttcctgctccagcacctgggccgcgtggcccgccgcgccccggccctgggtcccgcggtccgggccctgggcgccacctttgggccgctgctgctgcgcgcgccgccgccgccgtcctcgccgccgccagggggcgctcccgacgggagtgagcccagccctgacttcccggcgctgctggtggagaagctgcttcaggaacacttggaagagcaggaggttgcgcccccagcgctgccgcctaaaccccccaaggcaaagccggcccccacagtcctggccaatggagggagcccaccctccctgcaggatgctgagtggtactggggggacatttcaagggaggaggtgaacgagaaactccgggacactcccgatggcaccttcctagtccgagatgcttctagcaagatccagggcgagtacacgctgaccctcaggaaaggcgggaacaataagctgatcaaggtcttccaccgagatgggcactatggcttctcagagccactcaccttctgctccgttgtggacctcatcaatcactaccgccacgagtctctggcccagtacaatgccaagctggacacacggctcctctaccctgtgtccaaataccagcaggaccagattgtcaaggaggacagcgtggaggcagtgggcgcccagcttaaggtctatcaccagcagtaccaggacaagagccgcgagtatgaccagctttatgaagagtacacacggacctcccaggagctgcagatgaagcgtactgcaattgaggccttcaatgagactatcaagatctttgaagagcagggccagactcaagagaaatgcagcaaggaatacctggagcgcttccggcgtgagggcaacgagaaagagatgcaaaggatcctgctgaactccgagcggctcaagtcccgcattgccgagatccatgagagccgcacgaagctggagcagcagctgcgggcccaggcctcggacaacagagagatcgacaagcgcatgaacagcctcaagccggacctcatgcagctgcgcaagatccgagaccagtacctcgtgtggctcacccagaaaggcgcccggcagaagaaaatcaacgagtggctggggattaaaaatgagactgaggaccagtacgcactcatggaggacgaggacgatctcccgcaccacgaggaacgcacttggtacgtgggcaagatcaaccgcacgcaggcagaggagatgctgagcggcaagcgggatggcaccttcctcatccgcgagagcagccagcggggctgctacgcctgctccgtggtagtggacggcgacaccaagcactgcgtcatctaccgcacggccaccggcttcggcttcgcggagccctacaacctgtacgggtcgctgaaggagctggtgctgcactaccagcacgcctcgctggtgcagcacaacgacgcgctcaccgtcaccctggcgcacccagtgcgcgccccgggccccggcccgccgcctgccgcccgctgagcaccgaggacccgccccaagcagagccgcccctgggcccgtctgcgccggaggctgcggcggcgggagccacggaccagaccagccacatccaggggtcctcatttctccggctctggctcttgtttggggttctctcaccctctttctctttccttccctcccccattctccagatctccctctgtctccttttctctgtctttcttggcccctgtctctctccatgttgggggtcctaactcccccaccccatatctacgtgtcctccgggcattgccctctccatggctctggtcaccctgaccctctgccctgcccaccgcaggtcccccggggtcccggaagccccttctggctgcacctgccatgtttacagagggcccctgggctgcgcggccccagcctgggcaccctgatttttaagccatagacctggggtcagggcaggaaggaacttcactctgctgcttccgagaacctcggccgtgacattcggggccgggcgggacccgccccacagactccaacttcccctccaaaccccgaagtgaaacccgccaccgggttacccccacaagggggccgctgcgagaagttcacccacccccgaaaaaataattaaactcgcaggccaggcacggtggctcatgcctgtaatcccagcactttgggaggccaagacgggcggatcttttgaggtcgggagttggaggccagcctggccaaaatggcaaaaccccgcatctactaaaatacaaaaattagccgggcgtggtggcggccgcctgtaatcccagctacttgggaggctgaggcgtgagaatctcttgaacccaggagatggaggttgcagtgagcagagatcgtgccactgcactccagcctgggtaacagagggagactcctccgtctcaaaaaaataaataaataaacttgtgagctggccccaacccctcctaggaatcacagctccccgtactggtgccgccgcagtggccaagttgcgacactgcccacggcccctccctctgatgcagattcagggcttctcttcgatcatgttgggttttgattctgtttttccttgactgcaaaaccctctttcctctcctcttttgggacaagagccctggttttctacgctgcccttggccaccacactgcctgccccacgagctgggaggcaggttttgtacggtacgttgttattgatatgatataaaacatcaaacgtc

SEQ ID NO: 333354 - DNA, 3039 bp, Homo sapiens
tggggtggggcgggcggggcatggccagagtgagcggcgtctagaccctaagaagggaggggatggggtccagagtgagaagctgcgttcttgtgatgacggagcggagacctgggctcctgagtcgtgggacagaaggtgaaggggcctagtcccgaagcatgtgggtggtgcctgcaccttcccttctgctcgtcgcagctccggtactggtctctcgctcgcctttgtgtgagaatctatggagcacttactgcatacagctatgagggagctggcctcgcacatgtgcctgtatcatctcctcctccgccctgcacatactgtctcgtatatacccccaggcgtgcaagcgcacgcacaatcctgtgcacatgcgtgggcggacaggccctacccagccctcaccacactccccttccccctaaggagtgagcccagccctgacttcccggcgctgctggtggagaagctgcttcaggaacacttggaagagcaggaggttgcgcccccagcgctgccgcctaaaccccccaaggcaaagccggcccccacagtcctggccaatggagggagcccaccctccctgcaggatgctgagtggtactggggggacatttcaagggaggaggtgaacgagaaactccgggacactcccgatggcaccttcctagtccgagatgcttctagcaagatccagggcgagtacacgctgaccctcaggaaaggcgggaacaataagctgatcaaggtcttccaccgagatgggcactatggcttctcagagccactcaccttctgctccgttgtggacctcatcaatcactaccgccacgagtctctggcccagtacaatgccaagctggacacacggctcctctaccctgtgtccaaataccagcaggaccagattgtcaaggaggacagcgtggaggcagtgggcgcccagcttaaggtctatcaccagcagtaccaggacaagagccgcgagtatgaccagctttatgaagagtacacacggacctcccaggagctgcagatgaagcgtactgcaattgaggccttcaatgagactatcaagatctttgaagagcagggccagactcaagagaaatgcagcaaggaatacctggagcgcttccggcgtgagggcaacgagaaagagatgcaaaggatcctgctgaactccgagcggctcaagtcccgcattgccgagatccatgagagccgcacgaagctggagcagcagctgcgggcccaggcctcggacaacagagagatcgacaagcgcatgaacagcctcaagccggacctcatgcagctgcgcaagatccgagaccagtacctcgtgtggctcacccagaaaggcgcccggcagaagaaaatcaacgagtggctggggattaaaaatgagactgaggaccagtacgcactcatggaggacgaggacgatctcccgcaccacgaggaacgcacttggtacgtgggcaagatcaaccgcacgcaggcagaggagatgctgagcggcaagcgggatggcaccttcctcatccgcgagagcagccagcggggctgctacgcctgctccgtggtagtggacggcgacaccaagcactgcgtcatctaccgcacggccaccggcttcggcttcgcggagccctacaacctgtacgggtcgctgaaggagctggtgctgcactaccagcacgcctcgctggtgcagcacaacgacgcgctcaccgtcaccctggcgcacccagtgcgcgccccgggccccggcccgccgcctgccgcccgctgagcaccgaggacccgccccaagcagagccgcccctgggcccgtctgcgccggaggctgcggcggcgggagccacggaccagaccagccacatccaggggtcctcatttctccggctctggctcttgtttggggttctctcaccctctttctctttccttccctcccccattctccagatctccctctgtctccttttctctgtctttcttggcccctgtctctctccatgttgggggtcctaactcccccaccccatatctacgtgtcctccgggcattgccctctccatggctctggtcaccctgaccctctgccctgcccaccgcaggtcccccggggtcccggaagccccttctggctgcacctgccatgtttacagagggcccctgggctgcgcggccccagcctgggcaccctgatttttaagccatagacctggggtcagggcaggaaggaacttcactctgctgcttccgagaacctcggccgtgacattcggggccgggcgggacccgccccacagactccaacttcccctccaaaccccgaagtgaaacccgccaccgggttacccccacaagggggccgctgcgagaagttcacccacccccgaaaaaataattaaactcgcaggccaggcacggtggctcatgcctgtaatcccagcactttgggaggccaagacgggcggatcttttgaggtcgggagttggaggccagcctggccaaaatggcaaaaccccgcatctactaaaatacaaaaattagccgggcgtggtggcggccgcctgtaatcccagctacttgggaggctgaggcgtgagaatctcttgaacccaggagatggaggttgcagtgagcagagatcgtgccactgcactccagcctgggtaacagagggagactcctccgtctcaaaaaaataaataaataaacttgtgagctggccccaacccctcctaggaatcacagctccccgtactggtgccgccgcagtggccaagttgcgacactgcccacggcccctccctctgatgcagattcagggcttctcttcgatcatgttgggttttgattctgtttttccttgactgcaaaaccctctttcctctcctcttttgggacaagagccctggttttctacgctgcccttggccaccacactgcctgccccacgagctgggaggcaggttttgtacggtacgttgttattgatatgatataaaacatcaaacgtc

SEQ ID NO: 333355 - DNA, 3119 bp, Homo sapiens
tgggcactgagcacattcggttatttccagaaacgctccgcggtcttggggatcagcctcagttgtgccagtgcggccgtagagagtgttcggccatttccgaaagcgctcgggcgtctctaagcccagccgagcccagtctcggatccctcgccgacccgattgcactcggctacctctggaaacgctcggctgtctcgggggcaccctctagtccaccagtcccgcgggattacgttcggctacttccggaaacactcgggtgcccccttacctcaggctccgcctcggcctcggttcatccgcccggctcgaatgcgctcgggcatttccgccgggggcgggccaggccgctcggaaccgtggcggcggcggaggcggggatcccgcggctgcggcgacggtggccgcggtggagccacggggcgggcttggcttggtgtgacggcggctgcggcggcggtggcggccgcgaccaggtcggcgtcctcagctggccgagcatggtggcagcctgcacccttggctcccttgtctggtgcagccagcagagccgccagccttgggcgcccatggccctccgtgtgagggcgtgagcggcctgccccagcctcacctgctgatggaggactcaatggcccagtgacctgacaccacaccaccaactccctcccaccagctgacgaatggtggacccagtgacgagtggcccttgtaagggtcatggaataatttgaagcgaggcatgagcggcccctgtggtcgcctgtgactgctggagatagaggtcccagcaccccaagccaacccagcggaccctcccagccctgcttcaaccaatggggccagtggggctccaagcagccacctaaccatccagaccccaccccactcacgcggccatggcgggccctgagggcttccagtaccgcgctctgtacccgttccgccgggagcggccggaggacctggagctgctgcccggcgacgtgctggtagtgagccgggcggccttgcaggcgctgggcgtggccgagggtggcgagcgctgcccacagagcgtgggctggatgcccggcctcaacgagcgcacacggcagcgaggtgacttccctggcacctatgtggagttcctggggcccgtggccctggcccggcccggccctcgcccacggggcccccgcccactgcccgccaggccccgtgatggggcccctgagccaggcctcacactccccgacttgcccgagcagttctccccacctgatgtggctccccctcttctggtgaagcttgtggaggccattgaaaggacagggctggacagcgaatctcactaccgcccggagctgcccgcaccgcgtacagactggtccctgagcgacgtggatcagtgggacacggcagccctggctgacggcattaagagcttcctgctggcactgcccgcgccgctcgtgacccccgaggcctcggccgaggcgcgccgggccctgcgggaggccgcggggcccgtggggccggcgctggagccaccgacgctgccgctgcaccgcgcgctcacgctgcgcttcctgctccagcacctgggccgcgtggcccgccgcgccccggccctgggtcccgcggtccgggccctgggcgccacctttgggccgctgctgctgcgcgcgccgccgccgccgtcctcgccgccgccagggggcgctcccgacgggagtgagcccagccctgacttcccggcgctgctggtggagaagctgcttcaggaacacttggaagagcaggaggttgcgcccccagcgctgccgcctaaaccccccaaggcaaagccggcccccacagtcctggccaatggagggagcccaccctccctgcaggatgctgagtggtactggggggacatttcaagggaggaggtgaacgagaaactccgggacactcccgatggcaccttcctagtccgagatgcttctagcaagatccagggcgagtacacgctgaccctcaggaaaggcgggaacaataagctgatcaaggtcttccaccgagatgggcactatggcttctcagagccactcaccttctgctccgttgtggacctcatcaatcactaccgccacgagtctctggcccagtacaatgccaagctggacacacggctcctctaccctgtgtccaaataccagcaggaccagattgtcaaggaggacagcgtggaggcagtgggcgcccagcttaaggtctatcaccagcagtaccaggacaagagccgcgagtatgaccagctttatgaagagtacacacggacctcccaggagctgcagatgaagcgtactgcaattgaggccttcaatgagactatcaagatctttgaagagcagggccagactcaagagaaatgcagcaaggaatacctggagcgcttccggcgtgagggcaacgagaaagagatgcaaaggatcctgctgaactccgagcggctcaagtcccgcattgccgagatccatgagagccgcacgaagctggagcagcagctgcgggcccaggcctcggacaacagagagatcgacaagcgcatgaacagcctcaagccggacctcatgcagctgcgcaagatccgagaccagtacctcgtgtggctcacccagaaaggcgcccggcagaagaaaatcaacgagtggctggggattaaaaatgagactgaggaccagtacgcactcatggaggacgaggacgatctcccgcaccacgaggaacgcacttggtacgtgggcaagatcaaccgcacgcaggcagaggagatgctgagcggcaagcgggatggcaccttcctcatccgcgagagcagccagcggggctgctacgcctgctccgtggtcaagttgcgacactgcccacggcccctccctctgatgcagattcagggcttctcttcgatcatgttgggttttgattctgtttttccttgactgcaaaaccctctttcctctcctcttttgggacaagagccctggttttctacgctgcccttggccaccacactgcctgccccacgagctgggaggcaggttttgtacggtacgttgttattgatatgatataaaacatcaaacgtc

SEQ ID NO: 333356 - DNA, 948 bp, Homo sapiens
attccgccacgtatctagcaggaccagattgtcaaggaggacagcgtggaggcagtgggcgcccagcttaaggtctatcaccagcagtaccaggacaagagccgcgagtatgaccagctttatgaagagtacacacggacctcccaggagctgcagatgaagcgtactgcaattgaggccttcaatgagactatcaagatctttgaagagcagggccagactcaagagaaatgcagcaaggaatacctggagcgcttccggcgtgagggcaacgagaaagagatgcaaaggatcctgctgaactccgagcggctcaagtcccgcattgccgagatccatgagagccgcacgaagctggagcagcagctgcgggcccaggcctcggacaacagagagatcgacaagcgcatgaacagcctcaagccggacctcatgcagctgcgcaagatccgagaccagtacctcgtgtggctcacccagaaaggcgcccggcagaagaaaatcaacgagtggctggggattaaaaatgagactgaggaccagtacgcactcatggaggacgaggacgatctcccgcaccacgaggaacgcacttggtacgtgggcaagatcaaccgcacgcaggcagaggagatgctgagcggcaagcgggatggcaccttcctcatccgcgagagcagccagcggggctgctacgcctgctccgtggtcaagttgcgacactgcccacggcccctccctctgatgcagattcagggcttctcttcgatcatgttgggttttgattctgtttttccttgactgcaaaaccctctttcctctcctcttttgggacaagagccctggttttctacgctgcccttggccaccacactgcctgccccacgagctgggaggcaggttttgtacggtacgttgttattgatatgatataaaacatcaaacgtc

SEQ ID NO: 333357 - DNA, 825 bp, Homo sapiens
ggggacggagtctcgttctgtcaccaggctggagtgcagtggcgcgacctcgactcactgcaacctccacctcccaggttcaagcgattctcctgcctcagcctcccgagtagctgggactacaggtgcccgccaccatgcccggctctggtctagtttttttcttctttgaatcccgtagggcctcagtgctgtgcagcaagcacatagttaaaactgaagaaaaatttcttgaataaaagtagttaacgtttttattctttacttcaaggtatatctccatgaataacctaaatgatcccccaaattggaatatccggcctaattccagggcggatggtggtgatggaagcaggtggaattatgccctgttggttccaatgctgggattggctgcttttcgtaagtcatggttttcttaaaattagtgttttccaggctgagagtgtggagccccggtgagggaggcagcatggtgtgggagcctgaaggccgtgactttgggacctgccagggacagccgagttttatcccctgcagtgaaccgtgggcaaatcacttaagctctgagcctcagtcttcctgttcacaggagatggataatcatacttaacctcagcacactgcaaggattaagtcagccaaggcgtttagaagcattttgtgtggggtgggttttaataacttagttccctctgaaggctttgctgctctcaagtcggggaggaggttccttatttcaggtgccctcataaggactgctggggaacaaaacgggtgtaaaggaaaccagtgggctgggcgtggtggctcatacctgtaacc

SEQ ID NO: 333358 - DNA, 431 bp, Homo sapiens
  misc_feature (408)..(409): n is a, c, g, or t
gcctactactactaaattaacggccgcgtcgacagaggaagccatactagaaaagtaagacaagagtgaaatcaaactgcttttagtgactcgaggccaggcagtcatgcgccttctgggtctccggcgtcttccgttcccgtgctgcccgtgtcatggccacaccgtcacccttcagcagcgacctccactcccgccaccgtctgagcagaagtgcaccgaagcctcagagacagagggtctcctcccgatgctctgccgctgttggggatatggtttcttgaagcatttttaggctgccagtattgtattaagcagaacagtataacctcgtattttagctccagggtaaaaatggttttttaaaaagtcaaatacaatactggtccttaccacaaaaaaaaagtnnacgcggccgcgaattaatagta

SEQ ID NO: 333359 - DNA, 1727 bp, Homo sapiens
  misc_feature (2)..(2): n is a, c, g, or t
  misc_feature (4)..(4): n is a, c, g, or t
  misc_feature (8)..(9): n is a, c, g, or t
cncncggnncgggtactgagtgggggcgccgcgcctgcgcaaagcggacccgcggacggtggcgttaagggaacgctgaggtcccgcgctccccgaccgaggtatatctccatgaataacctaaatgatcccccaaattggaatatccggcctaattccagggcggatggtggtgatggaagcaggtggaattatgccctgttggttccaatgctgggattggctgcttttcgttggatttggtctagggagtcccagaaagaagtagaaaaagagagagaagcctaccgtcggagaactgctgcttttcaacaggatctggaagccaagtaccacgccatgatctcagaaaatcggcgtgctgtcgctcagttgtccttggaactcgaaaaggaacaaaacagaactgctagttaccgagaagcccttatctctcagggacgcaagttggtagaagaaaagaagcttctggaacaggaacgggcccaggtgatgcaagaaaaaagacaggtgcagcctttgagaagtgcgtatttgagctgcctgcaaagggaagaaaactggcaaaggagagccaggcttttgctgaaagaatttgaagctgttctcacagaaagacagaatatctactgcagtctgtttcttcctcgcagcaagcggctggagatagagaagagcttactggtgcgagcgtccgtcgaccccgtcgccgctgacctagagatggcagccggtctcaccgacatatttcagcatgatacatactgtggtgatgtctggaacaccaacaaacgccagaatggcagactcatgtggctctatctcaaatactgggaactcgttgtcgaactgaagaagtttaagagagtagaggaagccatactagaaaagtaagacaagagtgaaatcaaactgcttttagtgactcgaggccaggcagtcatgcgccttctgggtctccggcgtcttccgttcccgtgctgcccgtgtcatggccacaccgtcacccttcagcagcgacctccactcccgccaccgtctgagcagaagtgcaccgaagcctcagagacagagggtctcctcccgatgctctgccgctgttggggatatggtttcttgaagcatttttaggctgccagtattgtattaagcagaacagtataacctcgtattttagctccagggtaaaaatggttttttaaaaagtcaaatacaatactggtccttaccacaaaaaaaagaaaaaaaaaaaaaaaaaaaaaaaaaaaaaagaaaaaaaaaagaagagaagaaaagaaaaagaaaagaaaccaaaaagagggggggggcgccgaaataagatatttcaccccgcgggggaacacccataagaagagcacacccacacatcgttgtagagcagaaagggcccaccaccatagagtggcaggatctaatgaacaggaaccaagcggcggcgcggcgcggtgaataaaaatacagagtatggcagggtgaagaaaaagatgccaactagatgggagagtagtacttcgtgaggggaagaacaccccattcctgcggggggggggggcaataaatatagggcacacaccccaccagagaaagtagtaagacgcgccgcgagcataaaaaaaaaaatgcgtgtgtagtcgtagtggaaaaacgacggactatttggctgggggacgaagaagtggctgcgagaatttgattgaaaatcttgc

SEQ ID NO: 333360 - DNA, 601 bp, Homo sapiens
gcctactactactaaattaacggccgcgtcgacagaggaagccatactagaaaagtaagacaagagtgaaatcaaactgcttttagtgactcgaggccaggcagtcatgcgccttctgggtctccggcgtcttccgttcccgtgctgcccgtgtcatggccacaccgtcacccttcagcagcgacctccactcccgccaccgtctgagcagaagtgcaccgaagcctcagagacagagggtctcctcccgatgctctgccgctgttggggatatggtttcttgaagcatttttaggctgccagtattgtattaagcagaacagtataacctcgtattttagctccagggtaaaaatggttttttaaaaagtcaaatacaatactggtccttaccacaagtaattttctgtctgtttcatcactccctaaatactttctcctcaaattatttttctctgtcaccagattacattaagaatttgtcagataatgtgtagaactgcataacaggtaatagaaagtagtaatattatattatcaagggtttatattttaaagatctctctcactccataaaggggaaataccaagtgtttcttgt

SEQ ID NO: 333361 - DNA, 1437 bp, Homo sapiens
  misc_feature (2)..(2): n is a, c, g, or t
  misc_feature (4)..(4): n is a, c, g, or t
  misc_feature (8)..(9): n is a, c, g, or t
cncncggnncgggtactgagtgggggcgccgcgcctgcgcaaagcggacccgcggacggtggcgttaagggaacgctgaggtcccgcgctccccgaccgaggtatatctccatgaataacctaaatgatcccccaaattggaatatccggcctaattccagggcggatggtggtgatggaagcaggtggaattatgccctgttggttccaatgctgggattggctgcttttcgttggatttggtctagggagtcccagaaagaagtagaaaaagagagagaagcctaccgtcggagaactgctgcttttcaacaggatctggaagccaagtaccacgccatgatctcagaaaatcggcgtgctgtcgctcagttgtccttggaactcgaaaaggaacaaaacagaactgctagttaccgagaagcccttatctctcagggacgcaagttggtagaagaaaagaagcttctggaacaggaacgggcccaggtgatgcaagaaaaaagacaggtgcagcctttgagaagtgcgtatttgagctgcctgcaaagggaagaaaactggcaaaggagagccaggcttttgctgaaagaatttgaagctgttctcacagaaagacagaatatctactgcagtctgtttcttcctcgcagcaagcggctggagatagagaagagcttactggtgcgagcgtccgtcgaccccgtcgccgctgacctagagatggcagccggtctcaccgacatatttcagcatgatacatactgtggtgatgtctggaacaccaacaaacgccagaatggcagactcatgtggctctatctcaaatactgggaactcgttgtcgaactgaagaagtttaagagagtagaggaagccatactagaaaagtaagacaagagtgaaatcaaactgcttttagtgactcgaggccaggcagtcatgcgccttctgggtctccggcgtcttccgttcccgtgctgcccgtgtcatggccacaccgtcacccttcagcagcgacctccactcccgccaccgtctgagcagaagtgcaccgaagcctcagagacagagggtctcctcccgatgctctgccgctgttggggatatggtttcttgaagcatttttaggctgccagtattgtattaagcagaacagtataacctcgtattttagctccagggtaaaaatggttttttaaaaagtcaaatacaatactggtccttaccacaagtaattttctgtctgtttcatcactccctaaatactttctcctcaaattatttttctctgtcaccagattacattaagaatttgtcagataatgtgtagaactgcataacaggtaatagaaagtagtaatattatattatcaagggtttatattttaaagatctctctcactccataaaggggaaataccaagtgtttcttgt

SEQ ID NO: 333362 - DNA, 531 bp, Homo sapiens
aatggggttggaatttggacttaatgggtaagaattgaaaatgggctattgtgtcttagaaacttcagtttgctgtagttcacgttactgagctcaaacattttctaagccaacaaactggtaactttacaagtttccttcctaaccgtgctcaccacattcatgctgtgttgaactgccatgcaaattcaataaggtttgattttctttctttgctatttcttacttgctttctatgttactttcttctcttttctgagaattattttctgaaccaaaaagtaaatgtttagcatcaggatcaattgtcaaataacaaacaaatattcaagttctaggataaaatgacatcttgtgagcaacccttaaattcccattaaaattttcactaggatgggggtggtggtggaacaactcataacattaaatgccaagacataaaatcaatctattcccagaatattgggagcaattagtaataattggtaaagtgaaaaaataagaaaattaatttggatgggactcagtgca

SEQ ID NO: 333363 - DNA, 1257 bp, Homo sapiens
gcgaaaagcgtttccgcagacagaagtggggagaagcggaggaattaaaaaaaaaaaaaagccttatttattatcattttccccaccgttggcatggcaacacaggcgtatactgagctacaggcagccccgccaccatcccagccgccacaggccccgccacaagcccagccccagccgccaccgccaccacccccagcggcaccccagcccccgcagccacccaccgctgctgccacccctcagccccaatatgtcaccgagctgcagagcccccagccccaggcacagccaccgggtggccagaagcagtacgtgacggagctcccggctgtacccgcaccctcgcagccaaccggtgcacccaccccttcgcctgcaccccagcagtacatcgtggtcactgtctctgaaggtgccatgcgggccagcgagacagtgtcggaggccagccccggctccaccgccagccagaccggcgttcctactcaggtggttcagcaggtgcagggcacccagcagcggctgctggtccagacgagcgtgcaggccaagccaggccacgtgtcgcccctccagctgaccaacatccaagtgccccagcaggctcttcccacgcagcgtctggtggtgcagagcgcagccccaggcagcaaaggtggccaggtctccctgacggtccatggtacccagcaggtgcactcgcccccagagcagtcgccggtgcaggccaacagctcttccagcaagacagccggggcccccacgggcacagtgccacagcagctgcaggtccacggcgtccagcagagtgtccccgtcacccaagagagatctgtggtccaggccactccacaagcgcccaaacccggcccggtgcagccgctgaccgtgcagggcctccagccagtccacgtggctcaagaggtgtgtgtctccccctcctaccccacgggcaaaggggctggtcccgggctggggctggggagtgcaggcccctgaggccgcagggagggaaatgcctctgtgagctgcagacactgccctacatccttcccctttcccggccccctggcagctcagggtccaggttttgctaagagagatctggattcaaacccctcttctttcttgcgtggccctgggtcagttctaacccctctccgagaccccgggcggcggggatcttccctcgggtggctgcgtgcgcgctcagcaacccggtgggtggaggcctggagccccgcccgcggccgc

SEQ ID NO: 333364 - DNA, 689 bp, Homo sapiens
ccctattagtctgctccagccgctgcccacgcggtcctcgcagcggcacacccacgaggcctgctcctgcacgttggcgaagtccacgcggttgaggtcgctcagcatctggttgatctgtgcggtgtgctgcagcagcagaactcgctggagcagtgggcggcctggctggacggcgtggtgagccaggtgctcaagccctaccagggcagcgccggcttccccaaggccgccaagctcttcctcctcaagtggtccttctacagctccatggtgatccgggacctgaccctgcgcagcgccgccagcttcggttccttccacctcatccggctgctctacgacgagtacatgtactacctgatcgagcaccgcgtagcccaggccaagggcgagacccccatcgccgtcatgggcgagttcgccaatctggccacctccctgaaccccctggaccccgacaaagacgaggaggaagaagaggaggaggagagcgaggacgagctgccgcaggacatctcactggcggctggcggcgagtcacccgcgctgggcccggagaccctggagccgccggccaagctggcgcggactgacgcgcgcggcctcttcgtgcaggcgctgccctccagctaagcccttggcctccccgccccacccgcccccgccacccctccacgccagggtcc

SEQ ID NO: 333365 - DNA, 3086 bp, Homo sapiens
gcgaaaagcgtttccgcagacagaagtggggagaagcggaggaattaaaaaaaaaaaaaagccttatttattatcattttccccaccgttggcatggcaacacaggcgtatactgagctacaggcagccccgccaccatcccagccgccacaggccccgccacaagcccagccccagccgccaccgccaccacccccagcggcaccccagcccccgcagccacccaccgctgctgccacccctcagccccaatatgtcaccgagctgcagagcccccagccccaggcacagccaccgggtggccagaagcagtacgtgacggagctcccggctgtacccgcaccctcgcagccaaccggtgcacccaccccttcgcctgcaccccagcagtacatcgtggtcactgtctctgaaggtgccatgcgggccagcgagacagtgtcggaggccagccccggctccaccgccagccagaccggcgttcctactcaggtggttcagcaggtgcagggcacccagcagcggctgctggtccagacgagcgtgcaggccaagccaggccacgtgtcgcccctccagctgaccaacatccaagtgccccagcaggctcttcccacgcagcgtctggtggtgcagagcgcagccccaggcagcaaaggtggccaggtctccctgacggtccatggtacccagcaggtgcactcgcccccagagcagtcgccggtgcaggccaacagctcttccagcaagacagccggggcccccacgggcacagtgccacagcagctgcaggtccacggcgtccagcagagtgtccccgtcacccaagagagatctgtggtccaggccactccacaagcgcccaaacccggcccggtgcagccgctgaccgtgcagggcctccagccagtccacgtggctcaagaggtgcagcagctccagcaggtgcccgtcccacacgtgtactccagccaggtgcagtatgtggagggcggcgatgccagctacacggccagtgccatccgttccagcacctactcctatcccgagacgccgctgtacacgcagacggcaagcaccagctactacgaggccgcaggcacggccacccaggtcagcacccccgccacctcccaggcggtggccagcagtggctccatgcccatgtacgtgtccggcagccaggtcgtcgccagctccgccagcactggggctggggccagcaacagcagcggaggtggtggcagtggtggtggcggcggcggcgggggaggcggtggcgggggtggcagtggcagcaccggaggcggcggcagcggagcaggcacctacgtgatccaaggcggctacatgctgggcagtgccagccagtcttactctcacaccacccgtgcctcgccagccacggtccagtggctcctggacaactatgagacggctgagggcgtgagtctgccacggagcaccctctactgccactacttactgcactgccaggagcagaagctggagcccgtcaacgccgcctccttcggcaagctcatccgctccgtcttcatgggcctgcgaacccgccgtctgggcaccaggggcaactccaagtaccactactatggcctgcgcatcaaggccagctcacccctgctgcggctgatggaggaccagcagcacatggccatgcggggccagcccttctcgcagaagcagaggctcaagcccatccagaagatggaaggcatgaccaacggcgtggcggtggggcagcagccgagcacggggctgtcggacatcagcgcccaggtgcagcagtaccagcaatttttggatgcctctcggagcctccctgacttcacagagctcgacctccagggcaaggtgctgcctgagggcgtcgggcccggggacatcaaagccttccaggtcctgtaccgggaacactgtgaggccattgtcgacgtcatggtgaacctgcagttcaccctggtggagacgctgtggaagaccttctggaggtacaacctcagccagcccagtgaggcgccaccgctggctgtacatgacgaggccgagaagcgactgcccaaagccatcctggtgctcctctccaagttcgagcccgtgctccaatggaccaagcactgtgacaacgtgctgtaccagggcctggtggaaatcctcattcccgacgtgctgcggcccatccccagtgccttgacccaagcgatccggaactttgccaagagcctggagagctggctcacccacgccatggtcaacatccccgaggagatgctgcgggtgaaggtggccgcggctggcgccttcgcgcagacactgcggcgctacacgtcgctcaaccacctggcgcaggcggcgcgcgctgtgctgcagaacaccgcacagatcaaccagatgctgagcgacctcaaccgcgtggacttcgccaacgtgcaggagcaggcctcgtgggtgtgccgctgcgaggaccgcgtggtgcagcggctggagcaggacttcaaggtgacgctgcagcagcagaactcgctggagcagtgggcggcctggctggacggcgtggtgagccaggtgctcaagccctaccagggcagcgccggcttccccaaggccgccaagctcttcctcctcaagtggtccttctacagctccatggtgatccgggacctgaccctgcgcagcgccgccagcttcggttccttccacctcatccggctgctctacgacgagtacatgtactacctgatcgagcaccgcgtagcccaggccaagggcgagacccccatcgccgtcatgggcgagttcgccaatctggccacctccctgaaccccctggaccccgacaaagacgaggaggaagaagaggaggaggagagcgaggacgagctgccgcaggacatctcactggcggctggcggcgagtcacccgcgctgggcccggagaccctggagccgccggccaagctggcgcggactgacgcgcgcggcctcttcgtgcaggcgctgccctccagctaagcccttggcctccccgccccacccgcccccgccacccctccacgccagggtcc

SEQ ID NO: 333366 - DNA, 1135 bp, Homo sapiens
gctcgacctggctcacccacgccatggtcaacatcttcgaggagatgctgcgggtgaaggtgccttgacccaagcgatccggaactttgccaagagcctggagagctggctcacccacgccatggtcaacatccccgaggagatgctgcgggtgaaggtgccttgacccaagcgatccggaactttgccaagagcctggagagctggctcacccacgccatggtcaacatccccgaggagatgctgcgggtgaaggtgccttgacccaagcgatccggaactttgccaagagcctggagagctggctcacccacgccatggtcaacatccccgaggagatgctgcgggtgaaggtggccgcggctggcgccttcgcgcagacactgcggcgctacacgtcgctcaaccacctggcgcaggcggcgcgcgctgtgctgcagaacaccgcacagatcaaccagatgctgagcgacctcaaccgcgtggacttcgccaacgtgcaggagcaggcctcgtgggtgtgccgctgcgaggaccgcgtggtgcagcggctggagcaggacttcaaggtgacgctgcagcagcagaactcgctggagcagtgggcggcctggctggacggcgtggtgagccaggtgctcaagccctaccagggcagcgccggcttccccaaggccgccaagctcttcctcctcaagtggtccttctacagctccatggtgatccgggacctgaccctgcgcagcgccgccagcttcggttccttccacctcatccggctgctctacgacgagtacatgtactacctgatcgagcaccgcgtagcccaggccaagggcgagacccccatcgccgtcatgggcgagttcgccaatctggccacctccctgaaccccctggaccccgacaaagacgaggaggaagaagaggaggaggagagcgaggacgagctgccgcaggacatctcactggcggctggcggcgagtcacccgcgctgggcccggagaccctggagccgccggccaagctggcgcggactgacgcgcgcggcctcttcgtgcaggcgctgccctccagctaagcccttggcctccccgccccacccgcccccgccacccctccacgccagggtcc

SEQ ID NO: 333367 - DNA, 1552 bp, Homo sapiens
  misc_feature (446)..(446): n is a, c, g, or t
  misc_feature (1289)..(1289): n is a, c, g, or t
  misc_feature (1305)..(1305): n is a, c, g, or t
  misc_feature (1332)..(1332): n is a, c, g, or t
  misc_feature (1335)..(1335): n is a, c, g, or t
  misc_feature (1368)..(1368): n is a, c, g, or t
  misc_feature (1391)..(1392): n is a, c, g, or t
  misc_feature (1404)..(1404): n is a, c, g, or t
  misc_feature (1449)..(1449): n is a, c, g, or t
  misc_feature (1500)..(1501): n is a, c, g, or t
  misc_feature (1515)..(1515): n is a, c, g, or t
ctgtcaaacacctgactgtattgttctagtcttgatgcctgattactgtccgattatgagactgccatctagtagtgggatatgcattgtgtggctaagtcttaggccacacaatgagtgttgctttccttagccctctgtctcaaaatagtccatctaattctggtccaggcttaagagtgcgtatctcaagcagtgaacgccaggcatttgtacctgtctggagaaacccagagccttgctttatccagatacatcttgggtatgttcacagaaccattaaagtgagggtcagacactcaatacttgatctgaggaaagtctaagttagtgatccctcaggactaatgtatacacacacttcttagggcaacactggccagtctcaggtggatggtaataaggatgctcttcatcggctgtgttttgtttctctgcgttcttcnaagtgggggcccatgggatatacctgattgccttggtggggaaaagctgaagttattttattttattgtctgcagcatcaatagtacctcaccggaagagtgacttgtccaaggttgtggtcagggccctcttcacaggggcctgtgtatcccttatcagtgcctgtatggcaggtaggtgcctcagctctgatggagatactgctgcatgagggtgatggttggaggaataatatgaggaaggtagaattgtccttgagtacaggggcaacaaagattacttccctagatcatgacaggctgtctttcagaatattgatttacccatgcattccacagatacatggcaaaggcacctaatcaagagtgtccacaattcgtgccaaaagaataaagagccttgagaagcacgtgtcagatcttccccttagtacctctgtctcctttatccaggaatcctctatgtccccaggggagctgaagctgactgtgtctccttcccaaacacaagtttcaccaatagaacctatgagacctacatgtgctgcagagggctctttcagagtacttctctgaatggcaccaaccctccttctttttctggtccctgggaagataaggagttcagtgctatggcccttactaactgctgtggattctacaacaataccgtctgtgcctaaggctgcttgatctatttctataacagttttgatcttaaaagctttgtgattgcaaaggtgtttatgtactcagggtgcccacaactcactcaccaagatgtttaacagtaagtaacagtaaatgtaaaagattcattttgggccgggctcagtggctcangcctgtaatcccagcnctttgggaggccgaggcgggcggatcncanggtcaggagatcgagaccatcctggctaacacngtgaaaccccgtctctactaaanntacaaaaaattngccgggagtggtgtcgggcgactgtagtcccagctactcgcgagnctgaggcaggagaatggcgtgaatccgggaggcggagcttgcagcgagccnngatcgcgccactgnactccagcctgggtgacagagcgagactctgtctcag

SEQ ID NO: 333368 - DNA, 534 bp, Homo sapiens
ctccaaattaatattctttttctttccctttgcctctctcctcctccttcgcaatccttctcattcccaggccttctcgttattcatagccttcaacaggaacagcgttgggcaatgaggcccatggtggtttccatgtcattatccctatagtaactcagggaacagttgttttctgagcatcctttcatgttccttgggaaaccatggaaaagactgggggctgtcagtactctggaacttctattgtgattataagaccgcacgcatgggactgaatttatttgcttatttatttttgttttccctaggtgagagctgaaatcattacaacattttcactctgtggatttgccaatcttagttccataggaatcacacttggaggcttgagtgagttcatccattttcccagctccccagtaagacagccagatcccagcttctgtagtgggcagtcctggtgcttcagtacaagctgggatcagatagagaagccattgtgaaatgggcccatttcttaggctgcagtta

SEQ ID NO: 333369 - DNA, 2323 bp, Homo sapiens
gtccttcactgaggagccagagggaatcaattccacaagctgggttgaggagaacaggagatggagaaagcaagtggaagacagtccattgctctgtccacagtggagactggcacagtgaacccggggctggagctcatggaaaaagaagtagagcctgagggaagcaagaggactgacgcacaaggacacagcctgggggatggactgggcccttccacttaccagaggaggagtcggtggcctttcagcaaagcaagaagtttctgcaaaacacacgccagcttgttcaagaagatcctgttgggcctgttgtgtttggcctatgctgcctatctcctggcagcttgcatcttgaatttccagagggcactggccttgtttgtcatcacctgcttggtgatctttgtcctggttcactcgtttttgaaaaagctcctgggcaaaaaattaacaagatgtctgaagccctttgaaaactcccgcctgaggctttggacgaaatgggtgtttgcaggagtctccttggttggccttatactgtggttggctttagacacagcccaaaggccagagcagctgatcccctttgcaggaatctgcatgttcatccttatcctctttgcctgctccaaacaccacagcgcagtgtcctggaggacagtgttttcgggcctaggtcttcaatttgtctttgggatcttggtcatcagaactgatcttggatatactgtatttcagtggctgggagagcaggtccagattttcctgaactacactgtggccggctccagttttgtctttggggatacactggtcaaggatgtctttgcttttcaggccttaccaatcatcattttctttggatgtgtggtgtccattctctactacctgggccttgtgcaatgggtagttcagaaggtcgcctggtttttacaaatcactatgggcaccactgctacagagaccctggctgtggcaggaaacatctttgtgggtatgacagaggcacctctgctcatccgtccctaccttggggacatgacactctctgaaatccatgcggtgatgactggagggtttgccaccatttctggcactgtgctgggagccttcatagcctttggggttgatgcatcatccctgatttctgcctctgtgatggccgccccttgtgctctcgcctcatcaaagctagcgtatccggaagtggaggagtccaagttcaagagtgaggagggggtaaagctgccccgtgggaaggagaggaatgtcctggaagctgccagcaacggagccgtagatgccataggccttgctactaatgtagcagccaacctgattgcctttttggctgtgttggccttcatcaatgctgccctctcctggctgggggaattggtggacatacaggggctcactttccaggtcatctgctcctatctcctaaggcccatggttttcatgatgggtgtagagtggacagactgtccaatggtggctgagatggtgggaatcaagttcttcataaatgagtttgtggcttatcagcaactgtctcaatacaagaacaaacgtctctctggaatggaggagtggattgagggagagaaacagtggatttctgtgagagctgaaatcattacaacattttcactctgtggatttgccaatcttagttccataggaatcacacttggaggcttgacatcaatagtacctcaccggaagagtgacttgtccaaggttgtggtcagggccctcttcacaggggcctgtgtatcccttatcagtgcctgtatggcaggaatcctctatgtccccaggggagctgaagctgactgtgtctccttcccaaacacaagtttcaccaatagaacctatgagacctacatgtgctgcagagggctctttcagagtacttctctgaatggcaccaaccctccttctttttctggtccctgggaagataaggagttcagtgctatggcccttactaactgctgtggattctacaacaataccgtctgtgcctaaggctgcttgatctatttctataacagttttgatcttaaaagctttgtgattgcaaaggtgtttatgtactcagggtgcccacaactcactcaccaagatgtttaacagtaagtaacagtaaatgtaaaagattcattttgggccgggctcaggatgggaatgttttggaacgagatagaggtggtggttgtgcaacattgtgaatattatgtcactgaattgttcactttaaaatggctgtttatgttatgtgaatttcacctcaataaaaaaaatttttagaagg

SEQ ID NO: 333370 - DNA, 2478 bp, Homo sapiens
gtccttcactgaggagccagagggaatcaattccacaagctgggttgaggagaacaggagatggagaaagcaagtggaagacagtccattgctctgtccacagtggagactggcacagtgaacccggggctggagctcatggaaaaagaagtagagcctgagggaagcaagaggactgacgcacaaggacacagcctgggggatggactgggcccttccacttaccagaggaggagtcggtggcctttcagcaaagcaagaagtttctgcaaaacacacgccagcttgttcaagaagatcctgttgggcctgttgtgtttggcctatgctgcctatctcctggcagcttgcatcttgaatttccagagggcactggccttgtttgtcatcacctgcttggtgatctttgtcctggttcactcgtttttgaaaaagctcctgggcaaaaaattaacaagatgtctgaagccctttgaaaactcccgcctgaggctttggacgaaatggtgtcctggaggacagtgttttcgggcctaggtcttcaatttgtctttgggatcttggtcatcagaactgatcttggatatactgtatttcagtggctgggagagcaggtccagattttcctgaactacactgtggccggctccagttttgtctttggggatacactggtcaaggatgtctttgcttttcaggccttaccaatcatcattttctttggatgtgtggtgtccattctctactacctgggccttgtgcaatgggtagttcagaaggtttctgtattcttctaggtcgcctggtttttacaaatcactatgggcaccactgctacagagaccctggctgtggcaggaaacatctttgtgggtatgacagaggcacctctgctcatccgtccctaccttggggacatgacactctctgaaatccatgcggtgatgactggagggtttgccaccatttctggcactgtgctgggagccttcatagcctttggggttgatgcatcatccctgatttctgcctctgtgatggccgccccttgtgctctcgcctcatcaaagctagcgtatccggaagtggaggagtccaagttcaagagtgaggagggggtaaagctgccccgtgggaaggagaggaatgtcctggaagctgccagcaacggagccgtagatgccataggccttgctactaatgtagcagccaacctgattgcctttttggctgtgttggccttcatcaatgctgccctctcctggctgggggaattggtggacatacaggggctcactttccaggtcatctgctcctatctcctaaggcccatggttttcatgatgggtgtagagtggacagactgtccaatggtggctgagatggtgggaatcaagttcttcataaatgagtttgtggcttatcagcaactgtctcaatacaagaacaaacgtctctctggaatggaggagtggattgagggagagaaacagtggatttctgtgagagctgaaatcattacaacattttcactctgtggatttgccaatcttagttccataggaatcacacttggaggcttgacatcaatagtacctcaccggaagagtgacttgtccaaggttgtggtcagggccctcttcacaggggcctgtgtatcccttatcagtgcctgtatggcaggtaggtgcctcagctctgatggagatactgctgcatgagggtgatggttggaggaataatatgaggaaggtagaattgtccttgagtacaggggcaacaaagattacttccctagatcatgacaggctgtctttcagaatattgatttacccatgcattccacagatacatggcaaaggcacctaatcaagagtgtccacaattcgtgccaaaagaataaagagccttgagaagcacgtgtcagatcttccccttagtacctctgtctcctttatccaggaatcctctatgtccccaggggagctgaagctgactgtgtctccttcccaaacacaagtttcaccaatagaacctatgagacctacatgtgctgcagagggctctttcagagtacttctctgaatggcaccaaccctccttctttttctggtccctgggaagataaggagttcagtgctatggcccttactaactgctgtggattctacaacaataccgtctgtgcctaaggctgcttgatctatttctataacagttttgatcttaaaagctttgtgattgcaaaggtgtttatgtactcagggtgcccacaactcactcaccaagatgtttaacagtaagtaacagtaaatgtaaaagattcattttgggccgggctcaggatgggaatgttttggaacgagatagaggtggtggttgtgcaacattgtgaatattatgtcactgaattgttcactttaaaatggctgtttatgttatgtgaatttcacctcaataaaaaaaatttttagaagg

SEQ ID NO: 333371 - DNA, 1083 bp, Homo sapiens
  misc_feature (820)..(820): n is a, c, g, or t
  misc_feature (836)..(836): n is a, c, g, or t
  misc_feature (863)..(863): n is a, c, g, or t
  misc_feature (866)..(866): n is a, c, g, or t
  misc_feature (899)..(899): n is a, c, g, or t
  misc_feature (922)..(923): n is a, c, g, or t
  misc_feature (935)..(935): n is a, c, g, or t
  misc_feature (980)..(980): n is a, c, g, or t
  misc_feature (1031)..(1032): n is a, c, g, or t
  misc_feature (1046)..(1046): n is a, c, g, or t
ctccaaattaatattctttttctttccctttgcctctctcctcctccttcgcaatccttctcattcccaggccttctcgttattcatagccttcaacaggaacagcgttgggcaatgaggcccatggtggtttccatgtcattatccctatagtaactcagggaacagttgttttctgagcatcctttcatgttccttgggaaaccatggaaaagactgggggctgtcagtactctggaacttctattgtgattataagaccgcacgcatgggactgaatttatttgcttatttatttttgttttccctaggtgagagctgaaatcattacaacattttcactctgtggatttgccaatcttagttccataggaatcacacttggaggcttgagtgagttcatccattttcccagctccccagtaagacagccagatcccagcttctgtagtgggcagtcctggtgcttcagtacaagtgatatgttttgttgctttgttcctgtctgaccccttatgtacctctctggtttttcactgcagtacttctctgaatggcaccaaccctccttctttttctggtccctgggaagataaggagttcagtgctatggcccttactaactgctgtggattctacaacaataccgtctgtgcctaaggctgcttgatctatttctataacagttttgatcttaaaagctttgtgattgcaaaggtgtttatgtactcagggtgcccacaactcactcaccaagatgtttaacagtaagtaacagtaaatgtaaaagattcattttgggccgggctcagtggctcangcctgtaatcccagcnctttgggaggccgaggcgggcggatcncanggtcaggagatcgagaccatcctggctaacacngtgaaaccccgtctctactaaanntacaaaaaattngccgggagtggtgtcgggcgactgtagtcccagctactcgcgagnctgaggcaggagaatggcgtgaatccgggaggcggagcttgcagcgagccnngatcgcgccactgnactccagcctgggtgacagagcgagactctgtctcag

SEQ ID NO: 333372 - DNA, 318 bp, Homo sapiens
gacagttagacatctatcctggcctcaagaagtgcagttctgtctgacagtagggctgggtggcaaggtctctggagggtttttcttgctctaagtcccaggcattcatgactggagtttcatttgcccattggaagcactgccttgctgatctttactctgcttcttctctttttagcctatgctgcctatctcctggcagcttgcatcttgaatttccagagggcactggccttgtttgtcatcacctgcttggtgatctttgtcctggttcactcgtttttgaaaaagctcctgggcaaaaaattaacaagatgt

SEQ ID NO: 333373 - DNA, 2460 bp, Homo sapiens
  misc_feature (2197)..(2197): n is a, c, g, or t
  misc_feature (2213)..(2213): n is a, c, g, or t
  misc_feature (2240)..(2240): n is a, c, g, or t
  misc_feature (2243)..(2243): n is a, c, g, or t
  misc_feature (2276)..(2276): n is a, c, g, or t
  misc_feature (2299)..(2300): n is a, c, g, or t
  misc_feature (2312)..(2312): n is a, c, g, or t
  misc_feature (2357)..(2357): n is a, c, g, or t
  misc_feature (2408)..(2409): n is a, c, g, or t
  misc_feature (2423)..(2423): n is a, c, g, or t
gtccttcactgaggagccagagggaatcaattccacaagctgggttgaggagaacaggagatggagaaagcaagtggaagacagtccattgctctgtccacagtggagactggcacagtgaacccggggctggagctcatggaaaaagaagtagagcctgagggaagcaagaggactgacgcacaaggacacagcctgggggatggactgggcccttccacttaccagaggaggagtcggtggcctttcagcaaagcaagaagtttctgcaaaacacacgccagcttgttcaagaagatcctgttgggcctgttgtgtttggcctatgctgcctatctcctggcagcttgcatcttgaatttccagagggcactggccttgtttgtcatcacctgcttggtgatctttgtcctggttcactcgtttttgaaaaagctcctgggcaaaaaattaacaagatgtctgaagccctttgaaaactcccgcctgaggctttggacgaaatgggtgtttgcaggagtctccttggttggccttatactgtggttggctttagacacagcccaaaggccagagcagctgatcccctttgcaggaatctgcatgttcatccttatcctctttgcctgctccaaacaccacagcgcagtgtcctggaggacagtgttttcgggcctaggtcttcaatttgtctttgggatcttggtcatcagaactgatcttggatatactgtatttcagtggctgggagagcaggtccagattttcctgaactacactgtggccggctccagttttgtctttggggatacactggtcaaggatgtctttgcttttcaggccttaccaatcatcattttctttggatgtgtggtgtccattctctactacctgggccttgtgcaatgggtagttcagaaggtcgcctggtttttacaaatcactatgggcaccactgctacagagaccctggctgtggcaggaaacatctttgtgggtatgacagaggcacctctgctcatccgtccctaccttggggacatgacactctctgaaatccatgcggtgatgactggagggtttgccaccatttctggcactgtgctgggagccttcatagcctttggggttgatgcatcatccctgatttctgcctctgtgatggccgccccttgtgctctcgcctcatcaaagctagcgtatccggaagtggaggagtccaagttcaagagtgaggagggggtaaagctgccccgtgggaaggagaggaatgtcctggaagctgccagcaacggagccgtagatgccataggccttgctactaatgtagcagccaacctgattgcctttttggctgtgttggccttcatcaatgctgccctctcctggctgggggaattggtggacatacaggggctcactttccaggtcatctgctcctatctcctaaggcccatggttttcatgatgggtgtagagtggacagactgtccaatggtggctgagatggtgggaatcaagttcttcataaatgagtttgtggcttatcagcaactgtctcaatacaagaacaaacgtctctctggaatggaggagtggattgagggagagaaacagtggatttctgtgagagctgaaatcattacaacattttcactctgtggatttgccaatcttagttccataggaatcacacttggaggcttgacatcaatagtacctcaccggaagagtgacttgtccaaggttgtggtcagggccctcttcacaggggcctgtgtatcccttatcagtgcctgtatggcaggaatcctctatgtccccaggggagctgaagctgactgtgtctccttcccaaacacaagtttcaccaatagaacctatgagacctacatgtgctgcagagggctctttcagagtacttctctgaatggcaccaaccctccttctttttctggtccctgggaagataaggagttcagtgctatggcccttactaactgctgtggattctacaacaataccgtctgtgcctaaggctgcttgatctatttctataacagttttgatcttaaaagctttgtgattgcaaaggtgtttatgtactcagggtgcccacaactcactcaccaagatgtttaacagtaagtaacagtaaatgtaaaagattcattttgggccgggctcagtggctcangcctgtaatcccagcnctttgggaggccgaggcgggcggatcncanggtcaggagatcgagaccatcctggctaacacngtgaaaccccgtctctactaaanntacaaaaaattngccgggagtggtgtcgggcgactgtagtcccagctactcgcgagnctgaggcaggagaatggcgtgaatccgggaggcggagcttgcagcgagccnngatcgcgccactgnactccagcctgggtgacagagcgagactctgtctcag

SEQ ID NO: 333374 - DNA, 330 bp, Homo sapiens
tgttcagacacctcactttacagacaaaagcagaggcctagagagggaagggagacgttcaaggtcacacagcatctatggaagagccaactgcatggctgggcttcctggccccaagcccgctcctgccccttgcccgcttttcttctgttgtattcctctgatactctctctgccctgggaccagggagggatgcagctttgaaagaagcacacattctgaagtttttttgcctctgcccaagcagagttctagcttctggttttctcgaaggccctcggtcgggcaggtccttctccctgctgtttgttccagctcagacctatatg

SEQ ID NO: 333375 - DNA, 1504 bp, Homo sapiens
  misc_feature (62)..(62): n is a, c, g, or t
atcatgttggccaggatggtctcgaactcctgacctcatgatccgcctgcctcggcctcccnaaagtgctgggattacaggcatgagccaccgcgcccagctgacagtactttttatgtgaagaacaattaagatggtttgtgatataactggaggtgcctaactacaaaacactggctgcagctggaataaatctcagcggttcttacaaagcatggactatctggaagaatagcaagttatttctgtctttttctgcatgttttctttacttctttccaagaaacctgtatttacaggatctttcctcttggtaggtacctgtttgatatatcagttacatcaattagttacttcccctggttccacagttctctccagactgttctctccacaataatggcataataatagtttatgcctgtggttcattgaacacgtgctcgtgccctatactgtgctgttttgtttttgtttttttccatgacatgccatgattctcaactgtgttgttttaaatacactgttctttcttcacaacagtcctgcctcaggaccttggtatatctatctatgccctctacctgaaagtttttgccaggcatcctcccatgcatccctcaagattctaagaaatcactctgattctccagactatttgtaaccctccatcacacacaacactttttttttttctttataggactggtcatataaaaaaatcattacacagtttttaatgtctgaattccctggtagatttaaagttactgctttgacaacttggactgtttcttagaatgctacatccttcacacttagaatggtgcttggtgcatatgaggtgctcaataaacagttgttgaacaaacactatatgaggtaagtactacagtatctccattttagaaaggaggaagctgaagagcgaagaagttaacttgctcagtattacttcactagaaagtaggggagttgatattaaaaaaaaatctaccacatattccggagacctttagttttacatagagctcttctcccacaaactacttagatggctgattaagagtactggtaaaaagttataaaggaagtggtgtgacaaaaaaatatctaggacctctgggatgaggaggaaaaccttggggactgaagggcttgaaggaactttaaggtcagttaacaaatggtatgtcaaaggtattatacaaagaagaatgaaaatacttataaagtggactacagtcttgaaggagaattgggggatcacttttgaagctgccactaaatgcagtgttacttcttgcaggaaatggttaatgccactcatcaagaaccatacttctggaagtctaatgtagagaggattaaagcataatgggccttgtagtcagacttccggatcagacttccagctctgctacttactagctatgagatctctgggaagtttcttaacctcactgtgcttcagttttctcatccacagaaatcagaaataagt

SEQ ID NO: 333376 - DNA, 2826 bp, Homo sapiens
tgcgtttctgcgtttccgcctttccttttgtttgtctcacgttttgcgtgggaggcggtcccgggatttcaggggtctaccggctctcttatggcgaatgcaacccgaagagagagtgaggtagatcagaagttccaggggtcagtatcatttaaagatgtgactgtgggcttcacccaggaggagtggcagcacctggaccctagtcagagggctctgtatagagatgtgatgctggagaactacagcaaccttgtctcagtggggtattgtgctcacaaaccagaggtgatcttcaggctggaacaaggagaagaaccatggagactggaggaagaattcccaagccagagctttccagaagtctggacagctgatcacctgaaagagaggagccaagaaaatcaatctaaacatttgtgggaagttgtattcatcaataatgaaatgctgactaaggaacaaggtaatgtaataggaataccatttaacatggacgtaagttcttttccttccagaaaaatgttctgtcagtatgactcatgtggaatgagtttcaacactgtttcagaattggttatcagtaagataaactatttaggaaaaaagtctgacgaatttaatgcatgtgggaaattgttactcaatattaagcatgatgaaactcatactcgagagaaaaatgaagttttgaaaaataggaacactctgagtcatcgtgagaacactttgcagcatgagaagattcaaactttagaccacaattttgaatacagtatatgtcaggaaaccctccttgaaaaggcagtattcaatacacggaagagagagaatgcagaagagaataactgtgactataatgaatttgggagaactttctgtgatagttcatccctcttgttccatcagatacctccatcaaaggacagtcactatgaatttagtgattgtgagaagttcttatgtgtgaagtccaccctttctaaacatgatggggtacctgtgaaacactatgattgtggtgaaagtgggaataatttcaggaggaaattgtgtctgtcacagcttcagaaaggtgataaaggagagaaacactttgaatgtaatgaatgtgggaaagctttctgggagaagtcacatctcactcgacatcagagggtgcacacaggagagaaacactttcaatgtaatcaatgtggaaaaactttctgggagaagtcaaacctcactaaacatcagagatcacacacaggggagaaaccttttgaatgcaatgaatgtgggaaagcctttagccataagtcagccctcacattacaccagagaacacatacaggggagaaaccctatcagtgtaatgcatgtgggaaaactttttaccagaaatctgacctcactaaacatcagagaacacacacagggcagaaaccctatgaatgttatgaatgtggaaaatccttctgtatgaattcacaccttacagtacaccagagaactcacacaggtgagaaaccttttgaatgtcttgagtgtgggaaatccttttgtcaaaagtcacatcttacacagcatcagagaactcacataggagataaaccttatgaatgtaatgcatgtgggaaaactttctaccacaagtcagtactcaccaggcatcagataattcatacagggttgaaaccttatgaatgttatgaatgtgggaaaaccttctgcttgaagtcagacctcacaatacatcagagaacgcacacaggggagaaaccctttgcatgtcctgaatgtgggaaattctttagccataagtcaaccctctctcaacattatagaacacacacgggggagaaaccctatgaatgtcatgaatgtggaaaaatcttttacaataaatcatacctaacaaaacataatagaacacatacaggggagaaaccctatgaatgtaatgaatgtggaaaaaccttctgccagaagtcacaactcactcagcatcagagaattcacataggggagaaaccctatgaatgtaatgagtgtggaaaagctttctgccataagtcagctctaattgtacatcagagaacccatacacaagaaaagccttataaatgtaacgaatgtggaaaatctttctgtgtgaagtcaggacttattttacatgagagaaagcacacgggggagaaaccctatgaatgcaatgaatgtgggaaatccttcagtcacaaatcatcactcacagtacatcacagggctcacacaggagagaaatcttgtcagtgtaatgaatgtggaaaaatcttttaccgtaaatcagaccttgctaaacatcagagatcacatacaggggaaaagccctatgaatgtaacacatgcaggaaaaccttctctcaaaagtcaaatctcattgtacatcagagaacacacataggagaaaaaccttatgaatgaattggatattagaaatttccagccacaagtcagcctccataatgcctcagagtcttcacactgtggagaagggcctgttgacatcctgaatgttcaataactatccacaaactcgccttatgttactccaaagtaacagtaggggataaacccatagactacaacaactataggatggcttttgttaggaagtgatattctgttgaatatcagatggttaatactggcataaaacctcacagatttttttgaatttgtgaaagtttttggcaaaactacaaataggattatgttagcgtttacactgaggagaaaattgtcaatttaagaaatctaaagtgaaaattttgcttagaaataaaatatgacaagttctgt

SEQ ID NO: 333377 - DNA, 2886 bp, Homo sapiens
atggtttgcgtgcactctgtgtgtgtacgtgtatgtgtgtgtgtgtggttataacaaactggtacttttacatttgagtaaccatcaacacaattagtttacagaatggaaaaggagtctgagatctgtactgtttcaggattacaaaggaatcaggatttagcctcaagtagttcccttgttgtattaataaccacaccctttctgcatccctgtccctggcatccacttgactatgaagctttttgtaaagcatagataaattgaataatcagggcaacagcattaagcacatctgtgaattatccctgaagttcataggacttacatatgtacaagtggtatgtgatataaatcgtgtgtttcatatgcataatggtatttaacgtaattgtgaataggaagtaggtatcctaatttagtagtggttacttcatcaggcccatcccaggtgtttgtcgtgtcctgaaacaatttaaatagagacccacagagctaatgtttatccatttaaaagttataaatcaaaataacagattatctgaaaaaaaatctatcctgtacgtgtgaagatctaggcctgcctccatgttactccctttctcttactacctgtggctcatcccatgccatgaactgcctggggtacatatgtgaacactccagccttcagcgtaagtgatagtccaaattttctttaagcagctgctctccaagacagggccctggaaagaggcccacacatacagcccagttgctgcccagggctgttggactgtcatttcattgctcattgtacccagacagggatctgggccttcagagacttttgagaatatgaagaggagggttgaggctggagaagagccagaatcaagctggcatggggcttttattgacagtgtgaagattgtacactacattacatgatcagatcatacaaataatctaagattttacagtctggtgaccctagattacacaagtaatctaagcttccactttggaaaactagaaaaagaagagcaaattaaatccaaagtaacctggaaaaaaattagagtaaaaatcagtgaaattgaaaagagaaaatcaataaaacccaaaactgttctttgaaaaggtgggtaaaattgataaacctctagctagattaagaaaaaacagaagacaaatactgctaataccaaaagtgaaagaggccatcatagctgatcctatggtcaccaaaaggattagaaagaaatatggacaactctgtccataaatttgataacttagctaaaatggatcaattccttgcaagatgcattctctcaaagctcataaaaggtagatctcagtaggcatatatatctattaaataaattgaagcagtaattaataaccttccaagaccaggcgcggtggctaaaaatacaaaaagttagccgggcgtggtggcatgcgtgtatagtccaagctactcaggaggctgaggcagaagaatcacttgaacctgggaggtggaggttgcagtgagccaagattgtgccactgtactccagcctgggtgacagagtgagactccatctcaataaaattaataataataaaaccttccaaaaaaagtgccgggaccaaatggattcactgatgtgcatttttcgagatacttaaggtagaaatgataccaagtctgtactgtctctttcagaaaataaaagcagggataacacttcccaaatcattttgtgaggccaggattaccctaataccaaagccaggcaaaaacattacaagaaaggaaaactacagatcaatatttccagtgaacacagatgcagaaatccttaaaatgttagcaaatcaggaatgcaagccttgttcaacatttgatattcagtgcaatccattgcatgcattagcagttcaaagattaaatatgatcatatcaataggtacagaaaaagcatttgacaaaatccaatatccattcatgataaaacctctcaacacagaaggaatacaggagaacttactcaatttgataaagaactactacaaaaaaccctacatctagcatcatccttgatgtttccaactaaatgctttcctactaagatcaggaacatggcaaggaacaccactgcttttcagcattgtactggaagtgctatctaatgcagtgataccaaaaaaaaaggaaataaaatgcacataaatttggaaggaggaaatacaactgtctttgttctcaaataacatgattgtctttgtagaaaattctaaataacaaaaacctgctgacattaataagcaattatagcagggttgtagaatgtagtcctcaggtatatgataaaaaagaattagacatcaagtcattaaaagacatataggaaccctaaatgcttattgttaagtgaaaaccaatctgaaaaggctttctatgttgtatgattgcaattatatgacattctgggagaggcaaaactatcgagcgagtcaaaggaccagtggttgctgagagttgaggggaaaggagggatggcaggtaggtgatttttaggacagtgaaagtactctgtagggtactgtaatttgtcaaaatgcagagaatggaaaacagtgaacggaaaacacagagtaaaccctagtgtcaactctggacttcagttaataacagtgtaccactattggctcatcaattgtaacaaatgaaccataatgatgcaagatgttaataattggggagcctgtggaggatgggagggttaaaggtttatatgagaattctctgtactttttgctcaatttttctgtaaccctaaagctgctctaaaaaatgaagtgtattaagtaaataaataagtaaataaccaaccaaccctgaggaacatcttg

SEQ ID NO: 333378 - DNA, 2828 bp, Homo sapiens
atggtttgcgtgcactctgtgtgtgtacgtgtatgtgtgtgtgtgtggttataacaaactggtacttttacatttgagtaaccatcaacacaattagtttacagaatggaaaaggagtctgagatctgtactgtttcaggattacaaaggaatcaggatttagcctcaagtagttcccttgttgtattaataaccacaccctttctgcatccctgtccctggcatccacttgactatgaagctttttgtaaagcatagataaattgaataatcagggcaacagcattaagcacatctgtgaattatccctgaagttcataggacttacatatgtacaagtggtatgtgatataaatcgtgtgtttcatatgcataatggtatttaacgtaattgtgaataggaagtaggtatcctaatttagtagtggttacttcatcaggcccatcccaggtgtttgtcgtgtcctgaaacaatttaaatagagacccacagagctaatgtttatccatttaaaagttataaatcaaaataacagattatctgaaaaaaaatctatcctgtacgtgtgaagatctaggcctgcctccatgttactccctttctcttactacctgtggctcatcccatgccatgaactgcctggggtacatatgtgaacactccagccttcagcgtaagtgatagtccaaattttctttaagcagctgctctccaagacagggccctggaaagaggcccacacatacagcccagttgctgcccagggctgttggactgtcatttcattgctcattgtacccagacagggatctgggccttcagagacttttgagaatatgaagaggagggttgaggctggagaagagccagaatcaagctggcatggggcttttattgacagtgtgaagattgtacactacattacatgatcagatcatacaaataatctaagattttacagtctggtgaccctagattacacaagtaatctaagcttccactttggaaaactagaaaaagaagagcaaattaaatccaaagtaacctggaaaaaaattagagtaaaaatcagtgaaattgaaaagagaaaatcaataaaacccaaaactgttctttgaaaaggtgggtaaaattgataaacctctagctagattaagaaaaaacagaagacaaatactgctaataccaaaagtgaaagaggccatcatagctgatcctatggtcaccaaaaggattagaaagaaatatggacaactctgtccataaatttgataacttagctaaaatggatcaattccttgcaagatgcattctctcaaagctcataaaaggtagatctcagtaggcatatatatctattaaataaattgaagcagtaattaataaccttccaagaccaggcgcggtggctaaaaatacaaaaagttagccgggcgtggtggcatgcgtgtatagtccaagctactcaggaggctgaggcagaagaatcacttgaacctgggaggtggaggttgcagtgagccaagattgtgccactgtactccagcctgggtgacagagtgagactccatctcaataaaattaataataataaaaccttccaaaaaaagtgccgggaccaaatggattcactgatgtgcatttttcgagatacttaaggtagaaatgataccaagtctgtactgtctctttcagaaaataaaagcagggataacacttcccaaatcattttgtgaggccaggattaccctaataccaaagccaggcaaaaacattacaagaaaggaaaactacagatcaatatttccagtgaacacagatgcagaaatccttaaaatgttagcaaatcaggaatgcaagccttgttcaacatttgatattcagtgcaatccattgcatgcattagcagttcaaagattaaatatgatcatatcaataggtacagaaaaagcatttgacaaaatccaatatccattcatgataaaacctctcaacacagaaggaatacaggagaacttactcaatttgataaagaactactacaaaaaaccctacatctagcatcatccttgatgtttccaactaaatgctttcctactaagatcaggaacatggcaaggaacaccactgcttttcagcattgtactggaagtgctatctaatgcagtgataccatctcaaataacatgattgtctttgtagaaaattctaaataacaaaaacctgctgacattaataagcaattatagcagggttgtagaatgtagtcctcaggtatatgataaaaaagaattagacatcaagtcattaaaagacatataggaaccctaaatgcttattgttaagtgaaaaccaatctgaaaaggctttctatgttgtatgattgcaattatatgacattctgggagaggcaaaactatcgagcgagtcaaaggaccagtggttgctgagagttgaggggaaaggagggatggcaggtaggtgatttttaggacagtgaaagtactctgtagggtactgtaatttgtcaaaatgcagagaatggaaaacagtgaacggaaaacacagagtaaaccctagtgtcaactctggacttcagttaataacagtgtaccactattggctcatcaattgtaacaaatgaaccataatgatgcaagatgttaataattggggagcctgtggaggatgggagggttaaaggtttatatgagaattctctgtactttttgctcaatttttctgtaaccctaaagctgctctaaaaaatgaagtgtattaagtaaataaataagtaaataaccaaccaaccctgaggaacatcttg

SEQ ID NO: 333379 - DNA, 2871 bp, Homo sapiens
atggtttgcgtgcactctgtgtgtgtacgtgtatgtgtgtgtgtgtggttataacaaactggtacttttacatttgagtaaccatcaacacaattagtttacagaatggaaaaggagtctgagatctgtactgtttcaggattacaaaggaatcaggatttagcctcaagtagttcccttgttgtattaataaccacaccctttctgcatccctgtccctggcatccacttgactatgaagctttttgtaaagcatagataaattgaataatcagggcaacagcattaagcacatctgtgaattatccctgaagttcataggacttacatatgtacaagtggtatgtgatataaatcgtgtgtttcatatgcataatggtatttaacgtaattgtgaataggaagtaggtatcctaatttagtagtggttacttcatcaggcccatcccaggtgtttgtcgtgtcctgaaacaatttaaatagagacccacagagctaatgtttatccatttaaaagttataaatcaaaataacagattatctgaaaaaaaatctatcctgtacgtgtgaagatctaggcctgcctccatgttactccctttctcttactacctgtggctcatcccatgccatgaactgcctggggtacatatgtgaacactccagccttcagcgtaagtgatagtccaaattttctttaagcagctgctctccaagacagggccctggaaagaggcccacacatacagcccagttgctgcccagggctgttggactgtcatttcattgctcattgtacccagacagggatctgggccttcagagacttttgagaatatgaagaggagggttgaggctggagaagagccagaatcaagctggcatggggcttttattgacagtgtgaagattgtacactacattacatgatcagatcatacaaataatctaagattttacagtctggtgaccctagattacacaagtaatctaagcttccactttggaaaactagaaaaagaagagcaaattaaatccaaagtaacctggaaaaaaattagagtaaaaatcagtgaaattgaaaagagaaaatcaataaaacccaaaactgttctttgaaaaggtgggtaaaattgataaacctctagctagattaagaaaaaacagaagacaaatactgctaataccaaaagtgaaagaggccatcatagctgatcctatggtcaccaaaaggattagaaagaaatatggacaactctgtccataaatttgataacttagctaaaatggatcaattccttgcaagatgcattctctcaaagctcataaaaggtagatctcagtaggcatatatatctattaaataaattgaagcagtaattaataaccttccaagaccaggcgcggtggctaaaaatacaaaaagttagccgggcgtggtggcatgcgtgtatagtccaagctactcaggaggctgaggcagaagaatcacttgaacctgggaggtggaggttgcagtgagccaagattgtgccactgtactccagcctgggtgacagagtgagactccatctcaataaaattaataataataaaaccttccaaaaaaagtgccgggaccaaatggattcactgatgtgcatttttcgagatacttaaggtagaaatgataccaagtctgtactgtctctttcagaaaataaaagcagggataacacttcccaaatcattttgtgaggccaggattaccctaataccaaagccaggcaaagaaaactacagatcaatatttccagtgaacacagatgcagaaatccttaaaatgttagcaaatcaggaatgcaagccttgttcaacatttgatattcagtgcaatccattgcatgcattagcagttcaaagattaaatatgatcatatcaataggtacagaaaaagcatttgacaaaatccaatatccattcatgataaaacctctcaacacagaaggaatacaggagaacttactcaatttgataaagaactactacaaaaaaccctacatctagcatcatccttgatgtttccaactaaatgctttcctactaagatcaggaacatggcaaggaacaccactgcttttcagcattgtactggaagtgctatctaatgcagtgataccaaaaaaaaaggaaataaaatgcacataaatttggaaggaggaaatacaactgtctttgttctcaaataacatgattgtctttgtagaaaattctaaataacaaaaacctgctgacattaataagcaattatagcagggttgtagaatgtagtcctcaggtatatgataaaaaagaattagacatcaagtcattaaaagacatataggaaccctaaatgcttattgttaagtgaaaaccaatctgaaaaggctttctatgttgtatgattgcaattatatgacattctgggagaggcaaaactatcgagcgagtcaaaggaccagtggttgctgagagttgaggggaaaggagggatggcaggtaggtgatttttaggacagtgaaagtactctgtagggtactgtaatttgtcaaaatgcagagaatggaaaacagtgaacggaaaacacagagtaaaccctagtgtcaactctggacttcagttaataacagtgtaccactattggctcatcaattgtaacaaatgaaccataatgatgcaagatgttaataattggggagcctgtggaggatgggagggttaaaggtttatatgagaattctctgtactttttgctcaatttttctgtaaccctaaagctgctctaaaaaatgaagtgtattaagtaaataaataagtaaataaccaaccaaccctgaggaacatcttg

SEQ ID NO: 333380 - DNA, 1590 bp, Homo sapiens
tgcgtttctgcgtttccgcctttccttttgtttgtctcacgttttgcgtgggaggcggtcccgggatttcaggggtctaccggctctcttatggcgaatgcaacccgaagagagagtgagctgtatcttcagagttgtctccgtctttccaagaacagaacaaaatgaacaaggtaagttgtttattaattccctactttattttgcggtggactttgtgagatttgtaagagtcagtatggtttttttgttttgttttgtttagtgagactccatctcaataaaattaataataataaaaccttccaaaaaaagtgccgggaccaaatggattcactgatgtgcatttttcgagatacttaaggtagaaatgataccaagtctgtactgtctctttcagaaaataaaagcagggataacacttcccaaatcattttgtgaggccaggattaccctaataccaaagccaggcaaaaacattacaagaaaggaaaactacagatcaatatttccagtgaacacagatgcagaaatccttaaaatgttagcaaatcaggaatgcaagccttgttcaacatttgatattcagtgcaatccattgcatgcattagcagttcaaagattaaatatgatcatatcaataggtacagaaaaagcatttgacaaaatccaatatccattcatgataaaacctctcaacacagaaggaatacaggagaacttactcaatttgataaagaactactacaaaaaaccctacatctagcatcatccttgatgtttccaactaaatgctttcctactaagatcaggaacatggcaaggaacaccactgcttttcagcattgtactggaagtgctatctaatgcagtgataccaaaaaaaaaggaaataaaatgcacataaatttggaaggaggaaatacaactgtctttgttctcaaataacatgattgtctttgtagaaaattctaaataacaaaaacctgctgacattaataagcaattatagcagggttgtagaatgtagtcctcaggtatatgataaaaaagaattagacatcaagtcattaaaagacatataggaaccctaaatgcttattgttaagtgaaaaccaatctgaaaaggctttctatgttgtatgattgcaattatatgacattctgggagaggcaaaactatcgagcgagtcaaaggaccagtggttgctgagagttgaggggaaaggagggatggcaggtaggtgatttttaggacagtgaaagtactctgtagggtactgtaatttgtcaaaatgcagagaatggaaaacagtgaacggaaaacacagagtaaaccctagtgtcaactctggacttcagttaataacagtgtaccactattggctcatcaattgtaacaaatgaaccataatgatgcaagatgttaataattggggagcctgtggaggatgggagggttaaaggtttatatgagaattctctgtactttttgctcaatttttctgtaaccctaaagctgctctaaaaaatgaagtgtattaagtaaataaataagtaaataaccaaccaaccctgaggaacatcttg

SEQ ID NO: 333381 - DNA, 1496 bp, Homo sapiens
acactggagagaagcctcacaaatgtgaggtatgtggaatggccttccatcatagttcagtcctgaggcagcacaaaagaacacacacagggcagaaaccctatgaatgttatgaatgtggaaaatccttctgtatgaattcacaccttacagtacaccagagaactcacacaggtgagaaaccttttgaatgtcttgagtgtgggaaatccttttgtcaaaagtcacatcttacacagcatcagagaactcacataggagataaaccttatgaatgtaatgcatgtgggaaaactttctaccacaagtcagtactcaccaggcatcagataattcatacagggttgaaaccttatgaatgttatgaatgtgggaaaaccttctgcttgaagtcagacctcacaatacatcagagaacgcacacaggggagaaaccctttgcatgtcctgaatgtgggaaattctttagccataagtcaaccctctctcaacattatagaacacacacgggggagaaaccctatgaatgtcatgaatgtggaaaaatcttttacaataaatcatacctaacaaaacataatagaacacatacaggggagaaaccctatgaatgtaatgaatgtggaaaaaccttctgccagaagtcacaactcactcagcatcagagaattcacataggggagaaaccctatgaatgtaatgagtgtggaaaagctttctgccataagtcagctctaattgtacatcagagaacccatacacaagaaaagccttataaatgtaacgaatgtggaaaatctttctgtgtgaagtcaggacttattttacatgagagaaagcacacgggggagaaaccctatgaatgcaatgaatgtgggaaatccttcagtcacaaatcatcactcacagtacatcacagggctcacacaggagagaaatcttgtcagtgtaatgaatgtggaaaaatcttttaccgtaaatcagaccttgctaaacatcagagatcacatacaggggaaaagccctatgaatgtaacacatgcaggaaaaccttctctcaaaagtcaaatctcattgtacatcagagaacacacataggagaaaaaccttatgaatgaattggatattagaaatttccagccacaagtcagcctccataatgcctcagagtcttcacactgtggagaagggcctgttgacatcctgaatgttcaataactatccacaaactcgccttatgttactccaaagtaacagtaggggataaacccatagactacaacaactataggatggcttttgttaggaagtgatattctgttgaatatcagatggttaatactggcataaaacctcacagatttttttgaatttgtgaaagtttttggcaaaactacaaataggattatgttagcgtttacactgaggagaaaattgtcaatttaagaaatctaaagtgaaaattttgcttagaaataaaatatgacaagttctgt

SEQ ID NO: 333382 - DNA, 1015 bp, Homo sapiens
tgcgtttctgcgtttccgcctttccttttgtttgtctcacgttttgcgtgggaggcggtcccgggatttcaggggtctaccggctctcttatggcgaatgcaacccgaagagagagtgagctgtatcttcagagttgtctccgtctttccaagaacagaacaaaatgaacaaggtagatcagaagttccaggggtcagtatcatttaaagatgtgactgtgggcttcacccaggaggagtggcagcacctggaccctagtcagagggctctgtatagagatgtgatgctggagaactacagcaaccttgtctcagtggggtattgtgctcacaaaccagaggtgatcttcaggctggaacaaggagaagaaccatggagactggaggaagaattcccaagccagagctttccaggctcctcttggctatggtggtttcccagactttccttgttttggatgaccttgacagtttggaggaatcctggtgagaagtctggacagctgatcacctgaaagagaggagccaagaaaatcaatctaaacatttgtgggaagttgtattcatcaataatgaaatgctgactaaggaacaaggtaatgtaataggaataccatttaacatggacgtaagttcttttccttccagaaaaatgttctgtcagtatgactcatgtggaatgagtttcaacactgtttcagaattggttatcagtaagataaactatttaggaaaaaagtctgacgaatttaatgcatgtgggaaattgttactcaatattaagcatgatgaaactcatactcgagagaaaaatgaagttttgaaaaataggaacactctgagtcatcgtgagaacctggcgatgacgagattacagttgaccgattgaacagcagtcagacccctgaagggaccaaacggaaagcagggaagaacgggcatgatgggacggaagaccctggaaaacccagagggaacgaggagggggagccccagggctacacggggcacgagc

SEQ ID NO: 333383 - DNA, 1250 bp, Homo sapiens
aaaagcttgaaggaggacacctgtctgtggtttagtgatggcatcacttttgtctccctcctttggttaagcattctgtaggaaaacacaagaaaagagggctttcaggccatcttcacatcaaccctaagacagacattttcaaatattgttctcaccatgcttactccctcccaggcccctgaggtgttcatgcactgatcctggaccttggattaaacccttgcagtgctggaagaagaggactctgcactgcctgccacaccaggactggaagatcaatggccttcccttcttccaaactaccttcccatgaggtggggatggtggtcacatctccaacactggcgtgctgtggaagagacatcagcattctctgcaacaaatttggaaacagcctaaagagacgtttctacttcaaagagatgcactgaggaagtgcactggcactgctggggactcacctggggcccagggctgaggcttctcgtgtccttggagctgctgtcctcccgaggagcgtccacactgcagccagctcagcctcaggtgtcctatctggttttgaaaccaaatctaagtgggaaaagaagattcaagttttatccgatttagtctacataattttaagtatctatttgagctcaacaccaagaatcacttccttctctgtcccatctgtggtctccaaaggaaaggtccctgggttaggagacactggctagcatcctaaagccagagctggccgatgggtgtgtgtccactcttccttcacctcttccccaccctacagttgtttttgtctcatgctcacttgctctttctgcctccctctcactctttaggtctcacaaaggctttggtcaaggactgactgactttccttggctctctgtcatctccccataatcaaaggcatttcataacacacaatccatgtgaagggacctctgatcaaaattcacttaaagaggagctcactaattaccagtacttactgctgagcctggaatcattcgtatataccccagagttcattcattccagacacagtactagataaggagactcctatgagccaaaaacctaactctgaatagactgtgactgtcataatcaaaccctgtggtcccagctactcagaaggctgaggcaggagaattgcttgaacccggaggcggaagttgcatgagctgagatcctgtcattgcactccagtctgggggacaagagcgagacttcatctcaaa

SEQ ID NO: 333384 - DNA, 1090 bp, Homo sapiens
tgcgtttctgcgtttccgcctttccttttgtttgtctcacgttttgcgtgggaggcggtcccgggatttcaggggtctaccggctctcttatggcgaatgcaacccgaagagagagtgagctgtatcttcagagttgtctccgtctttccaagaacagaacaaaatgaacaaggtagatcagaagttccaggggtcagtatcatttaaagatgtgactgtgggcttcacccaggaggagtggcagcacctggaccctagtcagagggctctgtatagagatgtgatgctggagaactacagcaaccttgtctcagtggggtattgtgctcacaaaccagaggtgatcttcaggctggaacaaggagaagaaccatggagactggaggaagaattcccaagccagagctttccaggctcctcttggctatggtggtttcccagactttccttgttttggatgaccttgacagtttggaggaatcctggtgagaagtctggacagctgatcacctgaaagagaggagccaagaaaatcaatctaaacatttgtgggaagttgtattcatcaataatgaaatgctgactaaggaacaagatgtcatcagcctcaggagagagtggtatgtaccttgaaataactcaccgagacacaaacttgctgacttcttgtcctccatctcagagaagatatggaagatatgaaggatggagaaaaagaggaagaggaaatgtgatggtggagtgggtaacataaaaaagggaaggcaaataagtgtatgtgttttcagcggcttctcactttcttttggcccatcaaggaaaccaacacatccgaggagagtgctgataggctgctcttagccgggaccacacttgtgctttgaaaacaacccccaaaatccctgcaggcaattgaaggatgtcccgagaacatcctcccagggagcagatacccattctgtagaagctctaagcctgctgggctaagccctccataggccactttaatgaggaggagaggctgtaggtggtggtaggaccaccatgttgcatgacttttctgtgtgccccgtcttttgactctgtctc

SEQ ID NO: 333385 - DNA, 2879 bp, Homo sapiens
tgcgtttctgcgtttccgcctttccttttgtttgtctcacgttttgcgtgggaggcggtcccgggatttcaggggtctaccggctctcttatggcgaatgcaacccgaagagagagtgagctgtatcttcagagttgtctccgtctttccaagaacagaacaaaatgaacaaggtagatcagaagttccaggggtcagtatcatttaaagatgtgactgtgggcttcacccaggaggagtggcagcacctggaccctagtcagagggctctgtatagagatgtgatgctggagaactacagcaaccttgtctcagtggggtattgtgctcacaaaccagaggtgatcttcaggctggaacaaggagaagaaccatggagactggaggaagaattcccaagccagagctttccagaagtctggacagctgatcacctgaaagagaggagccaagaaaatcaatctaaacatttgtgggaagttgtattcatcaataatgaaatgctgactaaggaacaaggtaatgtaataggaataccatttaacatggacgtaagttcttttccttccagaaaaatgttctgtcagtatgactcatgtggaatgagtttcaacactgtttcagaattggttatcagtaagataaactatttaggaaaaaagtctgacgaatttaatgcatgtgggaaattgttactcaatattaagcatgatgaaactcatactcgagagaaaaatgaagttttgaaaaataggaacactctgagtcatcgtgagaacactttgcagcatgagaagattcaaactttagaccacaattttgaatacagtatatgtcaggaaaccctccttgaaaaggcagtattcaatacacggaagagagagaatgcagaagagaataactgtgactataatgaatttgggagaactttctgtgatagttcatccctcttgttccatcagatacctccatcaaaggacagtcactatgaatttagtgattgtgagaagttcttatgtgtgaagtccaccctttctaaacatgatggggtacctgtgaaacactatgattgtggtgaaagtgggaataatttcaggaggaaattgtgtctgtcacagcttcagaaaggtgataaaggagagaaacactttgaatgtaatgaatgtgggaaagctttctgggagaagtcacatctcactcgacatcagagggtgcacacaggagagaaacactttcaatgtaatcaatgtggaaaaactttctgggagaagtcaaacctcactaaacatcagagatcacacacaggggagaaaccttttgaatgcaatgaatgtgggaaagcctttagccataagtcagccctcacattacaccagagaacacatacaggggagaaaccctatcagtgtaatgcatgtgggaaaactttttaccagaaatctgacctcactaaacatcagagaacacacacagggcagaaaccctatgaatgttatgaatgtggaaaatccttctgtatgaattcacaccttacagtacaccagagaactcacacaggtgagaaaccttttgaatgtcttgagtgtgggaaatccttttgtcaaaagtcacatcttacacagcatcagagaactcacataggagataaaccttatgaatgtaatgcatgtgggaaaactttctaccacaagtcagtactcaccaggcatcagataattcatacagggttgaaaccttatgaatgttatgaatgtgggaaaaccttctgcttgaagtcagacctcacaatacatcagagaacgcacacaggggagaaaccctttgcatgtcctgaatgtgggaaattctttagccataagtcaaccctctctcaacattatagaacacacacgggggagaaaccctatgaatgtcatgaatgtggaaaaatcttttacaataaatcatacctaacaaaacataatagaacacatacaggggagaaaccctatgaatgtaatgaatgtggaaaaaccttctgccagaagtcacaactcactcagcatcagagaattcacataggggagaaaccctatgaatgtaatgagtgtggaaaagctttctgccataagtcagctctaattgtacatcagagaacccatacacaagaaaagccttataaatgtaacgaatgtggaaaatctttctgtgtgaagtcaggacttattttacatgagagaaagcacacgggggagaaaccctatgaatgcaatgaatgtgggaaatccttcagtcacaaatcatcactcacagtacatcacagggctcacacaggagagaaatcttgtcagtgtaatgaatgtggaaaaatcttttaccgtaaatcagaccttgctaaacatcagagatcacatacaggggaaaagccctatgaatgtaacacatgcaggaaaaccttctctcaaaagtcaaatctcattgtacatcagagaacacacataggagaaaaaccttatgaatgaattggatattagaaatttccagccacaagtcagcctccataatgcctcagagtcttcacactgtggagaagggcctgttgacatcctgaatgttcaataactatccacaaactcgccttatgttactccaaagtaacagtaggggataaacccatagactacaacaactataggatggcttttgttaggaagtgatattctgttgaatatcagatggttaatactggcataaaacctcacagatttttttgaatttgtgaaagtttttggcaaaactacaaataggattatgttagcgtttacactgaggagaaaattgtcaatttaagaaatctaaagtgaaaattttgcttagaaataaaatatgacaagttctgt

SEQ ID NO: 333386 - DNA, 2956 bp, Homo sapiens
tgcgtttctgcgtttccgcctttccttttgtttgtctcacgttttgcgtgggaggcggtcccgggatttcaggggtctaccggctctcttatggcgaatgcaacccgaagagagagtgagctgtatcttcagagttgtctccgtctttccaagaacagaacaaaatgaacaaggtagatcagaagttccaggggtcagtatcatttaaagatgtgactgtgggcttcacccaggaggagtggcagcacctggaccctagtcagagggctctgtatagagatgtgatgctggagaactacagcaaccttgtctcagtggggtattgtgctcacaaaccagaggtgatcttcaggctggaacaaggagaagaaccatggagactggaggaagaattcccaagccagagctttccaggctcctcttggctatggtggtttcccagactttccttgttttggatgaccttgacagtttggaggaatcctggtgagaagtctggacagctgatcacctgaaagagaggagccaagaaaatcaatctaaacatttgtgggaagttgtattcatcaataatgaaatgctgactaaggaacaaggtaatgtaataggaataccatttaacatggacgtaagttcttttccttccagaaaaatgttctgtcagtatgactcatgtggaatgagtttcaacactgtttcagaattggttatcagtaagataaactatttaggaaaaaagtctgacgaatttaatgcatgtgggaaattgttactcaatattaagcatgatgaaactcatactcgagagaaaaatgaagttttgaaaaataggaacactctgagtcatcgtgagaacactttgcagcatgagaagattcaaactttagaccacaattttgaatacagtatatgtcaggaaaccctccttgaaaaggcagtattcaatacacggaagagagagaatgcagaagagaataactgtgactataatgaatttgggagaactttctgtgatagttcatccctcttgttccatcagatacctccatcaaaggacagtcactatgaatttagtgattgtgagaagttcttatgtgtgaagtccaccctttctaaacatgatggggtacctgtgaaacactatgattgtggtgaaagtgggaataatttcaggaggaaattgtgtctgtcacagcttcagaaaggtgataaaggagagaaacactttgaatgtaatgaatgtgggaaagctttctgggagaagtcacatctcactcgacatcagagggtgcacacaggagagaaacactttcaatgtaatcaatgtggaaaaactttctgggagaagtcaaacctcactaaacatcagagatcacacacaggggagaaaccttttgaatgcaatgaatgtgggaaagcctttagccataagtcagccctcacattacaccagagaacacatacaggggagaaaccctatcagtgtaatgcatgtgggaaaactttttaccagaaatctgacctcactaaacatcagagaacacacacagggcagaaaccctatgaatgttatgaatgtggaaaatccttctgtatgaattcacaccttacagtacaccagagaactcacacaggtgagaaaccttttgaatgtcttgagtgtgggaaatccttttgtcaaaagtcacatcttacacagcatcagagaactcacataggagataaaccttatgaatgtaatgcatgtgggaaaactttctaccacaagtcagtactcaccaggcatcagataattcatacagggttgaaaccttatgaatgttatgaatgtgggaaaaccttctgcttgaagtcagacctcacaatacatcagagaacgcacacaggggagaaaccctttgcatgtcctgaatgtgggaaattctttagccataagtcaaccctctctcaacattatagaacacacacgggggagaaaccctatgaatgtcatgaatgtggaaaaatcttttacaataaatcatacctaacaaaacataatagaacacatacaggggagaaaccctatgaatgtaatgaatgtggaaaaaccttctgccagaagtcacaactcactcagcatcagagaattcacataggggagaaaccctatgaatgtaatgagtgtggaaaagctttctgccataagtcagctctaattgtacatcagagaacccatacacaagaaaagccttataaatgtaacgaatgtggaaaatctttctgtgtgaagtcaggacttattttacatgagagaaagcacacgggggagaaaccctatgaatgcaatgaatgtgggaaatccttcagtcacaaatcatcactcacagtacatcacagggctcacacaggagagaaatcttgtcagtgtaatgaatgtggaaaaatcttttaccgtaaatcagaccttgctaaacatcagagatcacatacaggggaaaagccctatgaatgtaacacatgcaggaaaaccttctctcaaaagtcaaatctcattgtacatcagagaacacacataggagaaaaaccttatgaatgaattggatattagaaatttccagccacaagtcagcctccataatgcctcagagtcttcacactgtggagaagggcctgttgacatcctgaatgttcaataactatccacaaactcgccttatgttactccaaagtaacagtaggggataaacccatagactacaacaactataggatggcttttgttaggaagtgatattctgttgaatatcagatggttaatactggcataaaacctcacagatttttttgaatttgtgaaagtttttggcaaaactacaaataggattatgttagcgtttacactgaggagaaaattgtcaatttaagaaatctaaagtgaaaattttgcttagaaataaaatatgacaagttctgt

SEQ ID NO: 333387 - DNA, 3079 bp, Homo sapiens
tgcgtttctgcgtttccgcctttccttttgtttgtctcacgttttgcgtgggaggcggtcccgggatttcaggggtctaccggctctcttatggcgaatgcaacccgaagagagagtgagctgtatcttcagagttgtctccgtctttccaagaacagaacaaaatgaacaaggtagatcagaagttccaggggtcagtatcatttaaagatgtgactgtgggcttcacccaggaggagtggcagcacctggaccctagtcagagggctctgtatagagatgtgatgctggagaactacagcaaccttgtctcagtggggtattgtgctcacaaaccagaggtgatcttcaggctggaacaaggagaagaaccatggagactggaggaagaattcccaagccagagctttccagaagtctggacagctgatcacctgaaagagaggagccaagaaaatcaatctaaacatttgtgggaagttgtattcatcaataatgaaatgctgactaaggaacaaggtaatgtaataggaataccatttaacatggacgtaagttcttttccttccagaaaaatgttctgtcagtatgactcatgtggaatgagtttcaacactgtttcagaattggttatcagtaagataaactatttaggaaaaaagtctgacgaatttaatgcatgtgggaaattgttactcaatattaagcatgatgaaactcatactcgagagaaaaatgaagttttgaaaaataggaacactctgagtcatcgtgagaacactttgcagcatgagaagattcaaactttagaccacaattttgaatacagtatatgtcaggaaaccctccttgaaaaggcagtattcaatacacggaagagagagaatgcagaagagaataactgtgactataatgaatttgggagaactttctgtgatagttcatccctcttgttccatcagatacctccatcaaaggacagtcactatgaatttagtgattgtgagaagttcttatgtgtgaagtccaccctttctaaacatgatggggtacctgtgaaacactatgattgtggtgaaagtgggaataatttcaggaggaaattgtgtctgtcacagcttcagaaaggtgataaaggagagaaacactttgaatgtaatgaatgtgggaaagctttctgggagaagtcacatctcactcgacatcagagggtgcacacaggagagaaacactttcaatgtaatcaatgtggaaaaactttctgggagaagtcaaacctcactaaacatcagagatcacacacaggggagaaaccttttgaatgcaatgaatgtgggaaagcctttagccataagtcagccctcacattacaccagagaacacatacaggggagaaaccctatcagtgtaatgcatgtgggaaaactttttaccagaaatctgacctcactaaacatcagagaacacacacagggcagaaaccctatgaatgttatgaatgtggaaaatccttctgtatgaattcacaccttacagtacaccagagaactcacacaggtgagaaaccttttgaatgtcttgagtgtgggaaatccttttgtcaaaagtcacatcttacacagcatcagagaactcacataggagataaaccttatgaatgtaatgcatgtgggaaaactttctaccacaagtcagtactcaccaggcatcagataattcatacagggttgaaaccttatgaatgttatgaatgtgggaaaaccttctgcttgaagtcagacctcacaatacatcagagaacgcacacaggggagaaaccctttgcatgtcctgaatgtgggaaattctttagccataagtcaaccctctctcaacattatagaacacacacgggggagaaaccctatgaatgtcatgaatgtggaaaaatcttttacaataaatcatacctaacaaaacataatagaacacatacaggggagaaaccctatgaatgtaatgaatgtggaaaaaccttctgccagaagtcacaactcactcagcatcagagaattcacataggggagaaaccctatgaatgtaatgagtgtggaaaagctttctgccataagtcagctctaattgtacatcagagaacccatacacaagaaaagccttataaatgtaacgaatgtggaaaatctttctgtgtgaagtcaggacttattttacatgagagaaagcacacgggggagaaaccctatgaatgcaatgaatgtgggaaatccttcagtcacaaatcatcactcacagtacatcacagggctcacacaggagagaaatcttgtcagtgtaatgaatgtggaaaaatcttttaccgtaaatcagaccttgctaaacatcagagatcacatacaggggaaaagccctatgaatgtaacacatgcaggaaaaccttctctcaaaagtcaaatctcattgtacatcagagaacacacataggagaaaaaccttatgaatgaattggatattagaaatttccagccacaagtcagcctccataatgcctcagagtcttcacactgtggagaagggcctgttgacatcctgaatgttcaataactatccacaaactcgccttatgttactccaaagtaacagtaggggataaacccatagactacaacaactataggatggcttttgttaggaagtgatattctgttgaatatcagatggttaatactggcataaaacctcacagatttttttgaatttgtgaaagtttttggcaaaactacaaataggattatgttagcgtttacactgaggagaaaattgtcaatttaagaaatctaaagtgaaaattttgcttagaaataaaatatgacaagttctgttttgagtttgatgccataatagtttttaaggtatctaacaataatttatagatgtacattgtggaatgtaaagctttaagaattttttaagaagtaataattaaaataacctcacaagaagttgtaatgagtacagagaattcccgtgtacccttcaccaagcttcctctaaggataatatataatcatagtatatggtc

SEQ ID NO: 333388 - DNA, 1592 bp, Homo sapiens
tgcgtttctgcgtttccgcctttccttttgtttgtctcacgttttgcgtgggaggcggtcccgggatttcaggggtctaccggctctcttatggcgaatgcaacccgaagagagagtgagctgtatcttcagagttgtctccgtctttccaagaacagaacaaaatgaacaaggtagatcagaagttccaggggtcagtatcatttaaagatgtgactgtgggcttcacccaggaggagtggcagcacctggaccctagtcagagggctctgtatagagatgtgatgctggagaactacagcaaccttgtctcagtggggtattgtgctcacaaaccagaggtgatcttcaggctggaacaaggagaagaaccatggagactggaggaagaattcccaagccagagctttccagaagtctggacagctgatcacctgaaagagaggagccaagaaaatcaatctaaacatttgtgggaagttgtattcatcaataatgaaatgctgactaaggaacaaggcccctgaggtgttcatgcactgatcctggaccttggattaaacccttgcagtgctggaagaagaggactctgcactgcctgccacaccaggactggaagatcaatggccttcccttcttccaaactaccttcccatgaggtggggatggtggtcacatctccaacactggcgtgctgtggaagagacatcagcattctctgcaacaaatttggaaacagcctaaagagacgtttctacttcaaagagatgcactgaggaagtgcactggcactgctggggactcacctggggcccagggctgaggcttctcgtgtccttggagctgctgtcctcccgaggagcgtccacactgcagccagctcagcctcaggtgtcctatctggttttgaaaccaaatctaagtgggaaaagaagattcaagttttatccgatttagtctacataattttaagtatctatttgagctcaacaccaagaatcacttccttctctgtcccatctgtggtctccaaaggaaaggtccctgggttaggagacactggctagcatcctaaagccagagctggccgatgggtgtgtgtccactcttccttcacctcttccccaccctacagttgtttttgtctcatgctcacttgctctttctgcctccctctcactctttaggtctcacaaaggctttggtcaaggactgactgactttccttggctctctgtcatctccccataatcaaaggcatttcataacacacaatccatgtgaagggacctctgatcaaaattcacttaaagaggagctcactaattaccagtacttactgctgagcctggaatcattcgtatataccccagagttcattcattccagacacagtactagataaggagactcctatgagccaaaaacctaactctgaatagactgtgactgtcataatcaaaccctgtggtcccagctactcagaaggctgaggcaggagaattgcttgaacccggaggcggaagttgcatgagctgagatcctgtcattgcactccagtctgggggacaagagcgagacttcatctcaaa

SEQ ID NO: 333389 - DNA, 385 bp, Homo sapiens
tgtgaaaggcttggtcagaatctcaggtggcaagaaatggagctctcttagccatctgaaaaccatcagtgtttccaagtctcacagcagttgggggattcgaacaacagtcacaggtaagccttaatcttagaggacaaatcaaggggagcccaggagaggagatccctgtctgcctttgttggtcacctatcttgggtaactaattcagctgagaaggaagtagaaaggtctttgtgtccagatgatcagtctccttcactggccctcagcagcactggactgccccagaagccactgggtatgtactttggctagggtgacagggggatactcaccctcagccaaacagcttgaaaccaagagaaggtacctgtaatgacaa

SEQ ID NO: 333390 - DNA, 192 bp, Homo sapiens
ctcttagtgctacagacaggacccggtttggatggagcaggcagctggctttgccatcttaagtcacgcccagtaactctgtttgctggtcatagagtatgtttgcccctacaatgacaaagcgccagtcaaggcaaagcctggggctgggaaacatattcaggcgggatctcctcttttaggctgtggggc

SEQ ID NO: 333391 - DNA, 246 bp, Homo sapiens
accatctgaagactgccatgtccaacatgcctgctgtattccagaggaacttgaaaggagatagagacagaattcgcctctcgccaagacccacgaccgcagggagcacgcacaggcgattcccgtgccccacttgcttcctcccacgccacccagcgtgccgatcacctgcgcccaagaatctgctgcctgcagggtgaccaagacctccggaatgttcctccacacacttctgctctggttgtc

SEQ ID NO: 333392 - DNA, 420 bp, Homo sapiens
tcctccactgtagatgacatttatttgctcatatatctcaccttggtgagtagaattcttagtccaaatccctgaaaggaatagtgtggctccctagtgcaaatttcctgagagccccttccctcagtatgtgccaagaatcaaatcttggccacttagtgctctgtgttccacatgtgagctcgcgacgcgctgaacggctgtgctaactgagatggatggccctgtcaaacaggaagctggcacaccagggtgcaagcagtgggatacaatgacctttacattcagagaaaaatatccctaaagtggcatgaaaagtttgtggggggaagggaagggagattcttttatttcatttaagtacatagcatgacataaaagcaatggtgcccagtatgcaatttgctcaggatcaaatcg

SEQ ID NO: 333393 - DNA, 362 bp, Homo sapiens
atttggtcctaacctcaccaggctgctaaaatgacacactgtgactgctgggctccctcttgctccgtccctctttgatgcctgtttgttccttgaatgatgaaatgacccagcaacatactgtccctaacccatggatggctgtcactgacatttgtctcttctcattatcattagtgtctgggaggcaaaacacttgtttagaagctgtatctgccttattattacttactttgaaggagcaggtaaaaagtcattagggagctcactctcagagatccaggaatggtccctgccttttaaggtatgctgtttggaccaggtggctgacagtctcactcatcttctttttctgaccccac

SEQ ID NO: 333394 - DNA, 699 bp, Homo sapiens
cacactgcaacaggtttggagtggtgctttgaaagagcagcaaatggcctggctgctgctctcttgttcctccctgaagcctgagctctgcccagctagtgaatgacaaagggggcgctttcagcctctgtaaatagcctattgtacaaggggaggaggcggggcacggaatggcagcatcttgccagcttgggttgctgcgttaaggaaagatgtcaggctttcttaatttgccactgcaggggcaagggtgtcatttatgtgggtttgtttgagggctgcattcctagtgaagtattccatcaaactgccattattcatcttgatgaaagcttgaggaactttagaaggagagaaacatccagaccacccggtttttggtttctaaatgacatgaagagaatactatgttaatgtaagtaaaagtttgcagagttgcaggggcagtgtgtgtgtgtgtgtgtgtatgtttgtgtatgtgtatcttcaagagaatgatgtccttgtgagtcacctctggccctgagccactattttcatggtacaaataaaatggtgaagaggtgaacctttgtgtatagtgggccttgaactcaccacgtgttcagaggccagggtgatacaataaatgctaacgtttttgtaagacattgagcatttaggtggacctcaggagggagctgtcataatacctgggag

SEQ ID NO: 333395 - DNA, 388 bp, Homo sapiens
ggagagcctgactgctcttttggttcaaaagggaatggcttaagcaaatctaactttagggaatttgccaagccagggttaaggagcacactgcaacaggtttggagtggtgctttgaaagagcagcaaatggcctggctgctgctctcttgttcctccctgaagcctgagctctgcccagctagtgaatgacaaagggggcgctttcagcctctgtaaatagcctattgtacaaggggaggaggcggggcacggaatggcagcatcttgccagcttgggttgctgcgttaaggaaagatgtcaggctttcttaatttgccactgcaggggcaagggtgtcatttatgtgggtttgtttgagggctgcattcctagtgaagtattcca

SEQ ID NO: 333396 - DNA, 5861 bp, Homo sapiens
tcccccccacaatgcagttcgcggcgcggcggacatggcggtggagtcctgagctagtcgtgtcccggcctccagcggcggcagcggcgacggcggcggcagcaggaggcggagggagagcaggagccactgagatgaggaggcgtcgcgcgcgcctgtagctcgcgggcctcgcagtttgcttgcctaaactggacttgaagcaatttaaactactggagatctgccattttataatatcacaattggaaagaaacagattttcaaataatggaagagtctaaaaccttaaaaagtgaaaatcatgaaccaaagaagaatgttatttgtgaagaaagcaaagcagttcaagttataggtaatcaaacattgaaagctagaaatgataaatccgtaaaagaaattgagaacagctctccaaataggaatagtagtaaaaaaataagcaaaatgatatttgtatagaaaaaacagaagttaaatcatgtaaagtaaatgctgccaaccttccaggtcctaaagatttggggttagtccttcgagatcaaagtcattgcaaagcaaaaaaatttcctaattcaccggtgaaagccgaaaaggcaaccatttcacaggcaaaatcagaaaaggcaaccagtttacaggcaaaagcagaaaaatcaccaaagtcacctaattcagtgaaagcagaaaaagcatccagttatcagatgaagtcagaaaaagtaccaagttcaccagcagaagcagaaaagggacccagtttactgttgaaagacatgagacagaagacagaattacaacagattggaaaaaaaattccaagctcctttacttctgtggacaaagtgaatattgaagctgtagggggagaaaaatgtgctctgcaaaactcaccacgatctcagaagcaacagacatgtacagataatactggtgattctgatgatagtgcttcaggaattgaagacgtatcggacgatttaagtaaaatgaagaatgatgaatctaataaagaaaattcttcagagatggactacttagaaaatgccactgtgatagatgaatctgcattgacacctgagcagaggctggggttgaaacaagcagaagaacgcttagaaagagatcacatctttcgacttgaaaaacgatcaccagaatataccaattgtcggtatctatgcaaactttgcttaattcacattgaaaatatccagggggctcataaacatataaaggagaaacgacataagaaaaatattttggaaaaacaagaagaaagtgagcttcgttctctgccacctccttcccctgcccacttggctgctttaagtgttgcagtcattgaattagcaaaagaacatggaataacagatgatgacctcagagtccgtcaggaaattgtggaggaaatgtcaaaggttataacgacatttttaccagaatgttcacttaggttgtatggctcatctctgactagatttgctctgaaaagtagtgatgttaatatagatataaaatttcctcccaagatgaatcatccagatcttctgataaaagtacttgggattttaaagaaaaatgtattatatgtagatgtggaatctgattttcacgctaaagttcctgttgtggtgtgcagagatcgaaaaagtggtttactttgtagagtgagtgcaggaaacgatatggcatgtctcactactgatttacttactgcccttggcaaaatagaacctgtctttattcccttggtgttagcctttcgctactgggctaagttgtgctatattgactcccaaactgatggtggaatcccttcttactgttttgctttaatggtgatgttttttctacaacagagaaaaccccctcttcttccttgcttacttggaagttggattgaaggctttgacccaaaaagaatggatgactttcagctgaagggcatagtagaagagaagtttgtgaagtgggaatgtaattcaagtagtgcaactgagaaaaactcaattgctgaggaaaacaaagctaaggcagaccaaccaaaagatgataccaagaagacagaaacagacaaccaaagtaatgccatgaaggaaaaacatggcaaatctcctttagcattggaaacaccaaatcgggtatccttgggacagttatggttagagctgcttaaattctacacactggattttgctttggaggaatatgtcatatgtgtacggatacaagatattttaacaagagaaaataaaaactggcctaaaaggcgaatagccattgaagatccattttcagtcaagaggaatgttgcacggagcttaaacagccagctggtttacgaatatgttgtggagagatttagggcagcttatcggtattttgcctgtcctcagacgaagggtggaaataagtctacagtggatttcaagaaaagagagaaggggaaaataagcaataagaaaccagtcaagtcgaacaatatggcaaccaatggttgtattctgcttggggaaaccacagaaaaaataaatgcagaaagagagcaacctgttcaatgtgatgaaatggactgtacatcacagagatgtattattgacaacaacaatttgttggtaaatgaactagattttgctgaccacggacaggactcttcatctctttctaccagcaaaagcagtgaaatagagccaaaattagataagaaacaagatgatttagcgccttcagaaacttgtttaaaaaaagagctcagccaatgtaattgcattgatttgtctaagtcgcctgacccagataaatctactggaacagactgcaggtcaaatttagaaacagagagttcacatcagagtgtgtgcaccgacacatctgctacctcttgcaactgcaaagctacagaagatgcttctgaccttaatgatgatgataacctccccacccaggaattatattatgtgtttgataagtttattttaacctctggcaagccaccaacgatagtatgcagcatctgcaaaaaggatggccattcaaagaatgattgcccagaggattttaggaaaattgatttaaaacctctaccaccaatgacaaaccgatttcgggaaatacttgatttagtatgtaaaagatgttttgatgagttatcaccaccttgttctgaacaacacaacagggagcaaattttaattggcttggaaaagtttattcaaaaagaatatgatgaaaaggcaaggttgtgcttatttggctcttctaagaatggatttggatttcgtgatagtgatctggatatttgtatgaccctggaaggccatgaaaatgcagagaaattaaattgtaaggaaataattgaaaatttggcaaaaattcttaagagacatccaggtttaagaaacattttgcctataactactgccaaagtgcctatagtaaaatttgaacacaggcgaagtgggttagaaggcgatatcagtttatataatacgttggctcaacataacacaagaatgctagctacttatgcagctattgatcctagagtgcagtatttgggatatactatgaaagtgtttgctaagcgatgtgacattggggatgcttccaggggaagtttatcttcatatgcatatatccttatggtgctgtactttctgcagcagagaaagccacctgttatcccagttctacaagagatctttgatggaaaacagattccacagagaatggttgatggatggaatgctttcttctttgataaaacagaagaactgaaaaagcgtttaccttcacttggaaagaacacagaatcattaggggagctttggctgggactgcttcgtttctatactgaagagtttgatttcaaggaatatgtaattagcattcggcagaaaaagctgttgacaacttttgagaagcagtggacttccaagtgcattgcaattgaagacccttttgacttgaatcataaccttggtgctggagtttccagaaaaatgaccaatttcatcatgaaagcatttatcaatggaaggaaactttttggtacccctttttatccactcattggcagagaagctgagtacttctttgattccagagtattaacagatggagaactggctcccaatgatagatgttgccgtgtgtgtggaaaaataggccactacatgaaagactgccctaaaaggaaaagcagtttactgtttagactaaagaagaaagacagtgaagaagagaaggaagggaatgaagaagagaaagattcccgagatgttcttgacccccgagacctccacgatactcgagactttagagacccgagagacctcagatgttttatatgtggagatgctggacatgtacgaagggagtgcccagaggtcaagctggcccgtcagaggaatagcagtgtggcagcagcccagctggtccgcaaccttgtaaatgctcaacaggtggctggttcagctcagcaacagggtgatcagtccataaggactagacagtcatcagaatgttctgaatcaccatcttattctcctcagcctcagccatttccacagaactcttcccagtcagctgctattactcagccttcatctcagccaggatcccaacctaagcttggcccacctcagcagggagcccaacctccccatcaggtccagatgccactgtataactttccccagtcaccaccagctcagtattctcccatgcacaatatgggattgttgccaatgcaccctctccagatccctgccccgtcctggcccatccatggcccagtgatccactctgcaccaggcagtgcccccagcaatattggcctaaatgatcccagcatcatctttgcacagcctgctgccagacctgtggcaatccctaacacgtctcacgatggacactggccccgtactgtggctccaaattccctggtaaacagtggtgcagtggggaattcagagccaggctttcgaggactgactcctccaattccttgggaacatgcaccgcgtccccatttcccccttgtcccagcttcgtggccttatggtttgcatcaaaacttcatgcatcagggaaatgcccgattccagcccaacaaacctttctatactcaagacagatgtgccacccgtcggtgtagagagcgttgtccccacccaccaagaggaaacgtgtcggagtaatgcgagtccattttctttcagctggtctaccgatgcacagcaaccagccaatcctgctgtctcaagggtatccgtacctcaatgtcagttacattcagcagaaaaagtgacatttaatggaaagcaaaacaaatcaggtcctgatttaaaattttaacacgtttagatagcttatttaaattctaagactgtttttacagactgtattatttgtatataaatatgaactatagtttttactagtatcaccaaattgagtgatacaaatttcatctattttattaccctatttttaagggaattttatgttttgtttaaccttgatgaattgtataaagagagaatttaaaaaattacattctttattttctattagctgtattcatactttggttgcttcagactttatatattgttcttaaaagttaggaaagaatttcatgtgttttaaattgtcacttctattctttacagaaccttgtagtgccaaaaactttttaaaaggtaaaaaaataaaataaaattacaacatgaagattcagattttttttcttttccatacttgtatattgaacattcaaacttgaatggaaagttgattttgtctgtatttgaagtacttctattttaagttaataaatctttttgacaaga

SEQ ID NO: 333397 - DNA, 7657 bp, Homo sapiens
tcccccccacaatgcagttcgcggcgcggcggacatggcggtggagtcctgagctagtcgtgtcccggcctccagcggcggcagcggcgacggcggcggcagcaggaggcggagggagagcaggagccactgagatgaggaggcgtcgcgcgcgcctgtagctcgcgggcctcgcagtttgcttgcctaaactggacttgaagcaatttaaactactggagatctgccattttataatatcacaattggaaagaaacagattttcaaataatggaagagtctaaaaccttaaaaagtgaaaatcatgaaccaaagaagaatgttatttgtgaagaaagcaaagcagttcaagttataggtaatcaaacattgaaagctagaaatgataaatccgtaaaagaaattgagaacagctctccaaataggaatagtagtaaaaaaataagcaaaatgatatttgtatagaaaaaacagaagttaaatcatgtaaagtaaatgctgccaaccttccaggtcctaaagatttggggttagtccttcgagatcaaagtcattgcaaagcaaaaaaatttcctaattcaccggtgaaagccgaaaaggcaaccatttcacaggcaaaatcagaaaaggcaaccagtttacaggcaaaagcagaaaaatcaccaaagtcacctaattcagtgaaagcagaaaaagcatccagttatcagatgaagtcagaaaaagtaccaagttcaccagcagaagcagaaaagggacccagtttactgttgaaagacatgagacagaagacagaattacaacagattggaaaaaaaattccaagctcctttacttctgtggacaaagtgaatattgaagctgtagggggagaaaaatgtgctctgcaaaactcaccacgatctcagaagcaacagacatgtacagataatactggtgattctgatgatagtgcttcaggaattgaagacgtatcggacgatttaagtaaaatgaagaatgatgaatctaataaagaaaattcttcagagatggactacttagaaaatgccactgtgatagatgaatctgcattgacacctgagcagaggctggggttgaaacaagcagaagaacgcttagaaagagatcacatctttcgacttgaaaaacgatcaccagaatataccaattgtcggtatctatgcaaactttgcttaattcacattgaaaatatccagggggctcataaacatataaaggagaaacgacataagaaaaatattttggaaaaacaagaagaaagtgagcttcgttctctgccacctccttcccctgcccacttggctgctttaagtgttgcagtcattgaattagcaaaagaacatggaataacagatgatgacctcagagtccgtcaggaaattgtggaggaaatgtcaaaggttataacgacatttttaccagaatgttcacttaggttgtatggctcatctctgactagatttgctctgaaaagtagtgatgttaatatagatataaaatttcctcccaagatgaatcatccagatcttctgataaaagtacttgggattttaaagaaaaatgtattatatgtagatgtggaatctgattttcacgctaaagttcctgttgtggtgtgcagagatcgaaaaagtggtttactttgtagagtgagtgcaggaaacgatatggcatgtctcactactgatttacttactgcccttggcaaaatagaacctgtctttattcccttggtgttagcctttcgctactgggctaagttgtgctatattgactcccaaactgatggtggaatcccttcttactgttttgctttaatggtgatgttttttctacaacagagaaaaccccctcttcttccttgcttacttggaagttggtctcctttagcattggaaacaccaaatcgggtatccttgggacagttatggttagagctgcttaaattctacacactggattttgctttggaggaatatgtcatatgtgtacggatacaagatattttaacaagagaaaataaaaactggcctaaaaggcgaatagccattgaagatccattttcagtcaagaggaatgttgcacggagcttaaacagccagctggtttacgaatatgttgtggagagatttagggcagcttatcggtattttgcctgtcctcagacgaagggtggaaataagtctacagtggatttcaagaaaagagagaaggggaaaataagcaataagaaaccagtcaagtcgaacaatatggcaaccaatggttgtattctgcttggggaaaccacagaaaaaataaatgcagaaagagagcaacctgttcaatgtgatgaaatggactgtacatcacagagatgtattattgacaacaacaatttgttggtaaatgaactagattttgctgaccacggacaggactcttcatctctttctaccagcaaaagcagtgaaatagagccaaaattagataagaaacaagatgatttagcgccttcagaaacttgtttaaaaaaagagctcagccaatgtaattgcattgatttgtctaagtcgcctgacccagataaatctactggaacagactgcaggtcaaatttagaaacagagagttcacatcagagtgtgtgcaccgacacatctgctacctcttgcaactgcaaagctacagaagatgcttctgaccttaatgatgatgataacctccccacccaggaattatattatgtgtttgataagtttattttaacctctggcaagccaccaacgatagtatgcagcatctgcaaaaaggatggccattcaaagaatgattgcccagaggattttaggaaaattgatttaaaacctctaccaccaatgacaaaccgatttcgggaaatacttgatttagtatgtaaaagatgttttgatgagttatcaccaccttgttctgaacaacacaacagggagcaaattttaattggcttggaaaagtttattcaaaaagaatatgatgaaaaggcaaggttgtgcttatttggctcttctaagaatggatttggatttcgtgatagtgatctggatatttgtatgaccctggaaggccatgaaaatgcagaggccttaatagtgggaaggagattgtccaagctccagggaagaaaaagactgattggacagggaagaagtgtcccaggccttctcaacagcaactagcaaaggagggtatccttgtagatgttcagtcctttaccagcctagctattgttatttatgtttcaaaatgcgggactgtttgcaagattggggtgaggcccagcttctggcatctgtagtggtgtcagtatcgcctctgttacattataaaagaattcagcagaatagtgtgcttttctaaaatcattcttttgaacggtggttttgaaattgttagacccggagtaaagatggcagtgatgacttaacttctggccataagaagttgcttctggtgtcttaacatcttgttttataaagaaactgaaaagttgcaagtattttatttgttctcctttacttaaattctgcttagagccacctacttggaaagtggctgcccttctccattctgaagagtaagaattgagggaataggaaatgatttttatacccaggaaagaggttagagttttagatatcttctatgtaaaatttattaaacttctaatcactaagggtttgtatattatatataatctgtgccattcctactgggaagttgaaacaatgaaaataataaatcattttctttcagatgagccataattgaaacttttaagattagcataattgtatcgttgaataataaagagaaaaattacctcctttgttaattttatcatatgtgaattagtaactaatggtttctttgaaatcctttggtttagctgcaatggctcctgctctcatgtagctaaaaagaacatgttggaaaaatgcaaatgactttataactcttgggattgatgtttatacccttcagctatttccagttaatttttaatgccataatcattatgtattatgattatcattaccataccaactctgctgtctctggtttttacaagagtaacacatttaaatttacagaggtaagaatttccttggagaaataggtgctggtgataataggagtatctttcttttccatatcaacataattataataaataactcacagatttaaaggcttattttgtgccaggcattctgctgagtgctttacatacatgtctcatgtaatcctcccaacagctctgcaggacaggagtttatgattatcttgattttatagaatagtaatgtaatgctcagagaggttaaacatctggttagtcacacagctaatcaatacttagtttaagatttgagactgggtgcagtggctcacgcctgtaatcccagcactttgggaggctgaggcgggcggatcacgaggtcaggagatcgagaccatcctggtgaacacggtgaaacctggtctctactaaaaatacaaaaaaattagccgggcacggtggcgggtgcctgtagtcccagcaactcgggaggctgagacaggagaatggcatgaacccgggaggcagagcttgcagtgagccgagatagcaccactgcactccggcctgggcgaaagagcaagactccgtctcaaaaaaagaaaaaaaaaaaaaaaaaaaaagatttgaatccaggtttgtctcaatttggagcctatgtacttaatcagtatattgttttgccctcaccaaactcacctctagttgtttattcacttattgaaaaccatattcttctcctgtctttgtgcttctcaaactttaatctgcatgtgaattaccttgggatcctgttaaaatgcagattatgatttagtagactggggagggtcctcagattctgcatttctatcaagtttccagattatgctgatactgtaggtctatgaatcacttacttggagtagcaaggttattatagagctttatggctggaaattgtaaatgctactattaaatgcttagattaaagtagaatttgcacaaggtgaaattgagtcaaacttatttatttgatttgttttttagaaattaaattgtaaggaaataattgaaaatttggcaaaaattcttaagagacatccaggtttaagaaacattttgcctataactactgccaaagtgcctatagtaaaatttgaacacaggcgaagtgggttagaaggcgatatcagtttatataatacgttggctcaacataacacaagaatgctagctacttatgcagctattgatcctagagtgcagtatttgggatatactatgaaagtgtttgctaagcgatgtgacattggggatgcttccaggggaagtttatcttcatatgcatatatccttatggtgctgtactttctgcagcagagaaagccacctgttatcccagttctacaagagatctttgatggaaaacagattccacagagaatggttgatggatggaatgctttcttctttgataaaacagaagaactgaaaaagcgtttaccttcacttggaaagaacacagaatcattaggggagctttggctgggactgcttcgtttctatactgaagagtttgatttcaaggaatatgtaattagcattcggcagaaaaagctgttgacaacttttgagaagcagtggacttccaagtgcattgcaattgaagacccttttgacttgaatcataaccttggtgctggagtttccagaaaaatgaccaatttcatcatgaaagcatttatcaatggaaggaaactttttggtacccctttttatccactcattggcagagaagctgagtacttctttgattccagagtattaacagatggagaactggctcccaatgatagatgttgccgtgtgtgtggaaaaataggccactacatgaaagactgccctaaaaggaaaagcagtttactgtttagactaaagaagaaagacagtgaagaagagaaggaagggaatgaagaagagaaagattcccgagatgttcttgacccccgagacctccacgatactcgagactttagagacccgagagacctcagatgttttatatgtggagatgctggacatgtacgaagggagtgcccagaggtcaagctggcccgtcagaggaatagcagtgtggcagcagcccagctggtccgcaaccttgtaaatgctcaacaggtggctggttcagctcagcaacagggtgatcagtccataaggactagacagtcatcagaatgttctgaatcaccatcttattctcctcagcctcagccatttccacagaactcttcccagtcagctgctattactcagccttcatctcagccaggatcccaacctaagcttggcccacctcagcagggagcccaacctccccatcaggtccagatgccactgtataactttccccagtcaccaccagctcagtattctcccatgcacaatatgggattgttgccaatgcaccctctccagatccctgccccgtcctggcccatccatggcccagtgatccactctgcaccaggcagtgcccccagcaatattggcctaaatgatcccagcatcatctttgcacagcctgctgccagacctgtggcaatccctaacacgtctcacgatggacactggccccgtactgtggctccaaattccctggtaaacagtggtgcagtggggaattcagagccaggctttcgaggactgactcctccaattccttgggaacatgcaccgcgtccccatttcccccttgtcccagcttcgtggccttatggtttgcatcaaaacttcatgcatcagggaaatgcccgattccagcccaacaaacctttctatactcaagacagatgtgccacccgtcggtgtagagagcgttgtccccacccaccaagaggaaacgtgtcggagtaatgcgagtccattttctttcagctggtctaccgatgcacagcaaccagccaatcctgctgtctcaagggtatccgtacctcaatgtcagttacattcagcagaaaaagtgacatttaatggaaagcaaaacaaatcaggtcctgatttaaaattttaacacgtttagatagcttatttaaattctaagactgtttttacagactgtattatttgtatataaatatgaactatagtttttactagtatcaccaaattgagtgatacaaatttcatctattttattaccctatttttaagggaattttatgttttgtttaaccttgatgaattgtataaagagagaatttaaaaaattacattctttattttctattagctgtattcatactttggttgcttcagactttatatattgttcttaaaagttaggaaagaatttcatgtgttttaaattgtcacttctattctttacagaaccttgtagtgccaaaaactttttaaaaggtaaaaaaataaaataaaattacaacatgaagattcagattttttttcttttccatacttgtatattgaacattcaaacttgaatggaaagttgattttgtctgtatttgaagtacttctattttaagttaataaatctttttgacaaga

SEQ ID NO: 333398 - DNA, 7938 bp, Homo sapiens
tcccccccacaatgcagttcgcggcgcggcggacatggcggtggagtcctgagctagtcgtgtcccggcctccagcggcggcagcggcgacggcggcggcagcaggaggcggagggagagcaggagccactgagatgaggaggcgtcgcgcgcgcctgtagctcgcgggcctcgcagtttgcttgcctaaactggacttgaagcaatttaaactactggagatctgccattttataatatcacaattggaaagaaacagattttcaaataatggaagagtctaaaaccttaaaaagtgaaaatcatgaaccaaagaagaatgttatttgtgaagaaagcaaagcagttcaagttataggtaatcaaacattgaaagctagaaatgataaatccgtaaaagaaattgagaacagctctccaaataggaatagtagtaaaaaaataagcaaaatgatatttgtatagaaaaaacagaagttaaatcatgtaaagtaaatgctgccaaccttccaggtcctaaagatttggggttagtccttcgagatcaaagtcattgcaaagcaaaaaaatttcctaattcaccggtgaaagccgaaaaggcaaccatttcacaggcaaaatcagaaaaggcaaccagtttacaggcaaaagcagaaaaatcaccaaagtcacctaattcagtgaaagcagaaaaagcatccagttatcagatgaagtcagaaaaagtaccaagttcaccagcagaagcagaaaagggacccagtttactgttgaaagacatgagacagaagacagaattacaacagattggaaaaaaaattccaagctcctttacttctgtggacaaagtgaatattgaagctgtagggggagaaaaatgtgctctgcaaaactcaccacgatctcagaagcaacagacatgtacagataatactggtgattctgatgatagtgcttcaggaattgaagacgtatcggacgatttaagtaaaatgaagaatgatgaatctaataaagaaaattcttcagagatggactacttagaaaatgccactgtgatagatgaatctgcattgacacctgagcagaggctggggttgaaacaagcagaagaacgcttagaaagagatcacatctttcgacttgaaaaacgatcaccagaatataccaattgtcggtatctatgcaaactttgcttaattcacattgaaaatatccagggggctcataaacatataaaggagaaacgacataagaaaaatattttgaatgttcacttaggttgtatggctcatctctgactagatttgctctgaaaagtagtgatgttaatatagatataaaatttcctcccaagatgaatcatccagatcttctgataaaagtacttgggattttaaagaaaaatgtattatatgtagatgtggaatctgattttcacgctaaagttcctgttgtggtgtgcagagatcgaaaaagtggtttactttgtagagtgagtgcaggaaacgatatggcatgtctcactactgatttacttactgcccttggcaaaatagaacctgtctttattcccttggtgttagcctttcgctactgggctaagttgtgctatattgactcccaaactgatggtggaatcccttcttactgttttgctttaatggtgatgttttttctacaacagagaaaaccccctcttcttccttgcttacttggaagttggattgaaggctttgacccaaaaagaatggatgactttcagctgaagggcatagtagaagagaagtttgtgaagtgggaatgtaattcaagtagtgcaactgagaaaaactcaattgctgaggaaaacaaagctaaggcagaccaaccaaaagatgataccaagaagacagaaacagacaaccaaagtaatgccatgaaggaaaaacatggcaaatctcctttagcattggaaacaccaaatcgggtatccttgggacagttatggttagagctgcttaaattctacacactggattttgctttggaggaatatgtcatatgtgtacggatacaagatattttaacaagagaaaataaaaactggcctaaaaggcgaatagccattgaagatccattttcagtcaagaggaatgttgcacggagcttaaacagccagctggtttacgaatatgttgtggagagatttagggcagcttatcggtattttgcctgtcctcagacgaagggtggaaataagtctacagtggatttcaagaaaagagagaaggggaaaataagcaataagaaaccagtcaagtcgaacaatatggcaaccaatggttgtattctgcttggggaaaccacagaaaaaataaatgcagaaagagagcaacctgttcaatgtgatgaaatggactgtacatcacagagatgtattattgacaacaacaatttgttggtaaatgaactagattttgctgaccacggacaggactcttcatctctttctaccagcaaaagcagtgaaatagagccaaaattagataagaaacaagatgatttagcgccttcagaaacttgtttaaaaaaagagctcagccaatgtaattgcattgatttgtctaagtcgcctgacccagataaatctactggaacagactgcaggtcaaatttagaaacagagagttcacatcagagtgtgtgcaccgacacatctgctacctcttgcaactgcaaagctacagaagatgcttctgaccttaatgatgatgataacctccccacccaggaattatattatgtgtttgataagtttattttaacctctggcaagccaccaacgatagtatgcagcatctgcaaaaaggatggccattcaaagaatgattgcccagaggattttaggaaaattgatttaaaacctctaccaccaatgacaaaccgatttcgggaaatacttgatttagtatgtaaaagatgttttgatgagttatcaccaccttgttctgaacaacacaacagggagcaaattttaattggcttggaaaagtttattcaaaaagaatatgatgaaaaggcaaggttgtgcttatttggctcttctaagaatggatttggatttcgtgatagtgatctggatatttgtatgaccctggaaggccatgaaaatgcagaggccttaatagtgggaaggagattgtccaagctccagggaagaaaaagactgattggacagggaagaagtgtcccaggccttctcaacagcaactagcaaaggagggtatccttgtagatgttcagtcctttaccagcctagctattgttatttatgtttcaaaatgcgggactgtttgcaagattggggtgaggcccagcttctggcatctgtagtggtgtcagtatcgcctctgttacattataaaagaattcagcagaatagtgtgcttttctaaaatcattcttttgaacggtggttttgaaattgttagacccggagtaaagatggcagtgatgacttaacttctggccataagaagttgcttctggtgtcttaacatcttgttttataaagaaactgaaaagttgcaagtattttatttgttctcctttacttaaattctgcttagagccacctacttggaaagtggctgcccttctccattctgaagagtaagaattgagggaataggaaatgatttttatacccaggaaagaggttagagttttagatatcttctatgtaaaatttattaaacttctaatcactaagggtttgtatattatatataatctgtgccattcctactgggaagttgaaacaatgaaaataataaatcattttctttcagatgagccataattgaaacttttaagattagcataattgtatcgttgaataataaagagaaaaattacctcctttgttaattttatcatatgtgaattagtaactaatggtttctttgaaatcctttggtttagctgcaatggctcctgctctcatgtagctaaaaagaacatgttggaaaaatgcaaatgactttataactcttgggattgatgtttatacccttcagctatttccagttaatttttaatgccataatcattatgtattatgattatcattaccataccaactctgctgtctctggtttttacaagagtaacacatttaaatttacagaggtaagaatttccttggagaaataggtgctggtgataataggagtatctttcttttccatatcaacataattataataaataactcacagatttaaaggcttattttgtgccaggcattctgctgagtgctttacatacatgtctcatgtaatcctcccaacagctctgcaggacaggagtttatgattatcttgattttatagaatagtaatgtaatgctcagagaggttaaacatctggttagtcacacagctaatcaatacttagtttaagatttgagactgggtgcagtggctcacgcctgtaatcccagcactttgggaggctgaggcgggcggatcacgaggtcaggagatcgagaccatcctggtgaacacggtgaaacctggtctctactaaaaatacaaaaaaattagccgggcacggtggcgggtgcctgtagtcccagcaactcgggaggctgagacaggagaatggcatgaacccgggaggcagagcttgcagtgagccgagatagcaccactgcactccggcctgggcgaaagagcaagactccgtctcaaaaaaagaaaaaaaaaaaaaaaaaaaaagatttgaatccaggtttgtctcaatttggagcctatgtacttaatcagtatattgttttgccctcaccaaactcacctctagttgtttattcacttattgaaaaccatattcttctcctgtctttgtgcttctcaaactttaatctgcatgtgaattaccttgggatcctgttaaaatgcagattatgatttagtagactggggagggtcctcagattctgcatttctatcaagtttccagattatgctgatactgtaggtctatgaatcacttacttggagtagcaaggttattatagagctttatggctggaaattgtaaatgctactattaaatgcttagattaaagtagaatttgcacaaggtgaaattgagtcaaacttatttatttgatttgttttttagaaattaaattgtaaggaaataattgaaaatttggcaaaaattcttaagagacatccaggtttaagaaacattttgcctataactactgccaaagtgcctatagtaaaatttgaacacaggcgaagtgggttagaaggcgatatcagtttatataatacgttggctcaacataacacaagaatgctagctacttatgcagctattgatcctagagtgcagtatttgggatatactatgaaagtgtttgctaagcgatgtgacattggggatgcttccaggggaagtttatcttcatatgcatatatccttatggtgctgtactttctgcagcagagaaagccacctgttatcccagttctacaagagatctttgatggaaaacagattccacagagaatggttgatggatggaatgctttcttctttgataaaacagaagaactgaaaaagcgtttaccttcacttggaaagaacacagaatcattaggggagctttggctgggactgcttcgtttctatactgaagagtttgatttcaaggaatatgtaattagcattcggcagaaaaagctgttgacaacttttgagaagcagtggacttccaagtgcattgcaattgaagacccttttgacttgaatcataaccttggtgctggagtttccagaaaaatgaccaatttcatcatgaaagcatttatcaatggaaggaaactttttggtacccctttttatccactcattggcagagaagctgagtacttctttgattccagagtattaacagatggagaactggctcccaatgatagatgttgccgtgtgtgtggaaaaataggccactacatgaaagactgccctaaaaggaaaagcagtttactgtttagactaaagaagaaagacagtgaagaagagaaggaagggaatgaagaagagaaagattcccgagatgttcttgacccccgagacctccacgatactcgagactttagagacccgagagacctcagatgttttatatgtggagatgctggacatgtacgaagggagtgcccagaggtcaagctggcccgtcagaggaatagcagtgtggcagcagcccagctggtccgcaaccttgtaaatgctcaacaggtggctggttcagctcagcaacagggtgatcagtccataaggactagacagtcatcagaatgttctgaatcaccatcttattctcctcagcctcagccatttccacagaactcttcccagtcagctgctattactcagccttcatctcagccaggatcccaacctaagcttggcccacctcagcagggagcccaacctccccatcaggtccagatgccactgtataactttccccagtcaccaccagctcagtattctcccatgcacaatatgggattgttgccaatgcaccctctccagatccctgccccgtcctggcccatccatggcccagtgatccactctgcaccaggcagtgcccccagcaatattggcctaaatgatcccagcatcatctttgcacagcctgctgccagacctgtggcaatccctaacacgtctcacgatggacactggccccgtactgtggctccaaattccctggtaaacagtggtgcagtggggaattcagagccaggctttcgaggactgactcctccaattccttgggaacatgcaccgcgtccccatttcccccttgtcccagcttcgtggccttatggtttgcatcaaaacttcatgcatcagggaaatgcccgattccagcccaacaaacctttctatactcaagacagatgtgccacccgtcggtgtagagagcgttgtccccacccaccaagaggaaacgtgtcggagtaatgcgagtccattttctttcagctggtctaccgatgcacagcaaccagccaatcctgctgtctcaagggtatccgtacctcaatgtcagttacattcagcagaaaaagtgacatttaatggaaagcaaaacaaatcaggtcctgatttaaaattttaacacgtttagatagcttatttaaattctaagactgtttttacagactgtattatttgtatataaatatgaactatagtttttactagtatcaccaaattgagtgatacaaatttcatctattttattaccctatttttaagggaattttatgttttgtttaaccttgatgaattgtataaagagagaatttaaaaaattacattctttattttctattagctgtattcatactttggttgcttcagactttatatattgttcttaaaagttaggaaagaatttcatgtgttttaaattgtcacttctattctttacagaaccttgtagtgccaaaaactttttaaaaggtaaaaaaataaaataaaattacaacatgaagattcagattttttttcttttccatacttgtatattgaacattcaaacttgaatggaaagttgattttgtctgtatttgaagtacttctattttaagttaataaatctttttgacaagaaaaaaaaaaaaaaaaaaaaaaaaaaaaaaaaaaaaaaaaaaaaaaaaaaaaaaaaaaaaaacataaaggggggccccaaaacccaatttccccttaaagggagccaattacaatttaatggcccgtctttaaaaaacgtcgtgctgggaaaacccttgggttccccaaattaattcccttggaagaaaattccccttttctcagttgggggaaatcccaaaaggccccgtccaaatggttttccca

SEQ ID NO: 333399 - DNA, 7101 bp, Homo sapiens
agtggtagacactgagggaaagagctgtgattaggagggtatgagctacaactacacgagaccgatgtcattgcgtgtacattggattctaaagatgatagtaggtgaatattaaacataatttagcattaccatgatattgttagatatcgtattaaagttagtatgtaatctcctatgataactattttgaaaaaggactactatctcttcagtatataagtttattaaaaactattactttagaagaaggaaaggataaagaaaaaaccttcagtgcttatttctgtctacttacataattgtattattcacttatatagtcaatagtttactcctctgttttctgaataaagtgcatttttaaaatttgtctcttcagcgatcaccagaatataccaattgtcggtatctatgcaaactttgcttaattcacattgaaaatatccagggggctcataaacatataaaggagaaacgacataagaaaaatattttggaaaaacaagaagaaagtgagcttcgttctctgccacctccttcccctgcccacttggctgctttaagtgttgcagtcattgaattagcaaaagaacatggaataacagatgatgacctcagagtccgtcaggaaattgtggaggaaatgtcaaaggttataacgacatttttaccagaatgttcacttaggttgtatggctcatctctgactagatttgctctgaaaagtagtgatgttaatatagatataaaatttcctcccaagatgaatcatccagatcttctgataaaagtacttgggattttaaagaaaaatgtattatatgtagatgtggaatctgattttcacgctaaagttcctgttgtggtgtgcagagatcgaaaaagtggtttactttgtagagtgagtgcaggaaacgatatggcatgtctcactactgatttacttactgcccttggcaaaatagaacctgtctttattcccttggtgttagcctttcgctactgggctaagttgtgctatattgactcccaaactgatggtggaatcccttcttactgttttgctttaatggtgatgttttttctacaacagagaaaaccccctcttcttccttgcttacttggaagttggattgaaggctttgacccaaaaagaatggatgactttcagctgaagggcatagtagaagagaagtttgtgaagtgggaatgtaattcaagtagtgcaactgagaaaaactcaattgctgaggaaaacaaagctaaggcagaccaaccaaaagatgataccaagaagacagaaacagacaaccaaagtaatgccatgaaggaaaaacatggcaaatctcctttagcattggaaacaccaaatcgggtatccttgggacagttatggttagagctgcttaaattctacacactggattttgctttggaggaatatgtcatatgtgtacggatacaagatattttaacaagagaaaataaaaactggcctaaaaggcgaatagccattgaagatccattttcagtcaagaggaatgttgcacggagcttaaacagccagctggtttacgaatatgttgtggagagatttagggcagcttatcggtattttgcctgtcctcagacgaagggtggaaataagtctacagtggatttcaagaaaagagagaaggggaaaataagcaataagaaaccagtcaagtcgaacaatatggcaaccaatggttgtattctgcttggggaaaccacagaaaaaataaatgcagaaagagagcaacctgttcaatgtgatgaaatggactgtacatcacagagatgtattattgacaacaacaatttgttggtaaatgaactagattttgctgaccacggacaggactcttcatctctttctaccagcaaaagcagtgaaatagagccaaaattagataagaaacaagatgatttagcgccttcagaaacttgtttaaaaaaagagctcagccaatgtaattgcattgatttgtctaagtcgcctgacccagataaatctactggaacagactgcaggtcaaatttagaaacagagagttcacatcagagtgtgtgcaccgacacatctgctacctcttgcaactgcaaagctacagaagatgcttctgaccttaatgatgatgataacctccccacccaggaattatattatgtgtttgataagtttattttaacctctggcaagccaccaacgatagtatgcagcatctgcaaaaaggatggccattcaaagaatgattgcccagaggattttaggaaaattgatttaaaacctctaccaccaatgacaaaccgatttcgggaaatacttgatttagtatgtaaaagatgttttgatgagttatcaccaccttgttctgaacaacacaacagggagcaaattttaattggcttggaaaagtttattcaaaaagaatatgatgaaaaggcaaggttgtgcttatttggctcttctaagaatggatttggatttcgtgatagtgatctggatatttgtatgaccctggaaggccatgaaaatgcagaggccttaatagtgggaaggagattgtccaagctccagggaagaaaaagactgattggacagggaagaagtgtcccaggccttctcaacagcaactagcaaaggagggtatccttgtagatgttcagtcctttaccagcctagctattgttatttatgtttcaaaatgcgggactgtttgcaagattggggtgaggcccagcttctggcatctgtagtggtgtcagtatcgcctctgttacattataaaagaattcagcagaatagtgtgcttttctaaaatcattcttttgaacggtggttttgaaattgttagacccggagtaaagatggcagtgatgacttaacttctggccataagaagttgcttctggtgtcttaacatcttgttttataaagaaactgaaaagttgcaagtattttatttgttctcctttacttaaattctgcttagagccacctacttggaaagtggctgcccttctccattctgaagagtaagaattgagggaataggaaatgatttttatacccaggaaagaggttagagttttagatatcttctatgtaaaatttattaaacttctaatcactaagggtttgtatattatatataatctgtgccattcctactgggaagttgaaacaatgaaaataataaatcattttctttcagatgagccataattgaaacttttaagattagcataattgtatcgttgaataataaagagaaaaattacctcctttgttaattttatcatatgtgaattagtaactaatggtttctttgaaatcctttggtttagctgcaatggctcctgctctcatgtagctaaaaagaacatgttggaaaaatgcaaatgactttataactcttgggattgatgtttatacccttcagctatttccagttaatttttaatgccataatcattatgtattatgattatcattaccataccaactctgctgtctctggtttttacaagagtaacacatttaaatttacagaggtaagaatttccttggagaaataggtgctggtgataataggagtatctttcttttccatatcaacataattataataaataactcacagatttaaaggcttattttgtgccaggcattctgctgagtgctttacatacatgtctcatgtaatcctcccaacagctctgcaggacaggagtttatgattatcttgattttatagaatagtaatgtaatgctcagagaggttaaacatctggttagtcacacagctaatcaatacttagtttaagatttgagactgggtgcagtggctcacgcctgtaatcccagcactttgggaggctgaggcgggcggatcacgaggtcaggagatcgagaccatcctggtgaacacggtgaaacctggtctctactaaaaatacaaaaaaattagccgggcacggtggcgggtgcctgtagtcccagcaactcgggaggctgagacaggagaatggcatgaacccgggaggcagagcttgcagtgagccgagatagcaccactgcactccggcctgggcgaaagagcaagactccgtctcaaaaaaagaaaaaaaaaaaaaaaaaaaaagatttgaatccaggtttgtctcaatttggagcctatgtacttaatcagtatattgttttgccctcaccaaactcacctctagttgtttattcacttattgaaaaccatattcttctcctgtctttgtgcttctcaaactttaatctgcatgtgaattaccttgggatcctgttaaaatgcagattatgatttagtagactggggagggtcctcagattctgcatttctatcaagtttccagattatgctgatactgtaggtctatgaatcacttacttggagtagcaaggttattatagagctttatggctggaaattgtaaatgctactattaaatgcttagattaaagtagaatttgcacaaggtgaaattgagtcaaacttatttatttgatttgttttttagaaattaaattgtaaggaaataattgaaaatttggcaaaaattcttaagagacatccaggtttaagaaacattttgcctataactactgccaaagtgcctatagtaaaatttgaacacaggcgaagtgggttagaaggcgatatcagtttatataatacgttggctcaacataacacaagaatgctagctacttatgcagctattgatcctagagtgcagtatttgggatatactatgaaagtgtttgctaagcgatgtgacattggggatgcttccaggggaagtttatcttcatatgcatatatccttatggtgctgtactttctgcagcagagaaagccacctgttatcccagttctacaagagatctttgatggaaaacagattccacagagaatggttgatggatggaatgctttcttctttgataaaacagaagaactgaaaaagcgtttaccttcacttggaaagaacacagaatcattaggggagctttggctgggactgcttcgtttctatactgaagagtttgatttcaaggaatatgtaattagcattcggcagaaaaagctgttgacaacttttgagaagcagtggacttccaagtgcattgcaattgaagacccttttgacttgaatcataaccttggtgctggagtttccagaaaaatgaccaatttcatcatgaaagcatttatcaatggaaggaaactttttggtacccctttttatccactcattggcagagaagctgagtacttctttgattccagagtattaacagatggagaactggctcccaatgatagatgttgccgtgtgtgtggaaaaataggccactacatgaaagactgccctaaaaggaaaagcagtttactgtttagactaaagaagaaagacagtgaagaagagaaggaagggaatgaagaagagaaagattcccgagatgttcttgacccccgagacctccacgatactcgagactttagagacccgagagacctcagatgttttatatgtggagatgctggacatgtacgaagggagtgcccagaggtcaagctggcccgtcagaggaatagcagtgtggcagcagcccagctggtccgcaaccttgtaaatgctcaacaggtggctggttcagctcagcaacagggtgatcagtccataaggactagacagtcatcagaatgttctgaatcaccatcttattctcctcagcctcagccatttccacagaactcttcccagtcagctgctattactcagccttcatctcagccaggatcccaacctaagcttggcccacctcagcagggagcccaacctccccatcaggtccagatgccactgtataactttccccagtcaccaccagctcagtattctcccatgcacaatatgggattgttgccaatgcaccctctccagatccctgccccgtcctggcccatccatggcccagtgatccactctgcaccaggcagtgcccccagcaatattggcctaaatgatcccagcatcatctttgcacagcctgctgccagacctgtggcaatccctaacacgtctcacgatggacactggccccgtactgtggctccaaattccctggtaaacagtggtgcagtggggaattcagagccaggctttcgaggactgactcctccaattccttgggaacatgcaccgcgtccccatttcccccttgtcccagcttcgtggccttatggtttgcatcaaaacttcatgcatcagggaaatgcccgattccagcccaacaaacctttctatactcaagacagatgtgccacccgtcggtgtagagagcgttgtccccacccaccaagaggaaacgtgtcggagtaatgcgagtccattttctttcagctggtctaccgatgcacagcaaccagccaatcctgctgtctcaagggtatccgtacctcaatgtcagttacattcagcagaaaaagtgacatttaatggaaagcaaaacaaatcaggtcctgatttaaaattttaacacgtttagatagcttatttaaattctaagactgtttttacagactgtattatttgtatataaatatgaactatagtttttactagtatcaccaaattgagtgatacaaatttcatctattttattaccctatttttaagggaattttatgttttgtttaaccttgatgaattgtataaagagagaatttaaaaaattacattctttattttctattagctgtattcatactttggttgcttcagactttatatattgttcttaaaagttaggaaagaatttcatgtgttttaaattgtcacttctattctttacagaaccttgtagtgccaaaaactttttaaaaggtaaaaaaataaaataaaattacaacatgaagattcagattttttttcttttccatacttgtatattgaacattcaaacttgaatggaaagttgattttgtctgtatttgaagtacttctattttaagttaataaatctttttgacaaga

SEQ ID NO: 333400 - DNA, 6033 bp, Homo sapiens
gagtcatccacgtcttctcccctacacgagagtaaacccctcttcttcattgctactctggagtaggattgaaggctttgacccaaaaagaatggatgactttcagctgaagggcatagtagaagagaagtttgtgaagtgggaatgtaattcaagtagtgcaactgagaaaaactcaattgctgaggaaaacaaagctaaggcagaccaaccaaaagatgataccaagaagacagaaacagacaaccaaagtaatgccatgaaggaaaaacatggcaaatctcctttagcattggaaacaccaaatcgggtatccttgggacagttatggttagagctgcttaaattctacacactggattttgctttggaggaatatgtcatatgtgtacggatacaagatattttaacaagagaaaataaaaactggcctaaaaggcgaatagccattgaagatccattttcagtcaagaggaatgttgcacggagcttaaacagccagctggtttacgaatatgttgtggagagatttagggcagcttatcggtattttgcctgtcctcagacgaagggtggaaataagtctacagtggatttcaagaaaagagagaaggggaaaataagcaataagaaaccagtcaagtcgaacaatatggcaaccaatggttgtattctgcttggggaaaccacagaaaaaataaatgcagaaagagagcaacctgttcaatgtgatgaaatggactgtacatcacagagatgtattattgacaacaacaatttgttggtaaatgaactagattttgctgaccacggacaggactcttcatctctttctaccagcaaaagcagtgaaatagagccaaaattagataagaaacaagatgatttagcgccttcagaaacttgtttaaaaaaagagctcagccaatgtaattgcattgatttgtctaagtcgcctgacccagataaatctactggaacagactgcaggtcaaatttagaaacagagagttcacatcagagtgtgtgcaccgacacatctgctacctcttgcaactgcaaagctacagaagatgcttctgaccttaatgatgatgataacctccccacccaggaattatattatgtgtttgataagtttattttaacctctggcaagccaccaacgatagtatgcagcatctgcaaaaaggatggccattcaaagaatgattgcccagaggattttaggaaaattgatttaaaacctctaccaccaatgacaaaccgatttcgggaaatacttgatttagtatgtaaaagatgttttgatgagttatcaccaccttgttctgaacaacacaacagggagcaaattttaattggcttggaaaagtttattcaaaaagaatatgatgaaaaggcaaggttgtgcttatttggctcttctaagaatggatttggatttcgtgatagtgatctggatatttgtatgaccctggaaggccatgaaaatgcagaggccttaatagtgggaaggagattgtccaagctccagggaagaaaaagactgattggacagggaagaagtgtcccaggccttctcaacagcaactagcaaaggagggtatccttgtagatgttcagtcctttaccagcctagctattgttatttatgtttcaaaatgcgggactgtttgcaagattggggtgaggcccagcttctggcatctgtagtggtgtcagtatcgcctctgttacattataaaagaattcagcagaatagtgtgcttttctaaaatcattcttttgaacggtggttttgaaattgttagacccggagtaaagatggcagtgatgacttaacttctggccataagaagttgcttctggtgtcttaacatcttgttttataaagaaactgaaaagttgcaagtattttatttgttctcctttacttaaattctgcttagagccacctacttggaaagtggctgcccttctccattctgaagagtaagaattgagggaataggaaatgatttttatacccaggaaagaggttagagttttagatatcttctatgtaaaatttattaaacttctaatcactaagggtttgtatattatatataatctgtgccattcctactgggaagttgaaacaatgaaaataataaatcattttctttcagatgagccataattgaaacttttaagattagcataattgtatcgttgaataataaagagaaaaattacctcctttgttaattttatcatatgtgaattagtaactaatggtttctttgaaatcctttggtttagctgcaatggctcctgctctcatgtagctaaaaagaacatgttggaaaaatgcaaatgactttataactcttgggattgatgtttatacccttcagctatttccagttaatttttaatgccataatcattatgtattatgattatcattaccataccaactctgctgtctctggtttttacaagagtaacacatttaaatttacagaggtaagaatttccttggagaaataggtgctggtgataataggagtatctttcttttccatatcaacataattataataaataactcacagatttaaaggcttattttgtgccaggcattctgctgagtgctttacatacatgtctcatgtaatcctcccaacagctctgcaggacaggagtttatgattatcttgattttatagaatagtaatgtaatgctcagagaggttaaacatctggttagtcacacagctaatcaatacttagtttaagatttgagactgggtgcagtggctcacgcctgtaatcccagcactttgggaggctgaggcgggcggatcacgaggtcaggagatcgagaccatcctggtgaacacggtgaaacctggtctctactaaaaatacaaaaaaattagccgggcacggtggcgggtgcctgtagtcccagcaactcgggaggctgagacaggagaatggcatgaacccgggaggcagagcttgcagtgagccgagatagcaccactgcactccggcctgggcgaaagagcaagactccgtctcaaaaaaagaaaaaaaaaaaaaaaaaaaaagatttgaatccaggtttgtctcaatttggagcctatgtacttaatcagtatattgttttgccctcaccaaactcacctctagttgtttattcacttattgaaaaccatattcttctcctgtctttgtgcttctcaaactttaatctgcatgtgaattaccttgggatcctgttaaaatgcagattatgatttagtagactggggagggtcctcagattctgcatttctatcaagtttccagattatgctgatactgtaggtctatgaatcacttacttggagtagcaaggttattatagagctttatggctggaaattgtaaatgctactattaaatgcttagattaaagtagaatttgcacaaggtgaaattgagtcaaacttatttatttgatttgttttttagaaattaaattgtaaggaaataattgaaaatttggcaaaaattcttaagagacatccaggtttaagaaacattttgcctataactactgccaaagtgcctatagtaaaatttgaacacaggcgaagtgggttagaaggcgatatcagtttatataatacgttggctcaacataacacaagaatgctagctacttatgcagctattgatcctagagtgcagtatttgggatatactatgaaagtgtttgctaagcgatgtgacattggggatgcttccaggggaagtttatcttcatatgcatatatccttatggtgctgtactttctgcagcagagaaagccacctgttatcccagttctacaagagatctttgatggaaaacagattccacagagaatggttgatggatggaatgctttcttctttgataaaacagaagaactgaaaaagcgtttaccttcacttggaaagaacacagaatcattaggggagctttggctgggactgcttcgtttctatactgaagagtttgatttcaaggaatatgtaattagcattcggcagaaaaagctgttgacaacttttgagaagcagtggacttccaagtgcattgcaattgaagacccttttgacttgaatcataaccttggtgctggagtttccagaaaaatgaccaatttcatcatgaaagcatttatcaatggaaggaaactttttggtacccctttttatccactcattggcagagaagctgagtacttctttgattccagagtattaacagatggagaactggctcccaatgatagatgttgccgtgtgtgtggaaaaataggccactacatgaaagactgccctaaaaggaaaagcagtttactgtttagactaaagaagaaagacagtgaagaagagaaggaagggaatgaagaagagaaagattcccgagatgttcttgacccccgagacctccacgatactcgagactttagagacccgagagacctcagatgttttatatgtggagatgctggacatgtacgaagggagtgcccagaggtcaagctggcccgtcagaggaatagcagtgtggcagcagcccagctggtccgcaaccttgtaaatgctcaacaggtggctggttcagctcagcaacagggtgatcagtccataaggactagacagtcatcagaatgttctgaatcaccatcttattctcctcagcctcagccatttccacagaactcttcccagtcagctgctattactcagccttcatctcagccaggatcccaacctaagcttggcccacctcagcagggagcccaacctccccatcaggtccagatgccactgtataactttccccagtcaccaccagctcagtattctcccatgcacaatatgggattgttgccaatgcaccctctccagatccctgccccgtcctggcccatccatggcccagtgatccactctgcaccaggcagtgcccccagcaatattggcctaaatgatcccagcatcatctttgcacagcctgctgccagacctgtggcaatccctaacacgtctcacgatggacactggccccgtactgtggctccaaattccctggtaaacagtggtgcagtggggaattcagagccaggctttcgaggactgactcctccaattccttgggaacatgcaccgcgtccccatttcccccttgtcccagcttcgtggccttatggtttgcatcaaaacttcatgcatcagggaaatgcccgattccagcccaacaaacctttctatactcaagacagatgtgccacccgtcggtgtagagagcgttgtccccacccaccaagaggaaacgtgtcggagtaatgcgagtccattttctttcagctggtctaccgatgcacagcaaccagccaatcctgctgtctcaagggtatccgtacctcaatgtcagttacattcagcagaaaaagtgacatttaatggaaagcaaaacaaatcaggtcctgatttaaaattttaacacgtttagatagcttatttaaattctaagactgtttttacagactgtattatttgtatataaatatgaactatagtttttactagtatcaccaaattgagtgatacaaatttcatctattttattaccctatttttaagggaattttatgttttgtttaaccttgatgaattgtataaagagagaatttaaaaaattacattctttattttctattagctgtattcatactttggttgcttcagactttatatattgttcttaaaagttaggaaagaatttcatgtgttttaaattgtcacttctattctttacagaaccttgtagtgccaaaaactttttaaaaggtaaaaaaataaaataaaattacaacatgaagattcagattttttttcttttccatacttgtatattgaacattcaaacttgaatggaaagttgattttgtctgtatttgaagtacttctattttaagttaataaatctttttgacaaga

SEQ ID NO: 333401 - DNA, 7603 bp, Homo sapiens
tcccccccacaatgcagttcgcggcgcggcggacatggcggtggagtcctgagctagtcgtgtcccggcctccagcggcggcagcggcgacggcggcggcagcaggaggcggagggagagcaggagccactgagatgaggaggcgtcgcgcgcgcctgtagctcgcgggcctcgcagtttgcttgcctaaactggacttgaagcaatttaaactactggagatctgccattttataatatcacaattggaaagaaacagattttcaaataatggaagagtctaaaaccttaaaaagtgaaaatcatgaaccaaagaagaatgttatttgtgaagaaagcaaagcagttcaagttataggtaatcaaacattgaaagctagaaatgataaatccgtaaaagaaattgagaacagctctccaaataggaatagtagtaaaaaaataagcaaaatgatatttgtatagaaaaaacagaagttaaatcatgtaaagtaaatgctgccaaccttccaggtcctaaagatttggggttagtccttcgagatcaaagtcattgcaaagcaaaaaaatttcctaattcaccggtgaaagccgaaaaggcaaccatttcacaggcaaaatcagaaaaggcaaccagtttacaggcaaaagcagaaaaatcaccaaagtcacctaattcagtgaaagcagaaaaagcatccagttatcagatgaagtcagaaaaagtaccaagttcaccagcagaagcagaaaagggacccagtttactgttgaaagacatgagacagaagacagaattacaacagattggaaaaaaaattccaagctcctttacttctgtggacaaagtgaatattgaagctgtagggggagaaaaatgtgctctgcaaaactcaccacgatctcagaagcaacagacatgtacagataatactggtgattctgatgatagtgcttcaggaattgaagacgtatcggacgatttaagtaaaatgaagaatgatgaatctaataaagaaaattcttcagagatggactacttagaaaatgccactgtgatagatgaatctgcattgacacctgagcagaggctggggttgaaacaagcagaagaacgcttagaaagagatcacatctttcgacttgaaaaacgatcaccagaatataccaattgtcggtatctatgcaaactttgcttaattcacattgaaaatatccagggggctcataaacatataaaggagaaacgacataagaaaaatattttgaatgttcacttaggttgtatggctcatctctgactagatttgctctgaaaagtagtgatgttaatatagatataaaatttcctcccaagatgaatcatccagatcttctgataaaagtacttgggattttaaagaaaaatgtattatatgtagatgtggaatctgattttcacgctaaagttcctgttgtggtgtgcagagatcgaaaaagtggtttactttgtagagtgagtgcaggaaacgatatggcatgtctcactactgatttacttactgcccttggcaaaatagaacctgtctttattcccttggtgttagcctttcgctactgggctaagttgtgctatattgactcccaaactgatggtggaatcccttcttactgttttgctttaatggtgatgttttttctacaacagagaaaaccccctcttcttccttgcttacttggaagttggattgaaggctttgacccaaaaagaatggatgactttcagctgaagggcatagtagaagagaagtttgtgaagtgggaatgtaattcaagtagtgcaactgagaaaaactcaattgctgaggaaaacaaagctaaggcagaccaaccaaaagatgataccaagaagacagaaacagacaaccaaagtaatgccatgaaggaaaaacatggcaaatctcctttagcattggaaacaccaaatcgggtatccttgggacagttatggttagagctgcttaaattctacacactggattttgctttggaggaatatgtcatatgtgtacggatacaagatattttaacaagagaaaataaaaactggcctaaaaggcgaatagccattgaagatccattttcagtcaagaggaatgttgcacggagcttaaacagccagctggtttacgaatatgttgtggagagatttagggcagcttatcggtattttgcctgtcctcagacgaagggtggaaataagtctacagtggatttcaagaaaagagagaaggggaaaataagcaataagaaaccagtcaagtcgaacaatatggcaaccaatggttgtattctgcttggggaaaccacagaaaaaataaatgcagaaagagagcaacctgttcaatgtgatgaaatggactgtacatcacagagatgtattattgacaacaacaatttgttggtaaatgaactagattttgctgaccacggacaggactcttcatctctttctaccagcaaaagcagtgaaatagagccaaaattagataagaaacaagatgatttagcgccttcagaaacttgtttaaaaaaagagctcagccaatgtaattgcattgatttgtctaagtcgcctgacccagataaatctactggaacagactgcaggtcaaatttagaaacagagagttcacatcagagtgtgtgcaccgacacatctgctacctcttgcaactgcaaagctacagaagatgcttctgaccttaatgatgatgataacctccccacccaggaattatattatgtgtttgataagtttattttaacctctggcaagccaccaacgatagtatgcagcatctgcaaaaaggatggccattcaaagaatgattgcccagaggattttaggaaaattgatttaaaacctctaccaccaatgacaaaccgatttcgggaaatacttgatttagtatgtaaaagatgttttgatgagttatcaccaccttgttctgaacaacacaacagggagcaaattttaattggcttggaaaagtttattcaaaaagaatatgatgaaaaggcaaggttgtgcttatttggctcttctaagaatggatttggatttcgtgatagtgatctggatatttgtatgaccctggaaggccatgaaaatgcagaggccttaatagtgggaaggagattgtccaagctccagggaagaaaaagactgattggacagggaagaagtgtcccaggccttctcaacagcaactagcaaaggagggtatccttgtagatgttcagtcctttaccagcctagctattgttatttatgtttcaaaatgcgggactgtttgcaagattggggtgaggcccagcttctggcatctgtagtggtgtcagtatcgcctctgttacattataaaagaattcagcagaatagtgtgcttttctaaaatcattcttttgaacggtggttttgaaattgttagacccggagtaaagatggcagtgatgacttaacttctggccataagaagttgcttctggtgtcttaacatcttgttttataaagaaactgaaaagttgcaagtattttatttgttctcctttacttaaattctgcttagagccacctacttggaaagtggctgcccttctccattctgaagagtaagaattgagggaataggaaatgatttttatacccaggaaagaggttagagttttagatatcttctatgtaaaatttattaaacttctaatcactaagggtttgtatattatatataatctgtgccattcctactgggaagttgaaacaatgaaaataataaatcattttctttcagatgagccataattgaaacttttaagattagcataattgtatcgttgaataataaagagaaaaattacctcctttgttaattttatcatatgtgaattagtaactaatggtttctttgaaatcctttggtttagctgcaatggctcctgctctcatgtagctaaaaagaacatgttggaaaaatgcaaatgactttataactcttgggattgatgtttatacccttcagctatttccagttaatttttaatgccataatcattatgtattatgattatcattaccataccaactctgctgtctctggtttttacaagagtaacacatttaaatttacagaggtaagaatttccttggagaaataggtgctggtgataataggagtatctttcttttccatatcaacataattataataaataactcacagatttaaaggcttattttgtgccaggcattctgctgagtgctttacatacatgtctcatgtaatcctcccaacagctctgcaggacaggagtttatgattatcttgattttatagaatagtaatgtaatgctcagagaggttaaacatctggttagtcacacagctaatcaatacttagtttaagatttgagactgggtgcagtggctcacgcctgtaatcccagcactttgggaggctgaggcgggcggatcacgaggtcaggagatcgagaccatcctggtgaacacggtgaaacctggtctctactaaaaatacaaaaaaattagccgggcacggtggcgggtgcctgtagtcccagcaactcgggaggctgagacaggagaatggcatgaacccgggaggcagagcttgcagtgagccgagatagcaccactgcactccggcctgggcgaaagagcaagactccgtctcaaaaaaagaaaaaaaaaaaaaaaaaaaaagatttgaatccaggtttgtctcaatttggagcctatgtacttaatcagtatattgttttgccctcaccaaactcacctctagttgtttattcacttattgaaaaccatattcttctcctgtctttgtgcttctcaaactttaatctgcatgtgaattaccttgggatcctgttaaaatgcagattatgatttagtagactggggagggtcctcagattctgcatttctatcaagtttccagattatgctgatactgtaggtctatgaatcacttacttggagtagcaaggttattatagagctttatggctggaaattgtaaatgctactattaaatgcttagattaaagtagaatttgcacaaggtgaaattgagtcaaacttatttatttgatttgttttttagaaattaaattgtaaggaaataattgaaaatttggcaaaaattcttaagagacatccaggtttaagaaacattttgcctataactactgccaaagtgcctatagtaaaatttgaacacaggcgaagtgggttagaaggcgatatcagtttatataatacgttggctcaacataacacaagaatgctagctacttatgcagctattgatcctagagtgcagtatttgggatatactatgaaagtgtttgctaagcgatgtgacattggggatgcttccaggggaagtttatcttcatatgcatatatccttatggtgctgtactttctgcagcagagaaagccacctgttatcccagttctacaagagatctttgatggaaaacagattccacagagaatggttgatggatggaatgctttcttctttgataaaacagaagaactgaaaaagcgtttaccttcacttggaaagaacacagaatcattaggggagctttggctgggactgcttcgtttctatactgaagagtttgatttcaaggaatatgtaattagcattcggcagaaaaagctgttgacaacttttgagaagcagtggacttccaagtgcattgcaattgaagacccttttgacttgaatcataaccttggtgctggagtttccagaaaaatgaccaatttcatcatgaaagcatttatcaatggaaggaaactttttggtacccctttttatccactcattggcagagaagctgagtacttctttgattccagagtattaacagatggagaactggctcccaatgatagatgttgccgtgtgtgtggaaaaataggccactacatgaaagactgccctaaaaggaaaagcagtttactgtttagactaaagaagaaagacagtgaagaagagaaggaagggaatgaagaagagaaagattcccgagatgttcttgacccccgagacctccacgatactcgagactttagagacccgagagacctcagatgttttatatgtggagatgctggacatgtacgaagggagtgcccagaggtcaagctggcccgtcagaggaatagcagtgtggcagcagcccagctggtccgcaaccttgtaaatgctcaacaggtggctggttcagctcagcaacagggtgatcagtccataaggactagacagtcatcagaatgttctgaatcaccatcttattctcctcagcctcagccatttccacagaactcttcccagtcagctgctattactcagccttcatctcagccaggatcccaacctaagcttggcccacctcagcagggagcccaacctccccatcaggtccagatgccactgtataactttccccagtcaccaccagctcagtattctcccatgcacaatatgggattgttgccaatgcaccctctccagatccctgccccgtcctggcccatccatggcccagtgatccactctgcaccaggcagtgcccccagcaatattggcctaaatgatcccagcatcatctttgcacagcctgctgccagacctgtggcaatccctaacacgtctcacgatggacactggccccgtactgtggctccaaattccctggtaaacagtggtgcagtggggaattcagagccaggctttcgaggactgactcctccaattccttgggaacatgcaccgcgtccccatttcccccttgtcccagcttcgtggccttatggtttgcatcaaaacttcatgcatcagggaaatgcccgattccagcccaacaaacctttctatactcaagctggtctaccgatgcacagcaaccagccaatcctgctgtctcaagggtatccgtacctcaatgtcagttacattcagcagaaaaagtgacatttaatggaaagcaaaacaaatcaggtcctgatttaaaattttaacacgtttagatagcttatttaaattctaagactgtttttacagactgtattatttgtatataaatatgaactatagtttttactagtatcaccaaattgagtgatacaaatttcatctattttattaccctatttttaagggaattttatgttttgtttaaccttgatgaattgtataaagagagaatttaaaaaattacattctttattttctattagctgtattcatactttggttgcttcagactttatatattgttcttaaaagttaggaaagaatttcatgtgttttaaattgtcacttctattctttacagaaccttgtagtgccaaaaactttttaaaaggtaaaaaaataaaataaaattacaacatgaagattcagattttttttcttttccatacttgtatattgaacattcaaacttgaatggaaagttgattttgtctgtatttgaagtacttctattttaagttaataaatctttttgacaaga

SEQ ID NO: 333402 - DNA, 7483 bp, Homo sapiens
tcccccccacaatgcagttcgcggcgcggcggacatggcggtggagtcctgagctagtcgtgtcccggcctccagcggcggcagcggcgacggcggcggcagcaggaggcggagggagagcaggagccactgagatgaggaggcgtcgcgcgcgcctgtagctcgcgggcctcgcagtttgcttgcctaaactggacttgaagcaatttaaactactggagatctgccattttataatatcacaattggaaagaaacagattttcaaataatggaagagtctaaaaccttaaaaagtgaaaatcatgaaccaaagaagaatgttatttgtgaagaaagcaaagcagttcaagttataggtaatcaaacattgaaagctagaaatgataaatccgtaaaagaaattgagaacagctctccaaataggaatagtagtaaaaaaataagcaaaatgatatttgtatagaaaaaacagaagttaaatcatgtaaagtaaatgctgccaaccttccaggtcctaaagatttggggttagtccttcgagatcaaagtcattgcaaagcaaaaaaatttcctaattcaccggtgaaagccgaaaaggcaaccatttcacaggcaaaatcagaaaaggcaaccagtttacaggcaaaagcagaaaaatcaccaaagtcacctaattcagtgaaagcagaaaaagcatccagttatcagatgaagtcagaaaaagtaccaagttcaccagcagaagcagaaaagggacccagtttactgttgaaagacatgagacagaagacagaattacaacagattggaaaaaaaattccaagctcctttacttctgtggacaaagtgaatattgaagctgtagggggagaaaaatgtgctctgcaaaactcaccacgatctcagaagcaacagacatgtacagataatactggtgattctgatgatagtgcttcaggaattgaagacgtatcggacgatttaagtaaaatgaagaatgatgaatctaataaagaaaattcttcagagatggactacttagaaaatgccactgtgatagatgaatctgcattgacacctgagcagaggctggggttgaaacaagcagaagaacgcttagaaagagatcacatctttcgacttgaaaaacgatcaccagaatataccaattgtcggtatctatgcaaactttgcttaattcacattgaaaatatccagggggctcataaacatataaaggagaaacgacataagaaaaatattttgaatgttcacttaggttgtatggctcatctctgactagatttgctctgaaaagtagtgatgttaatatagatataaaatttcctcccaagatgaatcatccagatcttctgataaaagtacttgggattttaaagaaaaatgtattatatgtagatgtggaatctgattttcacgctaaagttcctgttgtggtgtgcagagatcgaaaaagtggtttactttgtagagtgagtgcaggaaacgatatggcatgtctcactactgatttacttactgcccttggcaaaatagaacctgtctttattcccttggtgttagcctttcgctactgggctaagttgtgctatattgactcccaaactgatggtggaatcccttcttactgttttgctttaatggtgatgttttttctacaacagagaaaaccccctcttcttccttgcttacttggaagttggattgaaggctttgacccaaaaagaatggatgactttcagctgaagggcatagtagaagagaagtttgtgaagtgggaatgtaattcaagtagtgcaactgagaaaaactcaattgctgaggaaaacaaagctaaggcagaccaaccaaaagatgataccaagaagacagaaacagacaaccaaagtaatgccatgaaggaaaaacatggcaaatctcctttagcattggaaacaccaaatcgggtatccttgggacagttatggttagagctgcttaaattctacacactggattttgctttggaggaatatgtcatatgtgtacggatacaagatattttaacaagagaaaataaaaactggcctaaaaggcgaatagccattgaagatccattttcagtcaagaggaatgttgcacggagcttaaacagccagctggtttacgaatatgttgtggagagatttagggcagcttatcggtattttgcctgtcctcagacgaagggtggaaataagtctacagtggatttcaagaaaagagagaaggggaaaataagcaataagaaaccagtcaagtcgaacaatatggcaaccaatggttgtattctgcttggggaaaccacagaaaaaataaatgcagaaagagagcaacctgttcaatgtgatgaaatggactgtacatcacagagatgtattattgacaacaacaatttgttggtaaatgaactagattttgctgaccacggacaggactcttcatctctttctaccagcaaaagcagtgaaatagagccaaaattagataagaaacaagatgatttagcgccttcagaaacttgtttaaaaaaagagctcagccaatgtaattgcattgatttgtctaagtcgcctgacccagataaatctactggaacagactgcaggtcaaatttagaaacagagagttcacatcagagtgtgtgcaccgacacatctgctacctcttgcaactgcaaagctacagaagatgcttctgaccttaatgatgatgataacctccccacccaggaattatattatgtgtttgataagtttattttaacctctggcaagccaccaacgatagtatgcagcatctgcaaaaaggatggccattcaaagaatgattgcccagaggattttaggaaaattgatttaaaacctctaccaccaatgacaaaccgatttcgggaaatacttgatttagtatgtaaaagatgttttgatgagttatcaccaccttgttctgaacaacacaacagggagcaaattttaattggcttggaaaagtttattcaaaaagaatatgatgaaaaggcaaggttgtgcttatttggctcttctaagaatggatttggatttcgtgatagtgatctggatatttgtatgaccctggaaggccatgaaaatgcagaggccttaatagtgggaaggagattgtccaagctccagggaagaaaaagactgattggacagggaagaagtgtcccaggccttctcaacagcaactagcaaaggagggtatccttgtagatgttcagtcctttaccagcctagctattgttatttatgtttcaaaatgcgggactgtttgcaagattggggtgaggcccagcttctggcatctgtagtggtgtcagtatcgcctctgttacattataaaagaattcagcagaatagtgtgcttttctaaaatcattcttttgaacggtggttttgaaattgttagacccggagtaaagatggcagtgatgacttaacttctggccataagaagttgcttctggtgtcttaacatcttgttttataaagaaactgaaaagttgcaagtattttatttgttctcctttacttaaattctgcttagagccacctacttggaaagtggctgcccttctccattctgaagagtaagaattgagggaataggaaatgatttttatacccaggaaagaggttagagttttagatatcttctatgtaaaatttattaaacttctaatcactaagggtttgtatattatatataatctgtgccattcctactgggaagttgaaacaatgaaaataataaatcattttctttcagatgagccataattgaaacttttaagattagcataattgtatcgttgaataataaagagaaaaattacctcctttgttaattttatcatatgtgaattagtaactaatggtttctttgaaatcctttggtttagctgcaatggctcctgctctcatgtagctaaaaagaacatgttggaaaaatgcaaatgactttataactcttgggattgatgtttatacccttcagctatttccagttaatttttaatgccataatcattatgtattatgattatcattaccataccaactctgctgtctctggtttttacaagagtaacacatttaaatttacagaggtaagaatttccttggagaaataggtgctggtgataataggagtatctttcttttccatatcaacataattataataaataactcacagatttaaaggcttattttgtgccaggcattctgctgagtgctttacatacatgtctcatgtaatcctcccaacagctctgcaggacaggagtttatgattatcttgattttatagaatagtaatgtaatgctcagagaggttaaacatctggttagtcacacagctaatcaatacttagtttaagatttgagactgggtgcagtggctcacgcctgtaatcccagcactttgggaggctgaggcgggcggatcacgaggtcaggagatcgagaccatcctggtgaacacggtgaaacctggtctctactaaaaatacaaaaaaattagccgggcacggtggcgggtgcctgtagtcccagcaactcgggaggctgagacaggagaatggcatgaacccgggaggcagagcttgcagtgagccgagatagcaccactgcactccggcctgggcgaaagagcaagactccgtctcaaaaaaagaaaaaaaaaaaaaaaaaaaaagatttgaatccaggtttgtctcaatttggagcctatgtacttaatcagtatattgttttgccctcaccaaactcacctctagttgtttattcacttattgaaaaccatattcttctcctgtctttgtgcttctcaaactttaatctgcatgtgaattaccttgggatcctgttaaaatgcagattatgatttagtagactggggagggtcctcagattctgcatttctatcaagtttccagattatgctgatactgtaggtctatgaatcacttacttggagtagcaaggttattatagagctttatggctggaaattgtaaatgctactattaaatgcttagattaaagtagaatttgcacaaggtgaaattgagtcaaacttatttatttgatttgttttttagaaattaaattgtaaggaaataattgaaaatttggcaaaaattcttaagagacatccaggtttaagaaacattttgcctataactactgccaaagtgcctatagtaaaatttgaacacaggcgaagtgggttagaaggcgatatcagtttatataatacgttggctcaacataacacaagaatgctagctacttatgcagctattgatcctagagtgcagtatttgggatatactatgaaagtgtttgctaagcgatgtgacattggggatgcttccaggggaagtttatcttcatatgcatatatccttatggtgctgtactttctgcagcagagaaagccacctgttatcccagttctacaagagatctttgatggaaaacagattccacagagaatggttgatggatggaatgctttcttctttgataaaacagaagaactgaaaaagcgtttaccttcacttggaaagaacacagaatcattaggggagctttggctgggactgcttcgtttctatactgaagagtttgatttcaaggaatatgtaattagcattcggcagaaaaagctgttgacaacttttgagaagcagtggacttccaagtgcattgcaattgaagacccttttgacttgaatcataaccttggtgctggagtttccagaaaaatgaccaatttcatcatgaaagcatttatcaatggaaggaaactttttggtacccctttttatccactcattggcagagaagctgagtacttctttgattccagagtattaacagatggagaactggctcccaatgatagatgttgccgtgtgtgtggaaaaataggccactacatgaaagactgccctaaaaggaaaagcagtttactgtttagactaaagaagaaagacagtgaagaagagaaggaagggaatgaagaagagaaagattcccgagatgttcttgacccccgagacctccacgatactcgagactttagagacccgagagacctcagatgttttatatgtggagatgctggacatgtacgaagggagtgcccagaggtcaagctggcccgtcagaggaatagcagtgtggcagcagcccagctggtccgcaaccttgtaaatgctcaacaggtggctggttcagctcagcaacagggtgatcagtccataaggactagacagtcatcagaatgttctgaatcaccatcttattctcctcagcctcagccatttccacagaactcttcccagtcagctgctattactcagccttcatctcagccaggatcccaacctaagcttggcccacctcagcagggagcccaacctccccatcaggtccagatgccactgtataactttccccagtcaccaccagctcagtattctcccatgcacaatatgggattgttgccaatgcaccctctccagatccctgccccgtcctggcccatccatggcccagtgatccactctgcaccaggcagtgcccccagcaatattggcctaaatgatcccagcatcatctttgcacagcctgctgccagacctgtggcaatccctaacacgtctcacgatggacactggccccgtactgtggctccaaattccctggtaaacagtggtgcagtggggaattcagagccaggctttcgaggactgactcctccaattccttgggaacatgcaccgcgtccccatttcccccttgtcccagcttcgtggccttatggtttgcatcaaaacttcatgcatcagggaaatgcccgattccagcccaacaaacctttctatactcaagctggtctaccgatgcacagcaaccagccaatcctgctgtctcaagggtatccgtacctcaatgtcagttacattcagcagaaaaagtgacatttaatggaaagcaaaacaaatcaggtcctgatttaaaattttaacacgtttagatagcttatttaaattctaagactgtttttacagactgtattatttgtatataaatatgaactatagtttttactagtatcaccaaattgagtgatacaaatttcatctattttattaccctatttttaagggaattttatgttttgtttaaccttgatgaattgtataaagagagaatttaaaaaattacattctttattttctattagctgtattcatactttggttgcttcagactttatatattgttcttaaaagttaggaaagaatttcatgtgttttaaattgtcacttctattctttacagaaccttgtagtgccaaaaactttttaaaaggtaaaaaaataaaataaaattacaacatga

SEQ ID NO: 333403 - DNA, 7159 bp, Homo sapiens
tcccccccacaatgcagttcgcggcgcggcggacatggcggtggagtcctgagctagtcgtgtcccggcctccagcggcggcagcggcgacggcggcggcagcaggaggcggagggagagcaggagccactgagatgaggaggcgtcgcgcgcgcctgtagctcgcgggcctcgcagtttgcttgcctaaactggacttgaagcaatttaaactactggagatctgccattttataatatcacaattggaaagaaacagattttcaaataatggaagagtctaaaaccttaaaaagtgaaaatcatgaaccaaagaagaatgttatttgtgaagaaagcaaagcagttcaagttataggtaatcaaacattgaaagctagaaatgataaatccgtaaaagaaattgagaacagctctccaaataggaatagtagtaaaaaaataagcaaaatgatatttgtatagaaaaaacagaagttaaatcatgtaaagtaaatgctgccaaccttccaggtcctaaagatttggggttagtccttcgagatcaaagtcattgcaaagcaaaaaaatttcctaattcaccggtgaaagccgaaaaggcaaccatttcacaggcaaaatcagaaaaggcaaccagtttacaggcaaaagcagaaaaatcaccaaagtcacctaattcagtgaaagcagaaaaagcatccagttatcagatgaagtcagaaaaagtaccaagttcaccagcagaagcagaaaagggacccagtttactgttgaaagacatgagacagaagacagaattacaacagattggaaaaaaaattccaagctcctttacttctgtggacaaagtgaatattgaagctgtagggggagaaaaatgtgctctgcaaaactcaccacgatctcagaagcaacagacatgtacagataatactggtgattctgatgatagtgcttcaggaattgaagacgtatcggacgatttaagtaaaatgaagaatgatgaatctaataaagaaaattcttcagagatggactacttagaaaatgccactgtgatagatgaatctgcattgacacctgagcagaggctggggttgaaacaagcagaagaacgcttagaaagagatcacatctttcgacttgaaaaacgatcaccagaatataccaattgtcggtatctatgcaaactttgcttaattcacattgaaaatatccagggggctcataaacatataaaggagaaacgacataagaaaaatattttgaatgttcacttaggttgtatggctcatctctgactagatttgctctgaaaagtagtgatgttaatatagatataaaatttcctcccaagatgaatcatccagatcttctgataaaagtacttgggattttaaagaaaaatgtattatatgtagatgtggaatctgattttcacgctaaagttcctgttgtggtgtgcagagatcgaaaaagtggtttactttgtagagtgagtgcaggaaacgatatggcatgtctcactactgatttacttactgcccttggcaaaatagaacctgtctttattcccttggtgttagcctttcgctactgggctaagttgtgctatattgactcccaaactgatggtggaatcccttcttactgttttgctttaatggtgatgttttttctacaacagagaaaaccccctcttcttccttgcttacttggaagttggattgaaggctttgacccaaaaagaatggatgactttcagctgaagggcatagtagaagagaagtttgtgaagtgggaatgtaattcaagtagtgcaactgagaaaaactcaattgctgaggaaaacaaagctaaggcagaccaaccaaaagatgataccaagaagacagaaacagacaaccaaagtaatgccatgaaggaaaaacatggcaaatctcctttagcattggaaacaccaaatcgggtatccttgggacagttatggttagagctgcttaaattctacacactggattttgctttggaggaatatgtcatatgtgtacggatacaagatattttaacaagagaaaataaaaactggcctaaaaggcgaatagccattgaagatccattttcagtcaagaggaatgttgcacggagcttaaacagccagctggtttacgaatatgttgtggagagatttagggcagcttatcggtattttgcctgtcctcagacgaagggtggaaataagtctacagtggatttcaagaaaagagagaaggggaaaataagcaataagaaaccagtcaagtcgaacaatatggcaaccaatggttgtattctgcttggggaaaccacagaaaaaataaatgcagaaagagagcaacctgttcaatgtgatgaaatggactgtacatcacagagatgtattattgacaacaacaatttgttggtaaatgaactagattttgctgaccacggacaggactcttcatctctttctaccagcaaaagcagtgaaatagagccaaaattagataagaaacaagatgatttagcgccttcagaaacttgtttaaaaaaagagctcagccaatgtaattgcattgatttgtctaagtcgcctgacccagataaatctactggaacagactgcaggtcaaatttagaaacagagagttcacatcagagtgtgtgcaccgacacatctgctacctcttgcaactgcaaagctacagaagatgcttctgaccttaatgatgatgataacctccccacccaggaattatattatgtgtttgataagtttattttaacctctggcaagccaccaacgatagtatgcagcatctgcaaaaaggatggccattcaaagaatgattgcccagaggattttaggaaaattgatttaaaacctctaccaccaatgacaaaccgatttcgggaaatacttgatttagtatgtaaaagatgttttgatgagttatcaccaccttgttctgaacaacacaacagggagcaaattttaattggcttggaaaagtttattcaaaaagaatatgatgaaaaggcaaggttgtgcttatttggctcttctaagaatggatttggatttcgtgatagtgatctggatatttgtatgaccctggaaggccatgaaaatgcagaggccttaatagtgggaaggagattgtccaagctccagggaagaaaaagactgattggacagggaagaagtgtcccaggccttctcaacagcaactagcaaaggagggtatccttgtagatgttcagtcctttaccagcctagctattgttatttatgtttcaaaatgcgggactgtttgcaagattggggtgaggcccagcttctggcatctgtagtggtgtcagtatcgcctctgttacattataaaagaattcagcagaatagtgtgcttttctaaaatcattcttttgaacggtggttttgaaattgttagacccggagtaaagatggcagtgatgacttaacttctggccataagaagttgcttctggtgtcttaacatcttgttttataaagaaactgaaaagttgcaagtattttatttgttctcctttacttaaattctgcttagagccacctacttggaaagtggctgcccttctccattctgaagagtaagaattgagggaataggaaatgatttttatacccaggaaagaggttagagttttagatatcttctatgtaaaatttattaaacttctaatcactaagggtttgtatattatatataatctgtgccattcctactgggaagttgaaacaatgaaaataataaatcattttctttcagatgagccataattgaaacttttaagattagcataattgtatcgttgaataataaagagaaaaattacctcctttgttaattttatcatatgtgaattagtaactaatggtttctttgaaatcctttggtttagctgcaatggctcctgctctcatgtagctaaaaagaacatgttggaaaaatgcaaatgactttataactcttgggattgatgtttatacccttcagctatttccagttaatttttaatgccataatcattatgtattatgattatcattaccataccaactctgctgtctctggtttttacaagagtaacacatttaaatttacagaggtaagaatttccttggagaaataggtgctggtgataataggagtatctttcttttccatatcaacataattataataaataactcacagatttaaaggcttattttgtgccaggcattctgctgagtgctttacatacatgtctcatgtaatcctcccaacagctctgcaggacaggagtttatgattatcttgattttatagaatagtaatgtaatgctcagagaggttaaacatctggttagtcacacagctaatcaatacttagtttaagatttgagactgggtgcagtggctcacgcctgtaatcccagcactttgggaggctgaggcgggcggatcacgaggtcaggagatcgagaccatcctggtgaacacggtgaaacctggtctctactaaaaatacaaaaaaattagccgggcacggtggcgggtgcctgtagtcccagcaactcgggaggctgagacaggagaatggcatgaacccgggaggcagagcttgcagtgagccgagatagcaccactgcactccggcctgggcgaaagagcaagactccgtctcaaaaaaagaaaaaaaaaaaaaaaaaaaaagatttgaatccaggtttgtctcaatttggagcctatgtacttaatcagtatattgttttgccctcaccaaactcacctctagttgtttattcacttattgaaaaccatattcttctcctgtctttgtgcttctcaaactttaatctgcatgtgaattaccttgggatcctgttaaaatgcagattatgatttagtagactggggagggtcctcagattctgcatttctatcaagtttccagattatgctgatactgtaggtctatgaatcacttacttggagtagcaaggttattatagagctttatggctggaaattgtaaatgctactattaaatgcttagattaaagtagaatttgcacaaggtgaaattgagtcaaacttatttatttgatttgttttttagaaattaaattgtaaggaaataattgaaaatttggcaaaaattcttaagagacatccaggtttaagaaacattttgcctataactactgccaaagtgcctatagtaaaatttgaacacaggcgaagtgggttagaaggcgatatcagtttatataatacgttggctcaacataacacaagaatgctagctacttatgcagctattgatcctagagtgcagtatttgggatatactatgaaagtgtttgctaagcgatgtgacattggggatgcttccaggggaagtttatcttcatatgcatatatccttatggtgctgtactttctgcagcagagaaagccacctgttatcccagttctacaagagatctttgatggaaaacagattccacagagaatggttgatggatggaatgctttcttctttgataaaacagaagaactgaaaaagcgtttaccttcacttggaaagaacacagaatcattaggggagctttggctgggactgcttcgtttctatactgaagagtttgatttcaaggaatatgtaattagcattcggcagaaaaagctgttgacaacttttgagaagcagtggacttccaagtgcattgcaattgaagacccttttgacttgaatcataaccttggtgctggagtttccagaaaaatgaccaatttcatcatgaaagcatttatcaatggaaggaaactttttggtacccctttttatccactcattggcagagaagctgagtacttctttgattccagagtattaacagatggagaactggctcccaatgatagatgttgccgtgtgtgtggaaaaataggccactacatgaaagactgccctaaaaggaaaagcagtttactgtttagactaaagaagaaagacagtgaagaagagaaggaagggaatgaagaagagaaagattcccgagatgttcttgacccccgagacctccacgatactcgagactttagagacccgagagacctcagatgttttatatgtggagatgctggacatgtacgaagggagtgcccagaggtcaagctggcccgtcagaggaatagcagtgtggcagcagcccagctggtccgcaaccttgtaaatgctcaacaggtggctggttcagctcagcaacagggtgatcagtccataaggactagacagtcatcagaatgttctgaatcaccatcttattctcctcagcctcagccatttccacagaactcttcccagtcagctgctattactcagccttcatctcagccaggatcccaacctaagcttggcccacctcagcagggagcccaacctccccatcaggtccagatgccactgtataactttccccagtcaccaccagctcagtattctcccatgcacaatatgggattgttgccaatgcaccctctccagatccctgccccgtcctggcccatccatggcccagtgatccactctgcaccaggcagtgcccccagcaatattggcctaaatgatcccagcatcatctttgcacagcctgctgccagacctgtggcaatccctaacacgtctcacgatggacactggccccgtactgtggctccaaattccctggtaaacagtggtgcagtggggaattcagagccaggctttcgaggactgactcctccaattccttgggaacatgcaccgcgtccccatttcccccttgtcccagcttcgtggccttatggtttgcatcaaaacttcatgcatcagggaaatgcccgattccagcccaacaaacctttctatactcaaggtaagaaagctgcaattgtggaggtagaatgcagcagaagaaagacagctaaaatatggagacctgagttcaagttcccatgctaccatttatggctgtgggaacatcatacatattgatcaactttcaaatatatcatcagtaaaactagaataaaacctatttacctcacaggattaatctaagaat

SEQ ID NO: 333404 - DNA, 5254 bp, Homo sapiens
tcccccccacaatgcagttcgcggcgcggcggacatggcggtggagtcctgagctagtcgtgtcccggcctccagcggcggcagcggcgacggcggcggcagcaggaggcggagggagagcaggagccactgagatgaggaggcgtcgcgcgcgcctgtagctcgcgggcctcgcagtttgcttgcctaaactggacttgaagcaatttaaactactggagatctgccattttataatatcacaattggaaagaaacagattttcaaataatggaagagtctaaaaccttaaaaagtgaaaatcatgaaccaaagaagaatgttatttgtgaagaaagcaaagcagttcaagttataggtaatcaaacattgaaagctagaaatgataaatccgtaaaagaaattgagaacagctctccaaataggaatagtagtaaaaaaataagcaaaatgatatttgtatagaaaaaacagaagttaaatcatgtaaagtaaatgctgccaaccttccaggtcctaaagatttggggttagtccttcgagatcaaagtcattgcaaagcaaaaaaatttcctaattcaccggtgaaagccgaaaaggcaaccatttcacaggcaaaatcagaaaaggcaaccagtttacaggcaaaagcagaaaaatcaccaaagtcacctaattcagtgaaagcagaaaaagcatccagttatcagatgaagtcagaaaaagtaccaagttcaccagcagaagcagaaaagggacccagtttactgttgaaagacatgagacagaagacagaattacaacagattggaaaaaaaattccaagctcctttacttctgtggacaaagtgaatattgaagctgtagggggagaaaaatgtgctctgcaaaactcaccacgatctcagaagcaacagacatgtacagataatactggtgattctgatgatagtgcttcaggaattgaagacgtatcggacgatttaagtaaaatgaagaatgatgaatctaataaagaaaattcttcagagatggactacttagaaaatgccactgtgatagatgaatctgcattgacacctgagcagaggctggggttgaaacaagcagaagaacgcttagaaagagatcacatctttcgacttgaaaaacgatcaccagaatataccaattgtcggtatctatgcaaactttgcttaattcacattgaaaatatccagggggctcataaacatataaaggagaaacgacataagaaaaatattttgaatgttcacttaggttgtatggctcatctctgactagatttgctctgaaaagtagtgatgttaatatagatataaaatttcctcccaagatgaatcatccagatcttctgataaaagtacttgggattttaaagaaaaatgtattatatgtagatgtggaatctgattttcacgctaaagttcctgttgtggtgtgcagagatcgaaaaagtggtttactttgtagagtgagtgcaggaaacgatatggcatgtctcactactgatttacttactgcccttggcaaaatagaacctgtctttattcccttggtgttagcctttcgctactgggctaagttgtgctatattgactcccaaactgatggtggaatcccttcttactgttttgctttaatggtgatgttttttctacaacagagaaaaccccctcttcttccttgcttacttggaagttggattgaaggctttgacccaaaaagaatggatgactttcagctgaagggcatagtagaagagaagtttgtgaagtgggaatgtaattcaagtagtgcaactgagaaaaactcaattgctgaggaaaacaaagctaaggcagaccaaccaaaagatgataccaagaagacagaaacagacaaccaaagtaatgccatgaaggaaaaacatggcaaatctcctttagcattggaaacaccaaatcgggtatccttgggacagttatggttagagctgcttaaattctacacactggattttgctttggaggaatatgtcatatgtgtacggatacaagatattttaacaagagaaaataaaaactggcctaaaaggcgaatagccattgaagatccattttcagtcaagaggaatgttgcacggagcttaaacagccagctggtttacgaatatgttgtggagagatttagggcagcttatcggtattttgcctgtcctcagacgaagggtggaaataagtctacagtggatttcaagaaaagagagaaggggaaaataagcaataagaaaccagtcaagtcgaacaatatggcaaccaatggttgtattctgcttggggaaaccacagaaaaaataaatgcagaaagagagcaacctgttcaatgtgatgaaatggactgtacatcacagagatgtattattgacaacaacaatttgttggtaaatgaactagattttgctgaccacggacaggactcttcatctctttctaccagcaaaagcagtgaaatagagccaaaattagataagaaacaagatgatttagcgccttcagaaacttgtttaaaaaaagagctcagccaatgtaattgcattgatttgtctaagtcgcctgacccagataaatctactggaacagactgcaggtcaaatttagaaacagagagttcacatcagagtgtgtgcaccgacacatctgctacctcttgcaactgcaaagctacagaagatgcttctgaccttaatgatgatgataacctccccacccaggaattatattatgtgtttgataagtttattttaacctctggcaagccaccaacgatagtatgcagcatctgcaaaaaggatggccattcaaagaatgattgcccagaggattttaggaaaattgatttaaaacctctaccaccaatgacaaaccgatttcgggaaatacttgatttagtatgtaaaagatgttttgatgagttatcaccaccttgttctgaacaacacaacagggagcaaattttaattggcttggaaaagtttattcaaaaagaatatgatgaaaaggcaaggttgtgcttatttggctcttctaagaatggatttggatttcgtgatagtgatctggatatttgtatgaccctggaaggccatgaaaatgcagaggccttaatagtgggaaggagattgtccaagctccagggaagaaaaagactgattggacagggaagaagtgtcccaggccttctcaacagcaactagcaaaggagggtatccttgtagatgttcagtcctttaccagcctagctattgttatttatgtttcaaaatgcgggactgtttgcaagattggggtgaggcccagcttctggcatctgtagtggtgtcagtatcgcctctgttacattataaaagaattcagcagaatagtgtgcttttctaaaatcattcttttgaacggtggttttgaaattgttagacccggagtaaagatggcagtgatgacttaacttctggccataagaagttgcttctggtgtcttaacatcttgttttataaagaaactgaaaagttgcaagtattttatttgttctcctttacttaaattctgcttagagccacctacttggaaagtggctgcccttctccattctgaagagtaagaattgagggaataggaaatgatttttatacccaggaaagaggttagagttttagatatcttctatgtaaaatttattaaacttctaatcactaagggtttgtatattatatataatctgtgccattcctactgggaagttgaaacaatgaaaataataaatcattttctttcagatgagccataattgaaacttttaagattagcataattgtatcgttgaataataaagagaaaaattacctcctttgttaattttatcatatgtgaattagtaactaatggtttctttgaaatcctttggtttagctgcaatggctcctgctctcatgtagctaaaaagaacatgttggaaaaatgcaaatgactttataactcttgggattgatgtttatacccttcagctatttccagttaatttttaatgccataatcattatgtattatgattatcattaccataccaactctgctgtctctggtttttacaagagtaacacatttaaatttacagaggtaagaatttccttggagaaataggtgctggtgataataggagtatctttcttttccatatcaacataattataataaataactcacagatttaaaggcttattttgtgccaggcattctgctgagtgctttacatacatgtctcatgtaatcctcccaacagctctgcaggacaggagtttatgattatcttgattttatagaatagtaatgtaatgctcagagagaaaaaaaaaaaaaaaaaaagccatatgccctgcactttgtcccaccttttacctctgcccttctcactccagtggatgcttttcctctgagacagtacgtagtatcaaataaatagtcctttagctttctgctactagatctataaatctacctgcatctataggtatctcttctttatgaaaaattacttcttacatatgtactctagattattctgtctactttgagtcttcaacctcttcatctgtgaaaagcgttttcagttaaaatacataaaatgtcattgcagatcagcatttatagatgaacagttgctctcagttttaatgatagggaacactaactttgaaccccaattaaatgaactgttatctccctccaaaataattatattcttagtggtaaacttataaaagattatatctaattattagtattagcatatttaacatttcttcaataaaatttttttgtggaaatttgctttctctcattatgtaagtacgtatattacatcttcaattttgtcacagcacctaaaagatttactacttgactctttacagaataagtttgttggcctcaggtgtaggccgccctaactggggcggaaggatagagaaaagtggattcaagagatattcagcaatagaatggatacaacttggtcattaattaaaagtgatgggtgagagagaacaagttcaggatgcttcttaggtttctgtcttaagcatcttgggtgaattaagacctttatgttgtcctggcaaaaactaggatgatgattttaattagctacattgatttatcagtagtaatgaagaattgtatctcttgtctttaaaaaaaa

SEQ ID NO: 333405 - DNA, 2466 bp, Homo sapiens
gtcttgacttcctgggctgaagcttttctttcacctcaacctcccagagtgttgggattatagacggtgcagtttgtttttaactcagtttaacccagttctgtgggttaaaaaaaatgatgtggcagaatgtttaatatacttctgcatggagtaagactctgaagttttgttttcaatcatgttgttttttagcgatgtgacattggggatgcttccaggggaagtttatcttcatatgcatatatccttatggtgctgtactttctgcagcagagaaagccacctgttatcccagttctacaagagatctttgatggaaaacagattccacagagaatggttgatggatggaatgctttcttctttgataaaacagaagaactgaaaaagcgtttaccttcacttggaaagaacacagaatcattaggggagctttggctgggactgcttcgtttctatactgaagagtttgatttcaaggaatatgtaattagcattcggcagaaaaagctgttgacaacttttgagaagcagtggacttccaagtgcattgcaattgaagacccttttgacttgaatcataaccttggtgctggagtttccagaaaaatgaccaatttcatcatgaaagcatttatcaatggaaggaaactttttggtacccctttttatccactcattggcagagaagctgagtacttctttgattccagagtattaacagatggagaactggctcccaatgatagatgttgccgtgtgtgtggaaaaataggccactacatgaaagactgccctaaaaggaaaagcagtttactgtttagactaaagaagaaagacagtgaagaagagaaggaagggaatgaagaagagaaagattcccgagatgttcttgacccccgagacctccacgatactcgagactttagagacccgagagacctcagatgttttatatgtggagatgctggacatgtacgaagggagtgcccagaggtcaagctggcccgtcagaggaatagcagtgtggcagcagcccagctggtccgcaaccttgtaaatgctcaacaggtggctggttcagctcagcaacagggtgatcagtccataaggactagacagtcatcagaatgttctgaatcaccatcttattctcctcagcctcagccatttccacagaactcttcccagtcagctgctattactcagccttcatctcagccaggatcccaacctaagcttggcccacctcagcagggagcccaacctccccatcaggtccagatgccactgtataactttccccagtcaccaccagctcagtattctcccatgcacaatatgggattgttgccaatgcaccctctccagatccctgccccgtcctggcccatccatggcccagtgatccactctgcaccaggcagtgcccccagcaatattggcctaaatgatcccagcatcatctttgcacagcctgctgccagacctgtggcaatccctaacacgtctcacgatggacactggccccgtactgtggctccaaattccctggtaaacagtggtgcagtggggaattcagagccaggctttcgaggactgactcctccaattccttgggaacatgcaccgcgtccccatttcccccttgtcccagcttcgtggccttatggtttgcatcaaaacttcatgcatcagggaaatgcccgattccagcccaacaaacctttctatactcaagacagatgtgccacccgtcggtgtagagagcgttgtccccacccaccaagaggaaacgtgtcggagtaatgcgagtccattttctttcagctggtctaccgatgcacagcaaccagccaatcctgctgtctcaagggtatccgtacctcaatgtcagttacattcagcagaaaaagtgacatttaatggaaagcaaaacaaatcaggtcctgatttaaaattttaacacgtttagatagcttatttaaattctaagactgtttttacagactgtattatttgtatataaatatgaactatagtttttactagtatcaccaaattgagtgatacaaatttcatctattttattaccctatttttaagggaattttatgttttgtttaaccttgatgaattgtataaagagagaatttaaaaaattacattctttattttctattagctgtattcatactttggttgcttcagactttatatattgttcttaaaagttaggaaagaatttcatgtgttttaaattgtcacttctattctttacagaaccttgtagtgccaaaaactttttaaaaggtaaaaaaataaaataaaattacaacatgaagattcagattttttttcttttccatacttgtatattgaacattcaaacttgaatggaaagttgattttgtctgtatttgaagtacttctattttaagttaataaatctttttgacaaga

SEQ ID NO: 333406 - DNA, 2107 bp, Homo sapiens
cacgagggaatgtacatcttctatactccctcaaaatatatctacgaattatagtctcccaggttctgtatactgtagtaggtcaggaagatctctttcttttgtcatcaagtctggcctaaaataaaaacttggaacttttgagacagaacgaacttccagtttccatcactgctatttactattaaatttagtcaagacacttatcttctctaagcctcaatttctttttaaaactggagataataaatatcaacctctaaggattgttaaaggtttaagatttggtattttaaaaaatttaatataatattgttttacaaaactactggaaaaccgagttcctgccaaatgagcaggtgtgccataaatgtttgttcccttgccttcagcatagtttgttctgtgactcacttaatttacaagtccctagccccacattattggtatcagcagtttactgtttagactaaagaagaaagacagtgaagaagagaaggaagggaatgaagaagagaaagattcccgagatgttcttgacccccgagacctccacgatactcgagactttagagacccgagagacctcagatgttttatatgtggagatgctggacatgtacgaagggagtgcccagaggtcaagctggcccgtcagaggaatagcagtgtggcagcagcccagctggtccgcaaccttgtaaatgctcaacaggtggctggttcagctcagcaacagggtgatcagtccataaggactagacagtcatcagaatgttctgaatcaccatcttattctcctcagcctcagccatttccacagaactcttcccagtcagctgctattactcagccttcatctcagccaggatcccaacctaagcttggcccacctcagcagggagcccaacctccccatcaggtccagatgccactgtataactttccccagtcaccaccagctcagtattctcccatgcacaatatgggattgttgccaatgcaccctctccagatccctgccccgtcctggcccatccatggcccagtgatccactctgcaccaggcagtgcccccagcaatattggcctaaatgatcccagcatcatctttgcacagcctgctgccagacctgtggcaatccctaacacgtctcacgatggacactggccccgtactgtggctccaaattccctggtaaacagtggtgcagtggggaattcagagccaggctttcgaggactgactcctccaattccttgggaacatgcaccgcgtccccatttcccccttgtcccagcttcgtggccttatggtttgcatcaaaacttcatgcatcagggaaatgcccgattccagcccaacaaacctttctatactcaagacagatgtgccacccgtcggtgtagagagcgttgtccccacccaccaagaggaaacgtgtcggagtaatgcgagtccattttctttcagctggtctaccgatgcacagcaaccagccaatcctgctgtctcaagggtatccgtacctcaatgtcagttacattcagcagaaaaagtgacatttaatggaaagcaaaacaaatcaggtcctgatttaaaattttaacacgtttagatagcttatttaaattctaagactgtttttacagactgtattatttgtatataaatatgaactatagtttttactagtatcaccaaattgagtgatacaaatttcatctattttattaccctatttttaagggaattttatgttttgtttaaccttgatgaattgtataaagagagaatttaaaaaattacattctttattttctattagctgtattcatactttggttgcttcagactttatatattgttcttaaaagttaggaaagaatttcatgtgttttaaattgtcacttctattctttacagaaccttgtagtgccaaaaactttttaaaaggtaaaaaaataaaataaaattacaacatgaagattcagattttttttcttttccatacttgtatattgaacattcaaacttgaatggaaagttgattttgtctgtatttgaagtacttctattttaagttaataaatctttttgacaaga

SEQ ID NO: 333407 - DNA, 2161 bp, Homo sapiens
cacgagggaatgtacatcttctatactccctcaaaatatatctacgaattatagtctcccaggttctgtatactgtagtaggtcaggaagatctctttcttttgtcatcaagtctggcctaaaataaaaacttggaacttttgagacagaacgaacttccagtttccatcactgctatttactattaaatttagtcaagacacttatcttctctaagcctcaatttctttttaaaactggagataataaatatcaacctctaaggattgttaaaggtttaagatttggtattttaaaaaatttaatataatattgttttacaaaactactggaaaaccgagttcctgccaaatgagcaggtgtgccataaatgtttgttcccttgccttcaaaaagacgcatgaaatgatgggcatgttagtccttttgttattgtgagagtcctgcatagtttgttctgtgactcacttaatttacaagtccctagccccacattattggtatcagcagtttactgtttagactaaagaagaaagacagtgaagaagagaaggaagggaatgaagaagagaaagattcccgagatgttcttgacccccgagacctccacgatactcgagactttagagacccgagagacctcagatgttttatatgtggagatgctggacatgtacgaagggagtgcccagaggtcaagctggcccgtcagaggaatagcagtgtggcagcagcccagctggtccgcaaccttgtaaatgctcaacaggtggctggttcagctcagcaacagggtgatcagtccataaggactagacagtcatcagaatgttctgaatcaccatcttattctcctcagcctcagccatttccacagaactcttcccagtcagctgctattactcagccttcatctcagccaggatcccaacctaagcttggcccacctcagcagggagcccaacctccccatcaggtccagatgccactgtataactttccccagtcaccaccagctcagtattctcccatgcacaatatgggattgttgccaatgcaccctctccagatccctgccccgtcctggcccatccatggcccagtgatccactctgcaccaggcagtgcccccagcaatattggcctaaatgatcccagcatcatctttgcacagcctgctgccagacctgtggcaatccctaacacgtctcacgatggacactggccccgtactgtggctccaaattccctggtaaacagtggtgcagtggggaattcagagccaggctttcgaggactgactcctccaattccttgggaacatgcaccgcgtccccatttcccccttgtcccagcttcgtggccttatggtttgcatcaaaacttcatgcatcagggaaatgcccgattccagcccaacaaacctttctatactcaagacagatgtgccacccgtcggtgtagagagcgttgtccccacccaccaagaggaaacgtgtcggagtaatgcgagtccattttctttcagctggtctaccgatgcacagcaaccagccaatcctgctgtctcaagggtatccgtacctcaatgtcagttacattcagcagaaaaagtgacatttaatggaaagcaaaacaaatcaggtcctgatttaaaattttaacacgtttagatagcttatttaaattctaagactgtttttacagactgtattatttgtatataaatatgaactatagtttttactagtatcaccaaattgagtgatacaaatttcatctattttattaccctatttttaagggaattttatgttttgtttaaccttgatgaattgtataaagagagaatttaaaaaattacattctttattttctattagctgtattcatactttggttgcttcagactttatatattgttcttaaaagttaggaaagaatttcatgtgttttaaattgtcacttctattctttacagaaccttgtagtgccaaaaactttttaaaaggtaaaaaaataaaataaaattacaacatgaagattcagattttttttcttttccatacttgtatattgaacattcaaacttgaatggaaagttgattttgtctgtatttgaagtacttctattttaagttaataaatctttttgacaaga

SEQ ID NO: 333408 - DNA, 384 bp, Homo sapiens
ccacctcagcctcccagaatactaggattacagatatgagccactgcacccaaccagaaagtatttctcaaataaatatgttgtctcctttagaaaagcagaataacatttgttcttgcttctaggatcagtgttattttttttcttgatctgctagtttgacaaatagcttttaaaattaagtagctcagttgctgcaagtccttcgttaatatacttaaggtttaaaagtccaagtttataaaattgcagagatatttgagattcttttacataagaagggagtttatttattgtcatttctctgctactttccttatctgttgattttctttgtgatgccttctcttagcagcccagctggtccgcaaccttgtaaatgct

SEQ ID NO: 333409 - DNA, 320 bp, Homo sapiens
tttttggaagaagtattttagtatgtcttataggtaaattctaaaatggtattagagtatttggacctttgggttggatcacttgaaatctaataatacaattaatttttttatgcagatctttgatggaaaacagattccacagagaatggttgatggatggaatgctttcttctttgataaaacagaagaactggtaattttaaaatagtctttatgttctagaatgctcactgatatatgttagcatctgtataatttaataattttacttaaatttgctgtccatgttttggatagtactgtatagacattgttct

SEQ ID NO: 333410 - DNA, 426 bp, Homo sapiens
ttcacacagctagtaattgttggagccgggattcgtaacccaggtctgtctgactccagagttcatgctctttccattgtatctcactgcctctctgtaatttttttaacccataatgtagctgaaatatagtactaatagtactgtagaacctaaccactgctttctgaaactgatagctttctgagttccaccgtgagatgccaggagcagaccttccccaagtgcaatttcagcagtaagagtgggtacttacgctttccttttttgtataccaggccttaatagtgggaaggagattgtccaagctccagggaagaaaaagactgattggacagggaagaagtgtcccaggccttctcaacagcaactagcaaaggagggtatccttgtagatgttcagtcctttaccagcctagctattgt

SEQ ID NO: 333411 - DNA, 442 bp, Homo sapiens
agcagtgaaatagagccaaaattagataagaaacaagatgatttagcgccttcagaaacttgtttaaaaaaagagctcagccaatgtaattgcattgatttgtctaagtcgcctgacccagataaatctactggaacagactgcaggtcaaatttagaaacagagagttcacatcagagtgtgtgcaccgacacatctgctacctcttgcaactgcaaagctacagaagatgcttctgaccttaatgatgatgataacctccccacccaggaattatattatgtgtttgataagtttattttaacctctggcaaggtaggatacagtttgtaaatgatctgtaagattttgtggttgttgtatgactatgtatattttttagattagaaatgtaaaaatagctatataaagtggtgacttgttttggaatgatattttggta

SEQ ID NO: 333412 - DNA, 305 bp, Homo sapiens
  misc_feature (249)..(249): n is a, c, g, or t
gctcggtacccattggtggtgcagtttactgtttagactaaagaagaaagacagtgaagaagagaaggaagggaatgaagaagagaaagattcccgagatgttcttgacccccgagacctccacgatactcgagactttagagacccgagagacctcagatgttttatatgtggagatgctggacatgtaaaagactaaagaagaaagacagtgaagaagagaaagatgggaatgaagaagagaaagantcccgagatgttcttgacccccgagacctccacgatactcgagactttagagaccc

SEQ ID NO: 333413 - DNA, 7692 bp, Homo sapiens
tcccccccacaatgcagttcgcggcgcggcggacatggcggtggagtcctgagctagtcgtgtcccggcctccagcggcggcagcggcgacggcggcggcagcaggaggcggagggagagcaggagccactgagatgaggaggcgtcgcgcgcgcctgtagctcgcgggcctcgcagtttgcttgcctaaactggacttgaagcaatttaaactactggagatctgccattttataatatcacaattggaaagaaacagattttcaaataatggaagagtctaaaaccttaaaaagtgaaaatcatgaaccaaagaagaatgttatttgtgaagaaagcaaagcagttcaagttataggtaatcaaacattgaaagctagaaatgataaatccgtaaaagaaattgagaacagctctccaaataggaatagtagtaaaaaaataagcaaaatgatatttgtatagaaaaaacagaagttaaatcatgtaaagtaaatgctgccaaccttccaggtcctaaagatttggggttagtccttcgagatcaaagtcattgcaaagcaaaaaaatttcctaattcaccggtgaaagccgaaaaggcaaccatttcacaggcaaaatcagaaaaggcaaccagtttacaggcaaaagcagaaaaatcaccaaagtcacctaattcagtgaaagcagaaaaagcatccagttatcagatgaagtcagaaaaagtaccaagttcaccagcagaagcagaaaagggacccagtttactgttgaaagacatgagacagaagacagaattacaacagattggaaaaaaaattccaagctcctttacttctgtggacaaagtgaatattgaagctgtagggggagaaaaatgtgctctgcaaaactcaccacgatctcagaagcaacagacatgtacagataatactggtgattctgatgatagtgcttcaggaattgaagacgtatcggacgatttaagtaaaatgaagaatgatgaatctaataaagaaaattcttcagagatggactacttagaaaatgccactgtgatagatgaatctgcattgacacctgagcagaggctggggttgaaacaagcagaagaacgcttagaaagagatcacatctttcgacttgaaaaacgatcaccagaatataccaattgtcggtatctatgcaaactttgcttaattcacattgaaaatatccagggggctcataaacatataaaggagaaacgacataagaaaaatattttgaatgttcacttaggttgtatggctcatctctgactagatttgctctgaaaagtagtgatgttaatatagatataaaatttcctcccaagatgaatcatccagatcttctgataaaagtacttgggattttaaagaaaaatgtattatatgtagatgtggaatctgattttcacgctaaagttcctgttgtggtgtgcagagatcgaaaaagtggtttactttgtagagtgagtgcaggaaacgatatggcatgtctcactactgatttacttactgcccttggcaaaatagaacctgtctttattcccttggtgttagcctttcgctactgggctaagttgtgctatattgactcccaaactgatggtggaatcccttcttactgttttgctttaatggtgatgttttttctacaacagagaaaaccccctcttcttccttgcttacttggaagttggattgaaggctttgacccaaaaagaatggatgactttcagctgaagggcatagtagaagagaagtttgtgaagtgggaatgtaattcaagtagtgcaactgagaaaaactcaattgctgaggaaaacaaagctaaggcagaccaaccaaaagatgataccaagaagacagaaacagacaaccaaagtaatgccatgaaggaaaaacatggcaaatctcctttagcattggaaacaccaaatcgggtatccttgggacagttatggttagagctgcttaaattctacacactggattttgctttggaggaatatgtcatatgtgtacggatacaagatattttaacaagagaaaataaaaactggcctaaaaggcgaatagccattgaagatccattttcagtcaagaggaatgttgcacggagcttaaacagccagctggtttacgaatatgttgtggagagatttagggcagcttatcggtattttgcctgtcctcagacgaagggtggaaataagtctacagtggatttcaagaaaagagagaaggggaaaataagcaataagaaaccagtcaagtcgaacaatatggcaaccaatggttgtattctgcttggggaaaccacagaaaaaataaatgcagaaagagagcaacctgttcaatgtgatgaaatggactgtacatcacagagatgtattattgacaacaacaatttgttggtaaatgaactagattttgctgaccacggacaggactcttcatctctttctaccagcaaaagcagtgaaatagagccaaaattagataagaaacaagatgatttagcgccttcagaaacttgtttaaaaaaagagctcagccaatgtaattgcattgatttgtctaagtcgcctgacccagataaatctactggaacagactgcaggtcaaatttagaaacagagagttcacatcagagtgtgtgcaccgacacatctgctacctcttgcaactgcaaagctacagaagatgcttctgaccttaatgatgatgataacctccccacccaggaattatattatgtgtttgataagtttattttaacctctggcaagccaccaacgatagtatgcagcatctgcaaaaaggatggccattcaaagaatgattgcccagaggattttaggaaaattgatttaaaacctctaccaccaatgacaaaccgatttcgggaaatacttgatttagtatgtaaaagatgttttgatgagttatcaccaccttgttctgaacaacacaacagggagcaaattttaattggcttggaaaagtttattcaaaaagaatatgatgaaaaggcaaggttgtgcttatttggctcttctaagaatggatttggatttcgtgatagtgatctggatatttgtatgaccctggaaggccatgaaaatgcagaggccttaatagtgggaaggagattgtccaagctccagggaagaaaaagactgattggacagggaagaagtgtcccaggccttctcaacagcaactagcaaaggagggtatccttgtagatgttcagtcctttaccagcctagctattgttatttatgtttcaaaatgcgggactgtttgcaagattggggtgaggcccagcttctggcatctgtagtggtgtcagtatcgcctctgttacattataaaagaattcagcagaatagtgtgcttttctaaaatcattcttttgaacggtggttttgaaattgttagacccggagtaaagatggcagtgatgacttaacttctggccataagaagttgcttctggtgtcttaacatcttgttttataaagaaactgaaaagttgcaagtattttatttgttctcctttacttaaattctgcttagagccacctacttggaaagtggctgcccttctccattctgaagagtaagaattgagggaataggaaatgatttttatacccaggaaagaggttagagttttagatatcttctatgtaaaatttattaaacttctaatcactaagggtttgtatattatatataatctgtgccattcctactgggaagttgaaacaatgaaaataataaatcattttctttcagatgagccataattgaaacttttaagattagcataattgtatcgttgaataataaagagaaaaattacctcctttgttaattttatcatatgtgaattagtaactaatggtttctttgaaatcctttggtttagctgcaatggctcctgctctcatgtagctaaaaagaacatgttggaaaaatgcaaatgactttataactcttgggattgatgtttatacccttcagctatttccagttaatttttaatgccataatcattatgtattatgattatcattaccataccaactctgctgtctctggtttttacaagagtaacacatttaaatttacagaggtaagaatttccttggagaaataggtgctggtgataataggagtatctttcttttccatatcaacataattataataaataactcacagatttaaaggcttattttgtgccaggcattctgctgagtgctttacatacatgtctcatgtaatcctcccaacagctctgcaggacaggagtttatgattatcttgattttatagaatagtaatgtaatgctcagagaggttaaacatctggttagtcacacagctaatcaatacttagtttaagatttgagactgggtgcagtggctcacgcctgtaatcccagcactttgggaggctgaggcgggcggatcacgaggtcaggagatcgagaccatcctggtgaacacggtgaaacctggtctctactaaaaatacaaaaaaattagccgggcacggtggcgggtgcctgtagtcccagcaactcgggaggctgagacaggagaatggcatgaacccgggaggcagagcttgcagtgagccgagatagcaccactgcactccggcctgggcgaaagagcaagactccgtctcaaaaaaagaaaaaaaaaaaaaaaaaaaaagatttgaatccaggtttgtctcaatttggagcctatgtacttaatcagtatattgttttgccctcaccaaactcacctctagttgtttattcacttattgaaaaccatattcttctcctgtctttgtgcttctcaaactttaatctgcatgtgaattaccttgggatcctgttaaaatgcagattatgatttagtagactggggagggtcctcagattctgcatttctatcaagtttccagattatgctgatactgtaggtctatgaatcacttacttggagtagcaaggttattatagagctttatggctggaaattgtaaatgctactattaaatgcttagattaaagtagaatttgcacaaggtgaaattgagtcaaacttatttatttgatttgttttttagaaattaaattgtaaggaaataattgaaaatttggcaaaaattcttaagagacatccaggtttaagaaacattttgcctataactactgccaaagtgcctatagtaaaatttgaacacaggcgaagtgggttagaaggcgatatcagtttatataatacgttggctcaacataacacaagaatgctagctacttatgcagctattgatcctagagtgcagtatttgggatatactatgaaagtgtttgctaagcgatgtgacattggggatgcttccaggggaagtttatcttcatatgcatatatccttatggtgctgtactttctgcagcagagaaagccacctgttatcccagttctacaagagatctttgatggaaaacagattccacagagaatggttgatggatggaatgctttcttctttgataaaacagaagaactgaaaaagcgtttaccttcacttggaaagaacacagaatcattaggggagctttggctgggactgcttcgtttctatactgaagagtttgatttcaaggaatatgtaattagcattcggcagaaaaagctgttgacaacttttgagaagcagtggacttccaagtgcattgcaattgaagacccttttgacttgaatcataaccttggtgctggagtttccagaaaaatgaccaatttcatcatgaaagcatttatcaatggaaggaaactttttggtacccctttttatccactcattggcagagaagctgagtacttctttgattccagagtattaacagatggagaactggctcccaatgatagatgttgccgtgtgtgtggaaaaataggccactacatgaaagactgccctaaaaggaaaagcagtttactgtttagactaaagaagaaagacagtgaagaagagaaggaagggaatgaagaagagaaagattcccgagatgttcttgacccccgagacctccacgatactcgagactttagagacccgagagacctcagatgttttatatgtggagatgctggacatgtacgaagggagtgcccagaggtcaagctggcccgtcagaggaatagcagtgtggcagcagcccagctggtccgcaaccttgtaaatgctcaacaggtggctggttcagctcagcaacagggtgatcagtccataaggactagacagtcatcagaatgttctgaatcaccatcttattctcctcagcctcagccatttccacagaactcttcccagtcagctgctattactcagccttcatctcagccaggatcccaacctaagcttggcccacctcagcagggagcccaacctccccatcaggtccagatgccactgtataactttccccagtcaccaccagctcagtattctcccatgcacaatatgggattgttgccaatgcaccctctccagatccctgccccgtcctggcccatccatggcccagtgatccactctgcaccaggcagtgcccccagcaatattggcctaaatgatcccagcatcatctttgcacagcctgctgccagacctgtggcaatccctaacacgtctcacgatggacactggccccgtactgtggctccaaattccctggtaaacagtggtgcagtggggaattcagagccaggctttcgaggactgactcctccaattccttgggaacatgcaccgcgtccccatttcccccttgtcccagcttcgtggccttatggtttgcatcaaaacttcatgcatcagggaaatgcccgattccagcccaacaaacctttctatactcaagacagatgtgccacccgtcggtgtagagagcgttgtccccacccaccaagaggaaacgtgtcggagtaatgcgagtccattttctttcagctggtctaccgatgcacagcaaccagccaatcctgctgtctcaagggtatccgtacctcaatgtcagttacattcagcagaaaaagtgacatttaatggaaagcaaaacaaatcaggtcctgatttaaaattttaacacgtttagatagcttatttaaattctaagactgtttttacagactgtattatttgtatataaatatgaactatagtttttactagtatcaccaaattgagtgatacaaatttcatctattttattaccctatttttaagggaattttatgttttgtttaaccttgatgaattgtataaagagagaatttaaaaaattacattctttattttctattagctgtattcatactttggttgcttcagactttatatattgttcttaaaagttaggaaagaatttcatgtgttttaaattgtcacttctattctttacagaaccttgtagtgccaaaaactttttaaaaggtaaaaaaataaaataaaattacaacatgaagattcagattttttttcttttccatacttgtatattgaacattcaaacttgaatggaaagttgattttgtctgtatttgaagtacttctattttaagttaataaatctttttgacaaga

SEQ ID NO: 333414 - DNA, 7921 bp, Homo sapiens
tcccccccacaatgcagttcgcggcgcggcggacatggcggtggagtcctgagctagtcgtgtcccggcctccagcggcggcagcggcgacggcggcggcagcaggaggcggagggagagcaggagccactgagatgaggaggcgtcgcgcgcgcctgtagctcgcgggcctcgcagtttgcttgcctaaactggacttgaagcaatttaaactactggagatctgccattttataatatcacaattggaaagaaacagattttcaaataatggaagagtctaaaaccttaaaaagtgaaaatcatgaaccaaagaagaatgttatttgtgaagaaagcaaagcagttcaagttataggtaatcaaacattgaaagctagaaatgataaatccgtaaaagaaattgagaacagctctccaaataggaatagtagtaaaaaaataagcaaaatgatatttgtatagaaaaaacagaagttaaatcatgtaaagtaaatgctgccaaccttccaggtcctaaagatttggggttagtccttcgagatcaaagtcattgcaaagcaaaaaaatttcctaattcaccggtgaaagccgaaaaggcaaccatttcacaggcaaaatcagaaaaggcaaccagtttacaggcaaaagcagaaaaatcaccaaagtcacctaattcagtgaaagcagaaaaagcatccagttatcagatgaagtcagaaaaagtaccaagttcaccagcagaagcagaaaagggacccagtttactgttgaaagacatgagacagaagacagaattacaacagattggaaaaaaaattccaagctcctttacttctgtggacaaagtgaatattgaagctgtagggggagaaaaatgtgctctgcaaaactcaccacgatctcagaagcaacagacatgtacagataatactggtgattctgatgatagtgcttcaggaattgaagacgtatcggacgatttaagtaaaatgaagaatgatgaatctaataaagaaaattcttcagagatggactacttagaaaatgccactgtgatagatgaatctgcattgacacctgagcagaggctggggttgaaacaagcagaagaacgcttagaaagagatcacatctttcgacttgaaaaacgatcaccagaatataccaattgtcggtatctatgcaaactttgcttaattcacattgaaaatatccagggggctcataaacatataaaggagaaacgacataagaaaaatattttgaatgttcacttaggttgtatggctcatctctgactagatttgctctgaaaagtagtgatgttaatatagatataaaatttcctcccaagatgaatcatccagatcttctgataaaagtacttgggattttaaagaaaaatgtattatatgtagatgtggaatctgattttcacgctaaagttcctgttgtggtgtgcagagatcgaaaaagtggtttactttgtagagtgagtgcaggaaacgatatggcatgtctcactactgatttacttactgcccttggcaaaatagaacctgtctttattcccttggtgttagcctttcgctactgggctaagttgtgctatattgactcccaaactgatggtggaatcccttcttactgttttgctttaatggtgatgttttttctacaacagagaaaaccccctcttcttccttgcttacttggaagttggattgaaggctttgacccaaaaagaatggatgactttcagctgaagggcatagtagaagagaagtttgtgaagtgggaatgtaattcaagtagtgcaactgagaaaaactcaattgctgaggaaaacaaagctaaggcagaccaaccaaaagatgataccaagaagacagaaacagacaaccaaagtaatgccatgaaggaaaaacatggcaaatctcctttagcattggaaacaccaaatcgggtatccttgggacagttatggttagagctgcttaaattctacacactggattttgctttggaggaatatgtcatatgtgtacggatacaagatattttaacaagagaaaataaaaactggcctaaaaggcgaatagccattgaagatccattttcagtcaagaggaatgttgcacggagcttaaacagccagctggtttacgaatatgttgtggagagatttagggcagcttatcggtattttgcctgtcctcagacgaagggtggaaataagtctacagtggatttcaagaaaagagagaaggggaaaataagcaataagaaaccagtcaagtcgaacaatatggcaaccaatggttgtattctgcttggggaaaccacagaaaaaataaatgcagaaagagagcaacctgttcaatgtgatgaaatggactgtacatcacagagatgtattattgacaacaacaatttgttggtaaatgaactagattttgctgaccacggacaggactcttcatctctttctaccagcaaaagcagtgaaatagagccaaaattagataagaaacaagatgatttagcgccttcagaaacttgtttaaaaaaagagctcagccaatgtaattgcattgatttgtctaagtcgcctgacccagataaatctactggaacagactgcaggtcaaatttagaaacagagagttcacatcagagtgtgtgcaccgacacatctgctacctcttgcaactgcaaagctacagaagatgcttctgaccttaatgatgatgataacctccccacccaggaattatattatgtgtttgataagtttattttaacctctggcaagccaccaacgatagtatgcagcatctgcaaaaaggatggccattcaaagaatgattgcccagaggattttaggaaaattgatttaaaacctctaccaccaatgacaaaccgatttcgggaaatacttgatttagtatgtaaaagatgttttgatgagttatcaccaccttgttctgaacaacacaacagggagcaaattttaattggcttggaaaagtttattcaaaaagaatatgatgaaaaggcaaggttgtgcttatttggctcttctaagaatggatttggatttcgtgatagtgatctggatatttgtatgaccctggaaggccatgaaaatgcagaggccttaatagtgggaaggagattgtccaagctccagggaagaaaaagactgattggacagggaagaagtgtcccaggccttctcaacagcaactagcaaaggagggtatccttgtagatgttcagtcctttaccagcctagctattgttatttatgtttcaaaatgcgggactgtttgcaagattggggtgaggcccagcttctggcatctgtagtggtgtcagtatcgcctctgttacattataaaagaattcagcagaatagtgtgcttttctaaaatcattcttttgaacggtggttttgaaattgttagacccggagtaaagatggcagtgatgacttaacttctggccataagaagttgcttctggtgtcttaacatcttgttttataaagaaactgaaaagttgcaagtattttatttgttctcctttacttaaattctgcttagagccacctacttggaaagtggctgcccttctccattctgaagagtaagaattgagggaataggaaatgatttttatacccaggaaagaggttagagttttagatatcttctatgtaaaatttattaaacttctaatcactaagggtttgtatattatatataatctgtgccattcctactgggaagttgaaacaatgaaaataataaatcattttctttcagatgagccataattgaaacttttaagattagcataattgtatcgttgaataataaagagaaaaattacctcctttgttaattttatcatatgtgaattagtaactaatggtttctttgaaatcctttggtttagctgcaatggctcctgctctcatgtagctaaaaagaacatgttggaaaaatgcaaatgactttataactcttgggattgatgtttatacccttcagctatttccagttaatttttaatgccataatcattatgtattatgattatcattaccataccaactctgctgtctctggtttttacaagagtaacacatttaaatttacagaggtaagaatttccttggagaaataggtgctggtgataataggagtatctttcttttccatatcaacataattataataaataactcacagatttaaaggcttattttgtgccaggcattctgctgagtgctttacatacatgtctcatgtaatcctcccaacagctctgcaggacaggagtttatgattatcttgattttatagaatagtaatgtaatgctcagagaggttaaacatctggttagtcacacagctaatcaatacttagtttaagatttgagactgggtgcagtggctcacgcctgtaatcccagcactttgggaggctgaggcgggcggatcacgaggtcaggagatcgagaccatcctggtgaacacggtgaaacctggtctctactaaaaatacaaaaaaattagccgggcacggtggcgggtgcctgtagtcccagcaactcgggaggctgagacaggagaatggcatgaacccgggaggcagagcttgcagtgagccgagatagcaccactgcactccggcctgggcgaaagagcaagactccgtctcaaaaaaagaaaaaaaaaaaaaaaaaaaaagatttgaatccaggtttgtctcaatttggagcctatgtacttaatcagtatattgttttgccctcaccaaactcacctctagttgtttattcacttattgaaaaccatattcttctcctgtctttgtgcttctcaaactttaatctgcatgtgaattaccttgggatcctgttaaaatgcagattatgatttagtagactggggagggtcctcagattctgcatttctatcaagtttccagattatgctgatactgtaggtctatgaatcacttacttggagtagcaaggttattatagagctttatggctggaaattgtaaatgctactattaaatgcttagattaaagtagaatttgcacaaggtgaaattgagtcaaacttatttatttgatttgttttttagaaattaaattgtaaggaaataattgaaaatttggcaaaaattcttaagagacatccaggtttaagaaacattttgcctataactactgccaaagtgcctatagtaaaatttgaacacaggcgaagtgggttagaaggcgatatcagtttatataatacgttggctcaacataacacaagaatgctagctacttatgcagctattgatcctagagtgcagtatttgggatatactatgaaagtgtttgctaagcgatgtgacattggggatgcttccaggggaagtttatcttcatatgcatatatccttatggtgctgtactttctgcagcagagaaagccacctgttatcccagttctacaagagatctttgatggaaaacagattccacagagaatggttgatggatggaatgctttcttctttgataaaacagaagaactgaaaaagcgtttaccttcacttggaaagaacacagaatcattaggggagctttggctgggactgcttcgtttctatactgaagagtttgatttcaaggaatatgtaattagcattcggcagaaaaagctgttgacaacttttgagaagcagtggacttccaagtgcattgcaattgaagacccttttgacttgaatcataaccttggtgctggagtttccagaaaaatgaccaatttcatcatgaaagcatttatcaatggaaggaaactttttggtacccctttttatccactcattggcagagaagctgagtacttctttgattccagagtattaacagatggagaactggctcccaatgatagatgttgccgtgtgtgtggaaaaataggccactacatgaaagactgccctaaaaggaaaagcagtttactgtttagactaaagaagaaagacagtgaagaagagaaggaagggaatgaagaagagaaagattcccgagatgttcttgacccccgagacctccacgatactcgagactttagagacccgagagacctcagatgttttatatgtggagatgctggacatgtacgaagggagtgcccagaggtcaagctggcccgtcagaggaatagcagtgtggcagcagcccagctggtccgcaaccttgtaaatgctcaacaggtggctggttcagctcagcaacagggtgatcagtccataaggactagacagtcatcagaatgttctgaatcaccatcttattctcctcagcctcagccatttccacagaactcttcccagtcagctgctattactcagccttcatctcagccaggatcccaacctaagcttggcccacctcagcagggagcccaacctccccatcaggtccagatgccactgtataactttccccagtcaccaccagctcagtattctcccatgcacaatatgggattgttgccaatgcaccctctccagatccctgccccgtcctggcccatccatggcccagtgatccactctgcaccaggcagtgcccccagcaatattggcctaaatgatcccagcatcatctttgcacagcctgctgccagacctgtggcaatccctaacacgtctcacgatggacactggccccgtactgtggctccaaattccctggtaaacagtggtgcagtggggaattcagagccaggctttcgaggactgactcctccaattccttgggaacatgcaccgcgtccccatttcccccttgtcccagcttcgtggccttatggtttgcatcaaaacttcatgcatcagggaaatgcccgattccagcccaacaaacctttctatactcaagacagatgtgccacccgtcggtgtagagagcgttgtccccacccaccaagaggaaacgtgtcggagtaatgcgagtccattttctttcagctggtctaccgatgcacagcaaccagccaatcctgctgtctcaagggtatccgtacctcaatgtcagttacattcagcagaaaaagtgacatttaatggaaagcaaaacaaatcaggtcctgatttaaaattttaacacgtttagatagcttatttaaattctaagactgtttttacagactgtattatttgtatataaatatgaactatagtttttactagtatcaccaaattgagtgatacaaatttcatctattttattaccctatttttaagggaattttatgttttgtttaaccttgatgaattgtataaagagagaatttaaaaaattacattctttattttctattagctgtattcatactttggttgcttcagactttatatattgttcttaaaagttaggaaagaatttcatgtgttttaaattgtcacttctattctttacagaaccttgtagtgccaaaaactttttaaaaggtaaaaaaataaaataaaattacaacatgaagattcagattttttttcttttccatacttgtatattgaacattcaaacttgaatggaaagttgattttgtctgtatttgaagtacttctattttaagttaataaatctttttgacaagaaaaaaaaaaaaaaaaaaaaaaaaaaaaaaaaaaaaaaaaaaaaaaaaaaaaaaaaaaaaaacaaaaggggggacaaaaaaccctatatagtaatatagagagtcattttacaatcttttggcctacttttataaaacggcgaacgtgggaaaacccggggtattccccaattaatcccttctttaaatatccctttttcccccggtgggctatttttatttggtaaact

SEQ ID NO: 333415 - DNA, 7578 bp, Homo sapiens
tcccccccacaatgcagttcgcggcgcggcggacatggcggtggagtcctgagctagtcgtgtcccggcctccagcggcggcagcggcgacggcggcggcagcaggaggcggagggagagcaggagccactgagatgaggaggcgtcgcgcgcgcctgtagctcgcgggcctcgcagtttgcttgcctaaactggacttgaagcaatttaaactactggagatctgccattttataatatcacaattggaaagaaacagattttcaaataatggaagagtctaaaaccttaaaaagtgaaaatcatgaaccaaagaagaatgttatttgtgaagaaagcaaagcagttcaagttataggtaatcaaacattgaaagctagaaatgataaatccgtaaaagaaattgagaacagctctccaaataggaatagtagtaaaaaaataagcaaaatgatatttgtatagaaaaaacagaagttaaatcatgtaaagtaaatgctgccaaccttccaggtcctaaagatttggggttagtccttcgagatcaaagtcattgcaaagcaaaaaaatttcctaattcaccggtgaaagccgaaaaggcaaccatttcacaggcaaaatcagaaaaggcaaccagtttacaggcaaaagcagaaaaatcaccaaagtcacctaattcagtgaaagcagaaaaagcatccagttatcagatgaagtcagaaaaagtaccaagttcaccagcagaagcagaaaagggacccagtttactgttgaaagacatgagacagaagacagaattacaacagattggaaaaaaaattccaagctcctttacttctgtggacaaagtgaatattgaagctgtagggggagaaaaatgtgctctgcaaaactcaccacgatctcagaagcaacagacatgtacagataatactggtgattctgatgatagtgcttcaggaattgaagacgtatcggacgatttaagtaaaatgaagaatgatgaatctaataaagaaaattcttcagagatggactacttagaaaatgccactgtgatagatgaatctgcattgacacctgagcagaggctggggttgaaacaagcagaagaacgcttagaaagagatcacatctttcgacttgaaaaacgatcaccagaatataccaattgtcggtatctatgcaaactttgcttaattcacattgaaaatatccagggggctcataaacatataaaggagaaacgacataagaaaaatattttgaatgttcacttaggttgtatggctcatctctgactagatttgctctgaaaagtagtgatgttaatatagatataaaatttcctcccaagatgaatcatccagatcttctgataaaagtacttgggattttaaagaaaaatgtattatatgtagatgtggaatctgattttcacgctaaagttcctgttgtggtgtgcagagatcgaaaaagtggtttactttgtagagtgagtgcaggaaacgatatggcatgtctcactactgatttacttactgcccttggcaaaatagaacctgtctttattcccttggtgttagcctttcgctactgggctaagttgtgctatattgactcccaaactgatggtggaatcccttcttactgttttgctttaatggtgatgttttttctacaacagagaaaaccccctcttcttccttgcttacttggaagttggattgaaggctttgacccaaaaagaatggatgactttcagctgaagggcatagtagaagagaagtttgtgaagtgggaatgtaattcaagtagtgcaactgagaaaaactcaattgctgaggaaaacaaagctaaggcagaccaaccaaaagatgataccaagaagacagaaacagacaaccaaagtaatgccatgaaggaaaaacatggcaaatctcctttagcattggaaacaccaaatcgggtatccttgggacagttatggttagagctgcttaaattctacacactggattttgctttggaggaatatgtcatatgtgtacggatacaagatattttaacaagagaaaataaaaactggcctaaaaggcgaatagccattgaagatccattttcagtcaagaggaatgttgcacggagcttaaacagccagctggtttacgaatatgttgtggagagatttagggcagcttatcggtattttgcctgtcctcagacgaagggtggaaataagtctacagtggatttcaagaaaagagagaaggggaaaataagcaataagaaaccagtcaagtcgaacaatatggcaaccaatggttgtattctgcttggggaaaccacagaaaaaataaatgcagaaagagagcaacctgttcaatgtgatgaaatggactgtacatcacagagatgtattattgacaacaacaatttgttggtaaatgaactagattttgctgaccacggacaggactcttcatctctttctaccagcaaaagcagtgaaatagagccaaaattagataagaaacaagatgatttagcgccttcagaaacttgtttaaaaaaagagctcagccaatgtaattgcattgatttgtctaagtcgcctgacccagataaatctactggaacagactgcaggtcaaatttagaaacagagagttcacatcagagtgtgtgcaccgacacatctgctacctcttgcaactgcaaagctacagaagatgcttctgaccttaatgatgatgataacctccccacccaggaattatattatgtgtttgataagtttattttaacctctggcaagccaccaacgatagtatgcagcatctgcaaaaaggatggccattcaaagaatgattgcccagaggattttaggaaaattgatttaaaacctctaccaccaatgacaaaccgatttcgggaaatacttgatttagtatgtaaaagatgttttgatgagttatcaccaccttgttctgaacaacacaacagggagcaaattttaattggcttggaaaagtttattcaaaaagaatatgatgaaaaggcaaggttgtgcttatttggctcttctaagaatggatttggatttcgtgatagtgatctggatatttgtatgaccctggaaggccatgaaaatgcagaggccttaatagtgggaaggagattgtccaagctccagggaagaaaaagactgattggacagggaagaagtgtcccaggccttctcaacagcaactagcaaaggagggtatccttgtagatgttcagtcctttaccagcctagctattgttatttatgtttcaaaatgcgggactgtttgcaagattggggtgaggcccagcttctggcatctgtagtggtgtcagtatcgcctctgttacattataaaagaattcagcagaatagtgtgcttttctaaaatcattcttttgaacggtggttttgaaattgttagacccggagtaaagatggcagtgatgacttaacttctggccataagaagttgcttctggtgtcttaacatcttgttttataaagaaactgaaaagttgcaagtattttatttgttctcctttacttaaattctgcttagagccacctacttggaaagtggctgcccttctccattctgaagagtaagaattgagggaataggaaatgatttttatacccaggaaagaggttagagttttagatatcttctatgtaaaatttattaaacttctaatcactaagggtttgtatattatatataatctgtgccattcctactgggaagttgaaacaatgaaaataataaatcattttctttcagatgagccataattgaaacttttaagattagcataattgtatcgttgaataataaagagaaaaattacctcctttgttaattttatcatatgtgaattagtaactaatggtttctttgaaatcctttggtttagctgcaatggctcctgctctcatgtagctaaaaagaacatgttggaaaaatgcaaatgactttataactcttgggattgatgtttatacccttcagctatttccagttaatttttaatgccataatcattatgtattatgattatcattaccataccaactctgctgtctctggtttttacaagagtaacacatttaaatttacagaggtaagaatttccttggagaaataggtgctggtgataataggagtatctttcttttccatatcaacataattataataaataactcacagatttaaaggcttattttgtgccaggcattctgctgagtgctttacatacatgtctcatgtaatcctcccaacagctctgcaggacaggagtttatgattatcttgattttatagaatagtaatgtaatgctcagagaggttaaacatctggttagtcacacagctaatcaatacttagtttaagatttgagactgggtgcagtggctcacgcctgtaatcccagcactttgggaggctgaggcgggcggatcacgaggtcaggagatcgagaccatcctggtgaacacggtgaaacctggtctctactaaaaatacaaaaaaattagccgggcacggtggcgggtgcctgtagtcccagcaactcgggaggctgagacaggagaatggcatgaacccgggaggcagagcttgcagtgagccgagatagcaccactgcactccggcctgggcgaaagagcaagactccgtctcaaaaaaagaaaaaaaaaaaaaaaaaaaaagatttgaatccaggtttgtctcaatttggagcctatgtacttaatcagtatattgttttgccctcaccaaactcacctctagttgtttattcacttattgaaaaccatattcttctcctgtctttgtgcttctcaaactttaatctgcatgtgaattaccttgggatcctgttaaaatgcagattatgatttagtagactggggagggtcctcagattctgcatttctatcaagtttccagattatgctgatactgtaggtctatgaatcacttacttggagtagcaaggttattatagagctttatggctggaaattgtaaatgctactattaaatgcttagattaaagtagaatttgcacaaggtgaaattgagtcaaacttatttatttgatttgttttttagaaattaaattgtaaggaaataattgaaaatttggcaaaaattcttaagagacatccaggtttaagaaacattttgcctataactactgccaaagtgcctatagtaaaatttgaacacaggcgaagtgggttagaaggcgatatcagtttatataatacgttggctcaacataacacaagaatgctagctacttatgcagctattgatcctagagtgcagtatttgggatatactatgaaagtgtttgctaagatctttgatggaaaacagattccacagagaatggttgatggatggaatgctttcttctttgataaaacagaagaactgaaaaagcgtttaccttcacttggaaagaacacagaatcattaggggagctttggctgggactgcttcgtttctatactgaagagtttgatttcaaggaatatgtaattagcattcggcagaaaaagctgttgacaacttttgagaagcagtggacttccaagtgcattgcaattgaagacccttttgacttgaatcataaccttggtgctggagtttccagaaaaatgaccaatttcatcatgaaagcatttatcaatggaaggaaactttttggtacccctttttatccactcattggcagagaagctgagtacttctttgattccagagtattaacagatggagaactggctcccaatgatagatgttgccgtgtgtgtggaaaaataggccactacatgaaagactgccctaaaaggaaaagcagtttactgtttagactaaagaagaaagacagtgaagaagagaaggaagggaatgaagaagagaaagattcccgagatgttcttgacccccgagacctccacgatactcgagactttagagacccgagagacctcagatgttttatatgtggagatgctggacatgtacgaagggagtgcccagaggtcaagctggcccgtcagaggaatagcagtgtggcagcagcccagctggtccgcaaccttgtaaatgctcaacaggtggctggttcagctcagcaacagggtgatcagtccataaggactagacagtcatcagaatgttctgaatcaccatcttattctcctcagcctcagccatttccacagaactcttcccagtcagctgctattactcagccttcatctcagccaggatcccaacctaagcttggcccacctcagcagggagcccaacctccccatcaggtccagatgccactgtataactttccccagtcaccaccagctcagtattctcccatgcacaatatgggattgttgccaatgcaccctctccagatccctgccccgtcctggcccatccatggcccagtgatccactctgcaccaggcagtgcccccagcaatattggcctaaatgatcccagcatcatctttgcacagcctgctgccagacctgtggcaatccctaacacgtctcacgatggacactggccccgtactgtggctccaaattccctggtaaacagtggtgcagtggggaattcagagccaggctttcgaggactgactcctccaattccttgggaacatgcaccgcgtccccatttcccccttgtcccagcttcgtggccttatggtttgcatcaaaacttcatgcatcagggaaatgcccgattccagcccaacaaacctttctatactcaagacagatgtgccacccgtcggtgtagagagcgttgtccccacccaccaagaggaaacgtgtcggagtaatgcgagtccattttctttcagctggtctaccgatgcacagcaaccagccaatcctgctgtctcaagggtatccgtacctcaatgtcagttacattcagcagaaaaagtgacatttaatggaaagcaaaacaaatcaggtcctgatttaaaattttaacacgtttagatagcttatttaaattctaagactgtttttacagactgtattatttgtatataaatatgaactatagtttttactagtatcaccaaattgagtgatacaaatttcatctattttattaccctatttttaagggaattttatgttttgtttaaccttgatgaattgtataaagagagaatttaaaaaattacattctttattttctattagctgtattcatactttggttgcttcagactttatatattgttcttaaaagttaggaaagaatttcatgtgttttaaattgtcacttctattctttacagaaccttgtagtgccaaaaactttttaaaaggtaaaaaaataaaataaaattacaacatgaagattcagattttttttcttttccatacttgtatattgaacattcaaacttgaatggaaagttgattttgtctgtatttgaagtacttctattttaagttaataaatctttttgacaaga

SEQ ID NO: 333416 - DNA, 7572 bp, Homo sapiens
tcccccccacaatgcagttcgcggcgcggcggacatggcggtggagtcctgagctagtcgtgtcccggcctccagcggcggcagcggcgacggcggcggcagcaggaggcggagggagagcaggagccactgagatgaggaggcgtcgcgcgcgcctgtagctcgcgggcctcgcagtttgcttgcctaaactggacttgaagcaatttaaactactggagatctgccattttataatatcacaattggaaagaaacagattttcaaataatggaagagtctaaaaccttaaaaagtgaaaatcatgaaccaaagaagaatgttatttgtgaagaaagcaaagcagttcaagttataggtaatcaaacattgaaagctagaaatgataaatccgtaaaagaaattgagaacagctctccaaataggaatagtagtaaaaaaataagcaaaatgatatttgtatagaaaaaacagaagttaaatcatgtaaagtaaatgctgccaaccttccaggtcctaaagatttggggttagtccttcgagatcaaagtcattgcaaagcaaaaaaatttcctaattcaccggtgaaagccgaaaaggcaaccatttcacaggcaaaatcagaaaaggcaaccagtttacaggcaaaagcagaaaaatcaccaaagtcacctaattcagtgaaagcagaaaaagcatccagttatcagatgaagtcagaaaaagtaccaagttcaccagcagaagcagaaaagggacccagtttactgttgaaagacatgagacagaagacagaattacaacagattggaaaaaaaattccaagctcctttacttctgtggacaaagtgaatattgaagctgtagggggagaaaaatgtgctctgcaaaactcaccacgatctcagaagcaacagacatgtacagataatactggtgattctgatgatagtgcttcaggaattgaagacgtatcggacgatttaagtaaaatgaagaatgatgaatctaataaagaaaattcttcagagatggactacttagaaaatgccactgtgatagatgaatctgcattgacacctgagcagaggctggggttgaaacaagcagaagaacgcttagaaagagatcacatctttcgacttgaaaaacgatcaccagaatataccaattgtcggtatctatgcaaactttgcttaattcacattgaaaatatccagggggctcataaacatataaaggagaaacgacataagaaaaatattttgaatgttcacttaggttgtatggctcatctctgactagatttgctctgaaaagtagtgatgttaatatagatataaaatttcctcccaagatgaatcatccagatcttctgataaaagtacttgggattttaaagaaaaatgtattatatgtagatgtggaatctgattttcacgctaaagttcctgttgtggtgtgcagagatcgaaaaagtggtttactttgtagagtgagtgcaggaaacgatatggcatgtctcactactgatttacttactgcccttggcaaaatagaacctgtctttattcccttggtgttagcctttcgctactgggctaagttgtgctatattgactcccaaactgatggtggaatcccttcttactgttttgctttaatggtgatgttttttctacaacagagaaaaccccctcttcttccttgcttacttggaagttggattgaaggctttgacccaaaaagaatggatgactttcagctgaagggcatagtagaagagaagtttgtgaagtgggaatgtaattcaagtagtgcaactgagaaaaactcaattgctgaggaaaacaaagctaaggcagaccaaccaaaagatgataccaagaagacagaaacagacaaccaaagtaatgccatgaaggaaaaacatggcaaatctcctttagcattggaaacaccaaatcgggtatccttgggacagttatggttagagctgcttaaattctacacactggattttgctttggaggaatatgtcatatgtgtacggatacaagatattttaacaagagaaaataaaaactggcctaaaaggcgaatagccattgaagatccattttcagtcaagaggaatgttgcacggagcttaaacagccagctggtttacgaatatgttgtggagagatttagggcagcttatcggtattttgcctgtcctcagacgaagggtggaaataagtctacagtggatttcaagaaaagagagaaggggaaaataagcaataagaaaccagtcaagtcgaacaatatggcaaccaatggttgtattctgcttggggaaaccacagaaaaaataaatgcagaaagagagcaacctgttcaatgtgatgaaatggactgtacatcacagagatgtattattgacaacaacaatttgttggtaaatgaactagattttgctgaccacggacaggactcttcatctctttctaccagcaaaagcagtgaaatagagccaaaattagataagaaacaagatgatttagcgccttcagaaacttgtttaaaaaaagagctcagccaatgtaattgcattgatttgtctaagtcgcctgacccagataaatctactggaacagactgcaggtcaaatttagaaacagagagttcacatcagagtgtgtgcaccgacacatctgctacctcttgcaactgcaaagctacagaagatgcttctgaccttaatgatgatgataacctccccacccaggaattatattatgtgtttgataagtttattttaacctctggcaagccaccaacgatagtatgcagcatctgcaaaaaggatggccattcaaagaatgattgcccagaggattttaggaaaattgatttaaaacctctaccaccaatgacaaaccgatttcgggaaatacttgatttagtatgtaaaagatgttttgatgagttatcaccaccttgttctgaacaacacaacagggagcaaattttaattggcttggaaaagtttattcaaaaagaatatgatgaaaaggcaaggttgtgcttatttggctcttctaagaatggatttggatttcgtgatagtgatctggatatttgtatgaccctggaaggccatgaaaatgcagaggccttaatagtgggaaggagattgtccaagctccagggaagaaaaagactgattggacagggaagaagtgtcccaggccttctcaacagcaactagcaaaggagggtatccttgtagatgttcagtcctttaccagcctagctattgttatttatgtttcaaaatgcgggactgtttgcaagattggggtgaggcccagcttctggcatctgtagtggtgtcagtatcgcctctgttacattataaaagaattcagcagaatagtgtgcttttctaaaatcattcttttgaacggtggttttgaaattgttagacccggagtaaagatggcagtgatgacttaacttctggccataagaagttgcttctggtgtcttaacatcttgttttataaagaaactgaaaagttgcaagtattttatttgttctcctttacttaaattctgcttagagccacctacttggaaagtggctgcccttctccattctgaagagtaagaattgagggaataggaaatgatttttatacccaggaaagaggttagagttttagatatcttctatgtaaaatttattaaacttctaatcactaagggtttgtatattatatataatctgtgccattcctactgggaagttgaaacaatgaaaataataaatcattttctttcagatgagccataattgaaacttttaagattagcataattgtatcgttgaataataaagagaaaaattacctcctttgttaattttatcatatgtgaattagtaactaatggtttctttgaaatcctttggtttagctgcaatggctcctgctctcatgtagctaaaaagaacatgttggaaaaatgcaaatgactttataactcttgggattgatgtttatacccttcagctatttccagttaatttttaatgccataatcattatgtattatgattatcattaccataccaactctgctgtctctggtttttacaagagtaacacatttaaatttacagaggtaagaatttccttggagaaataggtgctggtgataataggagtatctttcttttccatatcaacataattataataaataactcacagatttaaaggcttattttgtgccaggcattctgctgagtgctttacatacatgtctcatgtaatcctcccaacagctctgcaggacaggagtttatgattatcttgattttatagaatagtaatgtaatgctcagagaggttaaacatctggttagtcacacagctaatcaatacttagtttaagatttgagactgggtgcagtggctcacgcctgtaatcccagcactttgggaggctgaggcgggcggatcacgaggtcaggagatcgagaccatcctggtgaacacggtgaaacctggtctctactaaaaatacaaaaaaattagccgggcacggtggcgggtgcctgtagtcccagcaactcgggaggctgagacaggagaatggcatgaacccgggaggcagagcttgcagtgagccgagatagcaccactgcactccggcctgggcgaaagagcaagactccgtctcaaaaaaagaaaaaaaaaaaaaaaaaaaaagatttgaatccaggtttgtctcaatttggagcctatgtacttaatcagtatattgttttgccctcaccaaactcacctctagttgtttattcacttattgaaaaccatattcttctcctgtctttgtgcttctcaaactttaatctgcatgtgaattaccttgggatcctgttaaaatgcagattatgatttagtagactggggagggtcctcagattctgcatttctatcaagtttccagattatgctgatactgtaggtctatgaatcacttacttggagtagcaaggttattatagagctttatggctggaaattgtaaatgctactattaaatgcttagattaaagtagaatttgcacaaggtgaaattgagtcaaacttatttatttgatttgttttttagaaattaaattgtaaggaaataattgaaaatttggcaaaaattcttaagagacatccaggtttaagaaacattttgcctataactactgccaaagtgcctatagtaaaatttgaacacaggcgaagtgggttagaaggcgatatcagtttatataatacgttggctcaacataacacaagaatgctagctacttatgcagctattgatcctagagtgcagtatttgggatatactatgaaagtgtttgctaagcgatgtgacattggggatgcttccaggggaagtttatcttcatatgcatatatccttatggtgctgtactttctgcagcagagaaagccacctgttatcccagttctacaagagatctttgatggaaaacagattccacagagaatggttgatggatggaatgctttcttctttgataaaacagaagaactgaaaaagcgtttaccttcacttggaaagaacacagaatcattaggggagctttggctgggactgcttcgtttctatactgaagagtttgatttcaaggaatatgtaattagcattcggcagaaaaagctgttgacaacttttgagaagcagtggacttccaagtgcattgcaattgaagacccttttgacttgaatcataaccttggtgctggagtttccagaaaaatgaccaatttcatcatgaaagcatttatcaatggaaggaaactttttggtacccctttttatccactcattggcagagaagctgagtacttctttgattccagagtattaacagatggagaactggctcccaatgatagatgttgccgtgtgtgtggaaaaataggccactacatgaaagactgccctaaaaggaaaagcagtttactgtttagactaaagaagaaagacagtgaagaagagaaggaagggaatgaagaagagaaagattcccgagatgttcttgacccccgagacctccacgatactcgagactttagagacccgagagacctcagatgttttatatgtggagatgctggacatgtacgaagggagtgcccagaggtcaagctggcccgtcagaggaatagcagtgtggcagcagcccagctggtccgcaaccttgtaaatgctcaacaggtggctggttcagctcagcaacagggtgatcagtccataaggactagacagtcatcagaatgttctgaatcaccatcttattctcctcagcctcagccatttccacagaactcttcccagtcagctgctattactcagccttcatctcagccaggatcccaacctaagcttggcccacctcagcagggagcccaacctccccatcaggtccagatgccactgtataactttccccagtcaccaccagctcagtattctcccatgcacaatatgggattgttgccaatgcaccctctccagatccctgccccgtcctggcccatccatggcccagtgatccactctgcaccaggcagtgcccccagcaatattggcctaaatgatcccagcatcatctttgcacagcctgctgccagacctgtggcaatccctaacacgtctcacgatggacactggccccgtactgtggctccaaattccctggtaaacagtggtgcagtggggaattcagagccaggctttcgaggactgactcctccaattccttgggaacatgcaccgcgtccccatttcccccttgtcccagcttcgtggccttatggtttgcatcaaaacttcatgcatcagggaaatgcccgattccagcccaacaaacctttctatactcaagacagatgtgccacccgtcggtgtagagagcgttgtccccacccaccaagaggaaacgtgtcggagtaatgcgagtccattttctttcagctggtctaccgatgcacagcaaccagccaatcctgctgtctcaagggtatccgtacctcaatgtcagttacattcagcagaaaaagtgacatttaatggaaagcaaaacaaatcaggtcctgatttaaaattttaacacgtttagatagcttatttaaattctaagactgtttttacagactgtattatttgtatataaatatgaactatagtttttactagtatcaccaaattgagtgatacaaatttcatctattttattaccctatttttaagggaattttatgttttgtttaaccttgatgaattgtataaagagagaatttaaaaaattacattctttattttctattagctgtattcatactttggttgcttcagactttatatattgttcttaaaagttaggaaagaatttcatgtgttttaaattgtcacttctattctttacagaaccttgtagtgccaaaaactttttaaaaggtaaaaaaataaaataaaattacaacatga

SEQ ID NO: 333417 - DNA, 7415 bp, Homo sapiens
tcccccccacaatgcagttcgcggcgcggcggacatggcggtggagtcctgagctagtcgtgtcccggcctccagcggcggcagcggcgacggcggcggcagcaggaggcggagggagagcaggagccactgagatgaggaggcgtcgcgcgcgcctgtagctcgcgggcctcgcagtttgcttgcctaaactggacttgaagcaatttaaactactggagatctgccattttataatatcacaattggaaagaaacagattttcaaataatggaagagtctaaaaccttaaaaagtgaaaatcatgaaccaaagaagaatgttatttgtgaagaaagcaaagcagttcaagttataggtaatcaaacattgaaagctagaaatgataaatccgtaaaagaaattgagaacagctctccaaataggaatagtagtaaaaaaataagcaaaatgatatttgtatagaaaaaacagaagttaaatcatgtaaagtaaatgctgccaaccttccaggtcctaaagatttggggttagtccttcgagatcaaagtcattgcaaagcaaaaaaatttcctaattcaccggtgaaagccgaaaaggcaaccatttcacaggcaaaatcagaaaaggcaaccagtttacaggcaaaagcagaaaaatcaccaaagtcacctaattcagtgaaagcagaaaaagcatccagttatcagatgaagtcagaaaaagtaccaagttcaccagcagaagcagaaaagggacccagtttactgttgaaagacatgagacagaagacagaattacaacagattggaaaaaaaattccaagctcctttacttctgtggacaaagtgaatattgaagctgtagggggagaaaaatgtgctctgcaaaactcaccacgatctcagaagcaacagacatgtacagataatactggtgattctgatgatagtgcttcaggaattgaagacgtatcggacgatttaagtaaaatgaagaatgatgaatctaataaagaaaattcttcagagatggactacttagaaaatgccactgtgatagatgaatctgcattgacacctgagcagaggctggggttgaaacaagcagaagaacgcttagaaagagatcacatctttcgacttgaaaaacgatcaccagaatataccaattgtcggtatctatgcaaactttgcttaattcacattgaaaatatccagggggctcataaacatataaaggagaaacgacataagaaaaatattttgaatgttcacttaggttgtatggctcatctctgactagatttgctctgaaaagtagtgatgttaatatagatataaaatttcctcccaagatgaatcatccagatcttctgataaaagtacttgggattttaaagaaaaatgtattatatgtagatgtggaatctgattttcacgctaaagttcctgttgtggtgtgcagagatcgaaaaagtggtttactttgtagagtgagtgcaggaaacgatatggcatgtctcactactgatttacttactgcccttggcaaaatagaacctgtctttattcccttggtgttagcctttcgctactgggctaagttgtgctatattgactcccaaactgatggtggaatcccttcttactgttttgctttaatggtgatgttttttctacaacagagaaaaccccctcttcttccttgcttacttggaagttggattgaaggctttgacccaaaaagaatggatgactttcagctgaagggcatagtagaagagaagtttgtgaagtgggaatgtaattcaagtagtgcaactgagaaaaactcaattgctgaggaaaacaaagctaaggcagaccaaccaaaagatgataccaagaagacagaaacagacaaccaaagtaatgccatgaaggaaaaacatggcaaatctcctttagcattggaaacaccaaatcgggtatccttgggacagttatggttagagctgcttaaattctacacactggattttgctttggaggaatatgtcatatgtgtacggatacaagatattttaacaagagaaaataaaaactggcctaaaaggcgaatagccattgaagatccattttcagtcaagaggaatgttgcacggagcttaaacagccagctggtttacgaatatgttgtggagagatttagggcagcttatcggtattttgcctgtcctcagacgaagggtggaaataagtctacagtggatttcaagaaaagagagaaggggaaaataagcaataagaaaccagtcaagtcgaacaatatggcaaccaatggttgtattctgcttggggaaaccacagaaaaaataaatgcagaaagagagcaacctgttcaatgtgatgaaatggactgtacatcacagagatgtattattgacaacaacaatttgttggtaaatgaactagattttgctgaccacggacaggactcttcatctctttctaccagcaaaagcagtgaaatagagccaaaattagataagaaacaagatgatttagcgccttcagaaacttgtttaaaaaaagagctcagccaatgtaattgcattgatttgtctaagtcgcctgacccagataaatctactggaacagactgcaggtcaaatttagaaacagagagttcacatcagagtgtgtgcaccgacacatctgctacctcttgcaactgcaaagctacagaagatgcttctgaccttaatgatgatgataacctccccacccaggaattatattatgtgtttgataagtttattttaacctctggcaagccaccaacgatagtatgcagcatctgcaaaaaggatggccattcaaagaatgattgcccagaggattttaggaaaattgatttaaaacctctaccaccaatgacaaaccgatttcgggaaatacttgatttagtatgtaaaagatgttttgatgagttatcaccaccttgttctgaacaacacaacagggagcaaattttaattggcttggaaaagtttattcaaaaagaatatgatgaaaaggcaaggttgtgcttatttggctcttctaagaatggatttggatttcgtgatagtgatctggatatttgtatgaccctggaaggccatgaaaatgcagaggccttaatagtgggaaggagattgtccaagctccagggaagaaaaagactgattggacagggaagaagtgtcccaggccttctcaacagcaactagcaaaggagggtatccttgtagatgttcagtcctttaccagcctagctattgttatttatgtttcaaaatgcgggactgtttgcaagattggggtgaggcccagcttctggcatctgtagtggtgtcagtatcgcctctgttacattataaaagaattcagcagaatagtgtgcttttctaaaatcattcttttgaacggtggttttgaaattgttagacccggagtaaagatggcagtgatgacttaacttctggccataagaagttgcttctggtgtcttaacatcttgttttataaagaaactgaaaagttgcaagtattttatttgttctcctttacttaaattctgcttagagccacctacttggaaagtggctgcccttctccattctgaagagtaagaattgagggaataggaaatgatttttatacccaggaaagaggttagagttttagatatcttctatgtaaaatttattaaacttctaatcactaagggtttgtatattatatataatctgtgccattcctactgggaagttgaaacaatgaaaataataaatcattttctttcagatgagccataattgaaacttttaagattagcataattgtatcgttgaataataaagagaaaaattacctcctttgttaattttatcatatgtgaattagtaactaatggtttctttgaaatcctttggtttagctgcaatggctcctgctctcatgtagctaaaaagaacatgttggaaaaatgcaaatgactttataactcttgggattgatgtttatacccttcagctatttccagttaatttttaatgccataatcattatgtattatgattatcattaccataccaactctgctgtctctggtttttacaagagtaacacatttaaatttacagaggtaagaatttccttggagaaataggtgctggtgataataggagtatctttcttttccatatcaacataattataataaataactcacagatttaaaggcttattttgtgccaggcattctgctgagtgctttacatacatgtctcatgtaatcctcccaacagctctgcaggacaggagtttatgattatcttgattttatagaatagtaatgtaatgctcagagaggttaaacatctggttagtcacacagctaatcaatacttagtttaagatttgagactgggtgcagtggctcacgcctgtaatcccagcactttgggaggctgaggcgggcggatcacgaggtcaggagatcgagaccatcctggtgaacacggtgaaacctggtctctactaaaaatacaaaaaaattagccgggcacggtggcgggtgcctgtagtcccagcaactcgggaggctgagacaggagaatggcatgaacccgggaggcagagcttgcagtgagccgagatagcaccactgcactccggcctgggcgaaagagcaagactccgtctcaaaaaaagaaaaaaaaaaaaaaaaaaaaagatttgaatccaggtttgtctcaatttggagcctatgtacttaatcagtatattgttttgccctcaccaaactcacctctagttgtttattcacttattgaaaaccatattcttctcctgtctttgtgcttctcaaactttaatctgcatgtgaattaccttgggatcctgttaaaatgcagattatgatttagtagactggggagggtcctcagattctgcatttctatcaagtttccagattatgctgatactgtaggtctatgaatcacttacttggagtagcaaggttattatagagctttatggctggaaattgtaaatgctactattaaatgcttagattaaagtagaatttgcacaaggtgaaattgagtcaaacttatttatttgatttgttttttagaaattaaattgtaaggaaataattgaaaatttggcaaaaattcttaagagacatccaggtttaagaaacattttgcctataactactgccaaagtgcctatagtaaaatttgaacacaggcgaagtgggttagaaggcgatatcagtttatataatacgttggctcaacataacacaagaatgctagctacttatgcagctattgatcctagagtgcagtatttgggatatactatgaaagtgtttgctaagcgatgtgacattggggatgcttccaggggaagtttatcttcatatgcatatatccttatggtgctgtactttctgcagcagagaaagccacctgttatcccagttctacaagagatctttgatggaaaacagattccacagagaatggttgatggatggaatgctttcttctttgataaaacagaagaactgaaaaagcgtttaccttcacttggaaagaacacagaatcattaggggagctttggctgggactgcttcgtttctatactgaagagtttgatttcaaggaatatgtaattagcattcggcagaaaaagctgttgacaacttttgagaagcagtggacttccaagtgcattgcaattgaagacccttttgacttgaatcataaccttggtgctggagtttccagaaaaatgaccaatttcatcatgaaagcatttatcaatggaaggaaactttttggtacccctttttatccactcattggcagagaagctgagtacttctttgattccagagtattaacagatggagaactggctcccaatgatagatgttgccgtgtgtgtggaaaaataggccactacatgaaagactgccctaaaaggaaaagcagtttactgtttagactaaagaagaaagacagtgaagaagagaaggaagggaatgaagaagagaaagattcccgagatgttcttgacccccgagacctccacgatactcgagactttagagacccgagagacctcagatgttttatatgtggagatgctggacatgtacgaagggagtgcccagaggtcaagctggcccgtcagaggaatagcagtgtggcagcagcccagctggtccgcaaccttgtaaatgctcaacaggtggctggttcagctcagcaacagggtgatcagtccataaggactagacagtcatcagaatgttctgaatcaccatcttattctcctcagcctcagccatttccacagaactcttcccagtcagctgctattactcagccttcatctcagccaggatcccaacctaagcttggcccacctcagcagggagcccaacctccccatcaggtccagatgccactgtataactttccccagtcaccaccagctcagtattctcccatgcacaatatgggattgttgccaatgcaccctctccagatccctgccccgtcctggcccatccatggcccagtgatccactctgcaccaggcagtgcccccagcaatattggcctaaatgatcccagcatcatctttgcacagcctgctgccagacctgtggcaatccctaacacgtctcacgatggacactggccccgtactgtggctccaaattccctggtaaacagtggtgcagtggggaattcagagccaggctttcgaggactgactcctccaattccttgggaacatgcaccgcgtccccatttcccccttgtcccagcttcgtggccttatggtttgcatcaaaacttcatgcatcagggaaatgcccgattccagcccaacaaacctttctatactcaagacagatgtgccacccgtcggtgtagagagcgttgtccccacccaccaagaggaaacgtgtcggagtaatgcgagtccattttctttcagctggtctaccgatgcacagcaaccagccaatcctgctgtctcaaggatggagtcttgctctgtcgcccaggctggaatacagcggcgtgatctcggctcactacaatctccgcctcctggttcaagggattctcctgcctcagcctcctgagtagctgggattacaggtaagaaagctgcaattgtggaggtagaatgcagcagaagaaagacagctaaaatatggagacctgagttcaagttcccatgctaccatttatggctgtgggaacatcatacatattgatcaactttcaaatatatcatcagtaaaactagaataaaacctatttacctcacaggattaatctaagaat

SEQ ID NO: 333418 - DNA, 2898 bp, Homo sapiens
  misc_feature (3)..(7): n is a, c, g, or t
  misc_feature (41)..(41): n is a, c, g, or t
ttnnnnnagactaacggtgggcaatccccctcttctggggnaccagcataccgctttattcacttattgaaaaccatattcttctcctgtctttgtgcttctcaaactttaatctgcatgtgaattaccttgggatcctgttaaaatgcagattatgatttagtagactggggagggtcctcagattctgcatttctatcaagtttccagattatgctgatactgtaggtctatgaatcacttacttggagtagcaaggttattatagagctttatggctggaaattgtaaatgctactattaaatgcttagattaaagtagaatttgcacaaggtgaaattgagtcaaacttatttatttgatttgttttttagaaattaaattgtaaggaaataattgaaaatttggcaaaaattcttaagagacatccaggtttaagaaacattttgcctataactactgccaaagtgcctatagtaaaatttgaacacaggcgaagtgggttagaaggcgatatcagtttatataatacgttggctcaacataacacaagaatgctagctacttatgcagctattgatcctagagtgcagtatttgggatatactatgaaagtgtttgctaagcgatgtgacattggggatgcttccaggggaagtttatcttcatatgcatatatccttatggtgctgtactttctgcagcagagaaagccacctgttatcccagttctacaagagatctttgatggaaaacagattccacagagaatggttgatggatggaatgctttcttctttgataaaacagaagaactgaaaaagcgtttaccttcacttggaaagaacacagaatcattaggggagctttggctgggactgcttcgtttctatactgaagagtttgatttcaaggaatatgtaattagcattcggcagaaaaagctgttgacaacttttgagaagcagtggacttccaagtgcattgcaattgaagacccttttgacttgaatcataaccttggtgctggagtttccagaaaaatgaccaatttcatcatgaaagcatttatcaatggaaggaaactttttggtacccctttttatccactcattggcagagaagctgagtacttctttgattccagagtattaacagatggagaactggctcccaatgatagatgttgccgtgtgtgtggaaaaataggccactacatgaaagactgccctaaaaggaaaagcagtttactgtttagactaaagaagaaagacagtgaagaagagaaggaagggaatgaagaagagaaagattcccgagatgttcttgacccccgagacctccacgatactcgagactttagagacccgagagacctcagatgttttatatgtggagatgctggacatgtacgaagggagtgcccagaggtcaagctggcccgtcagaggaatagcagtgtggcagcagcccagctggtccgcaaccttgtaaatgctcaacaggtggctggttcagctcagcaacagggtgatcagtccataaggactagacagtcatcagaatgttctgaatcaccatcttattctcctcagcctcagccatttccacagaactcttcccagtcagctgctattactcagccttcatctcagccaggatcccaacctaagcttggcccacctcagcagggagcccaacctccccatcaggtccagatgccactgtataactttccccagtcaccaccagctcagtattctcccatgcacaatatgggattgttgccaatgcaccctctccagatccctgccccgtcctggcccatccatggcccagtgatccactctgcaccaggcagtgcccccagcaatattggcctaaatgatcccagcatcatctttgcacagcctgctgccagacctgtggcaatccctaacacgtctcacgatggacactggccccgtactgtggctccaaattccctggtaaacagtggtgcagtggggaattcagagccaggctttcgaggactgactcctccaattccttgggaacatgcaccgcgtccccatttcccccttgtcccagcttcgtggccttatggtttgcatcaaaacttcatgcatcagggaaatgcccgattccagcccaacaaacctttctatactcaagacagatgtgccacccgtcggtgtagagagcgttgtccccacccaccaagaggaaacgtgtcggagtaatgcgagtccattttctttcagctggtctaccgatgcacagcaaccagccaatcctgctgtctcaagggtatccgtacctcaatgtcagttacattcagcagaaaaagtgacatttaatggaaagcaaaacaaatcaggtcctgatttaaaattttaacacgtttagatagcttatttaaattctaagactgtttttacagactgtattatttgtatataaatatgaactatagtttttactagtatcaccaaattgagtgatacaaatttcatctattttattaccctatttttaagggaattttatgttttgtttaaccttgatgaattgtataaagagagaatttaaaaaattacattctttattttctattagctgtattcatactttggttgcttcagactttatatattgttcttaaaagttaggaaagaatttcatgtgttttaaattgtcacttctattctttacagaaccttgtagtgccaaaaactttttaaaaggtaaaaaaataaaataaaattacaacatgaagattcagattttttttcttttccatacttgtatattgaacattcaaacttgaatggaaagttgattttgtctgtatttgaagtacttctattttaagttaataaatctttttgacaaga

SEQ ID NO: 333419 - DNA, 5693 bp, Homo sapiens
tcccccccacaatgcagttcgcggcgcggcggacatggcggtggagtcctgagctagtcgtgtcccggcctccagcggcggcagcggcgacggcggcggcagcaggaggcggagggagagcaggagccactgagatgaggaggcgtcgcgcgcgcctgtagctcgcgggcctcgcagtttgcttgcctaaactggacttgaagcaatttaaactactggagatctgccattttataatatcacaattggaaagaaacagattttcaaataatggaagagtctaaaaccttaaaaagtgaaaatcatgaaccaaagaagaatgttatttgtgaagaaagcaaagcagttcaagttataggtaatcaaacattgaaagctagaaatgataaatccgtaaaagaaattgagaacagctctccaaataggaatagtagtaaaaaaataagcaaaatgatatttgtatagaaaaaacagaagttaaatcatgtaaagtaaatgctgccaaccttccaggtcctaaagatttggggttagtccttcgagatcaaagtcattgcaaagcaaaaaaatttcctaattcaccggtgaaagccgaaaaggcaaccatttcacaggcaaaatcagaaaaggcaaccagtttacaggcaaaagcagaaaaatcaccaaagtcacctaattcagtgaaagcagaaaaagcatccagttatcagatgaagtcagaaaaagtaccaagttcaccagcagaagcagaaaagggacccagtttactgttgaaagacatgagacagaagacagaattacaacagattggaaaaaaaattccaagctcctttacttctgtggacaaagtgaatattgaagctgtagggggagaaaaatgtgctctgcaaaactcaccacgatctcagaagcaacagacatgtacagataatactggtgattctgatgatagtgcttcaggaattgaagacgtatcggacgatttaagtaaaatgaagaatgatgaatctaataaagaaaattcttcagagatggactacttagaaaatgccactgtgatagatgaatctgcattgacacctgagcagaggctggggttgaaacaagcagaagaacgcttagaaagagatcacatctttcgacttgaaaaacgatcaccagaatataccaattgtcggtatctatgcaaactttgcttaattcacattgaaaatatccagggggctcataaacatataaaggagaaacgacataagaaaaatattttgaatgttcacttaggttgtatggctcatctctgactagatttgctctgaaaagtagtgatgttaatatagatataaaatttcctcccaagatgaatcatccagatcttctgataaaagtacttgggattttaaagaaaaatgtattatatgtagatgtggaatctgattttcacgctaaagttcctgttgtggtgtgcagagatcgaaaaagtggtttactttgtagagtgagtgcaggaaacgatatggcatgtctcactactgatttacttactgcccttggcaaaatagaacctgtctttattcccttggtgttagcctttcgctactgggctaagttgtgctatattgactcccaaactgatggtggaatcccttcttactgttttgctttaatggtgatgttttttctacaacagagaaaaccccctcttcttccttgcttacttggaagttggattgaaggctttgacccaaaaagaatggatgactttcagctgaagggcatagtagaagagaagtttgtgaagtgggaatgtaattcaagtagtgcaactgagaaaaactcaattgctgaggaaaacaaagctaaggcagaccaaccaaaagatgataccaagaagacagaaacagacaaccaaagtaatgccatgaaggaaaaacatggcaaatctcctttagcattggaaacaccaaatcgggtatccttgggacagttatggttagagctgcttaaattctacacactggattttgctttggaggaatatgtcatatgtgtacggatacaagatattttaacaagagaaaataaaaactggcctaaaaggcgaatagccattgaagatccattttcagtcaagaggaatgttgcacggagcttaaacagccagctggtttacgaatatgttgtggagagatttagggcagcttatcggtattttgcctgtcctcagacgaagggtggaaataagtctacagtggatttcaagaaaagagagaaggggaaaataagcaataagaaaccagtcaagtcgaacaatatggcaaccaatggttgtattctgcttggggaaaccacagaaaaaataaatgcagaaagagagcaacctgttcaatgtgatgaaatggactgtacatcacagagatgtattattgacaacaacaatttgttggtaaatgaactagattttgctgaccacggacaggactcttcatctctttctaccagcaaaagcagtgaaatagagccaaaattagataagaaacaagatgatttagcgccttcagaaacttgtttaaaaaaagagctcagccaatgtaattgcattgatttgtctaagtcgcctgacccagataaatctactggaacagactgcaggtcaaatttagaaacagagagttcacatcagagtgtgtgcaccgacacatctgctacctcttgcaactgcaaagctacagaagatgcttctgaccttaatgatgatgataacctccccacccaggaattatattatgtgtttgataagtttattttaacctctggcaagccaccaacgatagtatgcagcatctgcaaaaaggatggccattcaaagaatgattgcccagaggattttaggaaaattgatttaaaacctctaccaccaatgacaaaccgatttcgggaaatacttgatttagtatgtaaaagatgttttgatgagttatcaccaccttgttctgaacaacacaacagggagcaaattttaattggcttggaaaagtttattcaaaaagaatatgatgaaaaggcaaggttgtgcttatttggctcttctaagaatggatttggatttcgtgatagtgatctggatatttgtatgaccctggaaggccatgaaaatgcagaggccttaatagtgggaaggagattgtccaagctccagggaagaaaaagactgattggacagggaagaagtgtcccaggccttctcaacagcaactagcaaaggagggtatccttgtagatgttcagtcctttaccagcctagctattgttatttatgtttcaaaatgcgggactgtttgcaagattggggtgaggcccagcttctggcatctgtagtggtgtcagtatcgcctctgttacattataaaagaattcagcagaatagtgtgcttttctaaaatcattcttttgaacggtggttttgaaattgttagacccggagtaaagatggcagtgatgacttaacttctggccataagaagttgcttctggtgtcttaacatcttgttttataaagaaactgaaaagttgcaagtattttatttgttctcctttacttaaattctgcttagagccacctacttggaaagtggctgcccttctccattctgaagagtaagaattgagggaataggaaatgatttttatacccaggaaagaggttagagttttagatatcttctatgtaaaatttattaaacttctaatcactaagggtttgtatattatatataatctgtgccattcctactgggaagttgaaacaatgaaaataataaatcattttctttcagatgagccataattgaaacttttaagattagcataattgtatcgttgaataataaagagaaaaattacctcctttgttaattttatcatatgtgaattagtaactaatggtttctttgaaatcctttggtttagctgcaatggctcctgctctcatgtagctaaaaagaacatgttggaaaaatgcaaatgactttataactcttgggattgatgtttatacccttcagctatttccagttaatttttaatgccataatcattatgtattatgattatcattaccataccaactctgctgtctctggtttttacaagagtaacacatttaaatttacagaggtaagaatttccttggagaaataggtgctggtgataataggagtatctttcttttccatatcaacataattataataaataactcacagatttaaaggcttattttgtgccaggcattctgctgagtgctttacatacatgtctcatgtaatcctcccaacagctctgcaggacaggagtttatgattatcttgattttatagaatagtaatgtaatgctcagagaggttaaacatctggttagtcacacagctaatcaatacttagtttaagatttgagactgggtgcagtggctcacgcctgtaatcccagcactttgggaggctgaggcgggcggatcacgaggtcaggagatcgagaccatcctggtgaacacggtgaaacctggtctctactaaaaatacaaaaaaattagccgggcacggtggcgggtgcctgtagtcccagcaactcgggaggctgagacaggagaatggcatgaacccgggaggcagagcttgcagtgagccgagatagcaccactgcactccggcctgggcgaaagagcaagactccgtctcaaaaaaagaaaaaaaaaaaaaaaaaaaaagatttgaatccaggtttgtctcaatttggagcctatgtacttaatcagtatattgttttgccctcaccaaactcacctctagttgtttattcacttattgaaaaccatattcttctcctgtctttgtgcttctcaaactttaatctgcatgtgaattaccttgggatcctgttaaaatgcagattatgatttagtagactggggagggtcctcagattctgcatttctatcaagtttccagattatgctgatactgtaggtctatgaatcacttacttggagtagcaaggttattatagagctttatggctggaaattgtaaatgctactattaaatgcttagattaaagtagaatttgcacaaggtgaaattgagtcaaacttatttatttgatttgttttttagaaattaaattgtaaggaaataattgaaaatttggcaaaaattcttaagagacatccaggtatgaattttgaatcttatctgtaaaacaaaataaatttttttagcatatatgaaaattatttaacctactgaagtcttttttttttaaattaggtttaagaaacattttgcctataactactgccaaagtgcctatagtaaaatttgaacacaggcgaagtgggttagaaggcgatatcagtttatataatacgttggctcaacataacacaagaatgctagctacttatgcagctattgatcctagagtgcagtatttgggatatactatgaaagtgtttgctaaggtatttatgaaaaaattaatgatctgctttgttcatgataattaaaatgaaacataactaatgtcagatttgtgaaaaattttgtctcagttttgtttatctgagcttttaaaaaagaaactttcagtattatatagcttgaatagatacctatcagagtagggtggctctgtcttt

SEQ ID NO: 333420 - DNA, 658 bp, Homo sapiens
gcctacgggcacaagtgcacaaaagtcatcccaaaaaggtgccaatctggtggaaacccaggacacttggaaaacgcgattaccatcagtgaccaggaggaccaccgttatgaaggaaagagcaaggagcccctgcaggacaacgtgatcgccacctacgaggagcacgaggacagcgtctatgccgtggactggtcctcggctgacccgtggctgtttgcctccctgagctatgacgggaggctcgtgatcaacagggtgcccagggccctgaagtaccacatcctgctatgactcccgggcctgggttatccaggtcccattgagtggttttcctcttggcagattctcaaacagtcgcagctctttggaggtgactcgtgttccaggtggatccctctctgggagagccgctgttcccttcctgtagcagcagcatttatgaatggggtgaatggggctattgtcgacggcacagctaatgcccgaacccagcccctgtcggcagagacagagccccacattattatgtgaataacaatgttttctgttttaagggtgtcaggagtttcgctttttaaaaaaatgtctgttcctgcagtagtaactcttctttctcttgagagtaaaaaatgaaataaaataaatccacgctgca

SEQ ID NO: 333421 - DNA, 627 bp, Homo sapiens
  misc_feature (2)..(2): n is a, c, g, or t
  misc_feature (6)..(6): n is a, c, g, or t
  misc_feature (8)..(8): n is a, c, g, or t
  misc_feature (509)..(509): n is a, c, g, or t
  misc_feature (521)..(521): n is a, c, g, or t
  misc_feature (529)..(529): n is a, c, g, or t
  misc_feature (555)..(555): n is a, c, g, or t
  misc_feature (617)..(617): n is a, c, g, or t
tnggangnggcactacggaagctgttctgggccagaaagacttccagtttggagtcgtttgctgcggggagggaatgaatgggcgctgggaacacgcccgcgaggtggggacgcgccggccgtagcgaggtccttagcgtgtgagtggccggggtcgggtcgcttccccgcagcatggaggacgatgcaccagtgatctacgggctggagttccaggcacgtgccttaacacctcaaactgcagaaacagatgccattcggtttttggttgggacgcagtctcttaaatatgataatcagatccatatcatagattttgacgatgaaaacaacattataaataaaaatgtcctcctccatcaagcgggtgaaatctggcatattagcgctagccctgcagacagaggtgtgctgacgacctgctacaacagaactttcagacagcaaagttctcttgtacttgttgtcagcctgttgttgtgtagtgtttgcccgtaaggaaacttggnaattctagagcnagcccacngtagttcccccttgtattgtatttcnattcccagccacttgccaccagtaccccttgtgtagcttgcttcttgttctacctttgtacnaaccaccaat

SEQ ID NO: 333422 - DNA, 843 bp, Homo sapiens
ataacgatgcagccaacatgctcagcctttgtgcatgaaatcctaggcgagcagagaaacgagctggggatcttcttgcaggctcacaactgggccccaccctcttttaggcagggggaggttttagccctaacaccagccccagagggccttgctgaggccttcatggtcagctcgctggcttggggtggtctgattaaatgccaggcgaaggccgtgtgggcctcgagacggagggagggaagagggcgtgcactggagacagcatctgaccaagtgaatgtgtttgtccctttgttattccggaaccgctcaggtggacctgacttgttttgtcgctttctttggggaaagccagatgtttgagttgttttgtattgttttccttcaagttcgagttgattatctctaatcacatacttgcaagcaaacgctctttaatagaggcctattaatatgctttctattttttgctgtgctcagttttatagatttccccaagtaaggttcatttttgccatttaaggaaaggaaacaaagacagagcttcctaattatcctcagtaattattttcaataatatccttgagtatacgatatcctctcgcgttttctgaacagacttcacattcttcttcttttcttcttcctttggaaaacatcgtgacactcccagctggccagctcagcgtccctggaagggaagggacaactgaagttcacctcaggacggtggagcccacatcataactgcacccaggtggccacagcgaacgacaccaccctccgtggctgggacacccggagcatgaggtcagtgagcccacccggcgcaggccccac

SEQ ID NO: 333423 - DNA, 1783 bp, Homo sapiens
  misc_feature (2)..(2): n is a, c, g, or t
  misc_feature (6)..(6): n is a, c, g, or t
  misc_feature (8)..(8): n is a, c, g, or t
tnggangnggcactacggaagctgttctgggccagaaagacttccagtttggagtcgtttgctgcggggagggaatgaatgggcgctgggaacacgcccgcgaggtggggacgcgccggccgtagcgaggtccttagcgtgtgagtggccggggtcgggtcgcttccccgcagcatggaggacgatgcaccagtgatctacgggctggagttccaggcacgtgccttaacacctcaaactgcagaaacagatgccattcggtttttggttgggacgcagtctcttaaatatgataatcagatccatatcatagattttgacgatgaaaacaacattataaataaaaatgtcctcctccatcaagcgggtgaaatctggcatattagcgctagccctgcagacagaggtgtgctgacgacctgctacaacagaacattttgttgtgtgctgtctctggattcctttggtgctcttgggaagtcagctgcccaactgttcatagcactggcaacctcttcagacagcaaagtcctgacatgtgcagccgtgtggaggatgccgaaggaattggaatcaggcagccacgagtcccctgatgattcatccagcactgcacagaccctggagctgctctgtcaccttgacaacacagcccatggcaacatggcctgtgtcgtgtgggagccaatgggagatgggaagaaaatcatttccttggctgataaccatatcctgctgtgggatttacaggaaagctcgagccaggctgtgctggccagctcagcgtccctggaagggaagggacaactgaagttcacctcaggacggtggagcccacatcataactgcacccaggtggccacagcgaacgacaccaccctccgtggctgggacacccggagcatgagccagatctactgcatagagaatgcccacggacagctggtgcgggaccttgactttaatcccaataagcagtactacttggccagctgcggagacgactgtaaggtgaagttctgggacacccgaaatgtcaccgaacccgtgaagaccctggaggagcactcccactgggtgtggaacgtccgctacaaccactctcatgaccagctggtcctcacgggcagcagtgacagcagagtcatcctttccaacatggtgtccatctcgtcggagcccttcggccacttggtagacgacgatgacatcagtgaccaggaggaccaccgttctgaagagaagagcaaggagcccctgcaggacaacgtgatcgccacctacgaggagcacgaggacagcgtctatgccgtggactggtcctcggctgacccgtggctgtttgcctccctgagctatgacgggaggctcgtgatcaacagggtgcccagggccctgaagtaccacatcctgctatgactcccgggcctgggttatccaggtcccattgagtggttttcctcttggcagattctcaaacagtcgcagctctttggaggtgactcgtgttccaggtggatccctctctgggagagccgctgttcccttcctgtagcagcagcatttatgaatggggtgaatggggctattgtcgacggcacagctaatgcccgaacccagcccctgtcggcagagacagagccccacattattatgtgaataacaatgttttctgttttaagggtgtcaggagtttcgctttttaaaaaaatgtctgttcctgcagtagtaactcttctttctcttgagagtaaaaaatgaaataaaataaatccacgctgca

SEQ ID NO: 333424 - DNA, 1545 bp, Homo sapiens
  misc_feature (2)..(2): n is a, c, g, or t
  misc_feature (6)..(6): n is a, c, g, or t
  misc_feature (8)..(8): n is a, c, g, or t
tnggangnggcactacggaagctgttctgggccagaaagacttccagtttggagtcgtttgctgcggggagggaatgaatgggcgctgggaacacgcccgcgaggtggggacgcgccggccgtagcgaggtccttagcgtgtgagtggccggggtcgggtcgcttccccgcagcatggaggacgatgcaccagtgatctacgggctggagttccaggcacgtgccttaacacctcaaactgcagaaacagatgccattcggtttttggttgggacgcagtctcttaaatatgataatcagatccatatcatagattttgacgatgaaaacaacattataaataaaaatgtcctcctccatcaagcgggtgaaatctggcatattagcgctagccctgcagacagaggtgtgctgacgacctgctacaacagaatgtcgtgtgggagccaatgggagatgggaagaaaatcatttccttggctgataaccatatcctgctgtgggatttacaggaaagctcgagccaggctgtgctggccagctcagcgtccctggaagggaagggacaactgaagttcacctcaggacggtggagcccacatcataactgcacccaggtggccacagcgaacgacaccaccctccgtggctgggacacccggagcatgagccagatctactgcatagagaatgcccacggacagctggtgcgggaccttgactttaatcccaataagcagtactacttggccagctgcggagacgactgtaaggtgaagttctgggacacccgaaatgtcaccgaacccgtgaagaccctggaggagcactcccactgggtgtggaacgtccgctacaaccactctcatgaccagctggtcctcacgggcagcagtgacagcagagtcatcctttccaacatggtgtccatctcgtcggagcccttcggccacttggtagacgacgatgacatcagtgaccaggaggaccaccgttctgaagagaagagcaaggagcccctgcaggacaacgtgatcgccacctacgaggagcacgaggacagcgtctatgccgtggactggtcctcggctgacccgtggctgtttgcctccctgagctatgacgggaggctcgtgatcaacagggtgcccagggccctgaagtaccacatcctgctatgactcccgggcctgggttatccaggtcccattgagtggttttcctcttggcagattctcaaacagtcgcagctctttggaggtgactcgtgttccaggtggatccctctctgggagagccgctgttcccttcctgtagcagcagcatttatgaatggggtgaatggggctattgtcgacggcacagctaatgcccgaacccagcccctgtcggcagagacagagccccacattattatgtgaataacaatgttttctgttttaagggtgtcaggagtttcgctttttaaaaaaatgtctgttcctgcagtagtaactcttctttctcttgagagtaaaaaatgaaataaaataaatccacgctgca

SEQ ID NO: 333425 - DNA, 1485 bp, Homo sapiens
  misc_feature (2)..(2): n is a, c, g, or t
  misc_feature (6)..(6): n is a, c, g, or t
  misc_feature (8)..(8): n is a, c, g, or t
tnggangnggcactacggaagctgttctgggccagaaagacttccagtttggagtcgtttgctgcggggagggaatgaatgggcgctgggaacacgcccgcgaggtggggacgcgccggccgtagcgaggtccttagcgtgtgagtggccggggtcgggtcgcttccccgcagcatggaggacgatgcaccagtgatctacgggctggagttccagcttcagacagcaaagtcctgacatgtgcagccgtgtggaggatgccgaaggaattggaatcaggcagccacgagtcccctgatgattcatccagcactgcacagaccctggagctgctctgtcaccttgacaacacagcccatggcaacatggcctgtgtcgtgtgggagccaatgggagatgggaagaaaatcatttccttggctgataaccatatcctgctgtgggatttacaggaaagctcgagccaggctgtgctggccagctcagcgtccctggaagggaagggacaactgaagttcacctcaggacggtggagcccacatcataactgcacccaggtggccacagcgaacgacaccaccctccgtggctgggacacccggagcatgagccagatctactgcatagagaatgcccacggacagctggtgcgggaccttgactttaatcccaataagcagtactacttggccagctgcggagacgactgtaaggtgaagttctgggacacccgaaatgtcaccgaacccgtgaagaccctggaggagcactcccactgggtgtggaacgtccgctacaaccactctcatgaccagctggtcctcacgggcagcagtgacagcagagtcatcctttccaacatggtgtccatctcgtcggagcccttcggccacttggtagacgacgatgacatcagtgaccaggaggaccaccgttctgaagagaagagcaaggagcccctgcaggacaacgtgatcgccacctacgaggagcacgaggacagcgtctatgccgtggactggtcctcggctgacccgtggctgtttgcctccctgagctatgacgggaggctcgtgatcaacagggtgcccagggccctgaagtaccacatcctgctatgactcccgggcctgggttatccaggtcccattgagtggttttcctcttggcagattctcaaacagtcgcagctctttggaggtgactcgtgttccaggtggatccctctctgggagagccgctgttcccttcctgtagcagcagcatttatgaatggggtgaatggggctattgtcgacggcacagctaatgcccgaacccagcccctgtcggcagagacagagccccacattattatgtgaataacaatgttttctgttttaagggtgtcaggagtttcgctttttaaaaaaatgtctgttcctgcagtagtaactcttctttctcttgagagtaaaaaatgaaataaaataaatccacgctgca

SEQ ID NO: 333426 - DNA, 1266 bp, Homo sapiens
ggctgtacggctccgcggaagtacggatcctgattccaattccttcggcatcctccacacggctgcacatgtcccctgatgattcatccagcactgcacagaccctggagctgctctgtcaccttgacaacacagcccatggcaacatggcctgtgtcgtgtgggagccaatgggagatgggaagaaaatcatttccttggctgataaccatatcctgctgtgggatttacaggaaagctcgagccaggctgtgctggccagctcagcgtccctggaagggaagggacaactgaagttcacctcaggacggtggagcccacatcataactgcacccaggtggccacagcgaacgacaccaccctccgtggctgggacacccggagcatgagccagatctactgcatagagaatgcccacggacagctggtgcgggaccttgactttaatcccaataagcagtactacttggccagctgcggagacgactgtaaggtgaagttctgggacacccgaaatgtcaccgaacccgtgaagaccctggaggagcactcccactgggtgtggaacgtccgctacaaccactctcatgaccagctggtcctcacgggcagcagtgacagcagagtcatcctttccaacatggtgtccatctcgtcggagcccttcggccacttggtagacgacgatgacatcagtgaccaggaggaccaccgttctgaagagaagagcaaggagcccctgcaggacaacgtgatcgccacctacgaggagcacgaggacagcgtctatgccgtggactggtcctcggctgacccgtggctgtttgcctccctgagctatgacgggaggctcgtgatcaacagggtgcccagggccctgaagtaccacatcctgctatgactcccgggcctgggttatccaggtcccattgagtggttttcctcttggcagattctcaaacagtcgcagctctttggaggtgactcgtgttccaggtggatccctctctgggagagccgctgttcccttcctgtagcagcagcatttatgaatggggtgaatggggctattgtcgacggcacagctaatgcccgaacccagcccctgtcggcagagacagagccccacattattatgtgaataacaatgttttctgttttaagggtgtcaggagtttcgctttttaaaaaaatgtctgttcctgcagtagtaactcttctttctcttgagagtaaaaaatgaaataaaataaatccacgctgca

SEQ ID NO: 333427 - DNA, 1477 bp, Homo sapiens
ggataacagggttggccacagccggcctgcctccttccccttcacatcctgtcccgaacatgacttctgacctggaagttatcactcactttggtggactcatttatttacacgcccaccttttcctctagaatttgagttcctgaaggcacgtgccttaacacctcaaactgcagaaacagatgccattcggtttttggttgggacgcagtctcttaaatatgataatcagatccatatcatagattttgacgatgaaaacaacattataaataaaaatgtcctcctccatcaagcgggtgaaatctggcatattagcgctagccctgcagacagaggtgtgctgacgacctgctacaacagaatgtcgtgtgggagccaatgggagatgggaagaaaatcatttccttggctgataaccatatcctgctgtgggatttacaggaaagctcgagccaggctgtgctggccagctcagcgtccctggaagggaagggacaactgaagttcacctcaggacggtggagcccacatcataactgcacccaggtggccacagcgaacgacaccaccctccgtggctgggacacccggagcatgagccagatctactgcatagagaatgcccacggacagctggtgcgggaccttgactttaatcccaataagcagtactacttggccagctgcggagacgactgtaaggtgaagttctgggacacccgaaatgtcaccgaacccgtgaagaccctggaggagcactcccactgggtgtggaacgtccgctacaaccactctcatgaccagctggtcctcacgggcagcagtgacagcagagtcatcctttccaacatggtgtccatctcgtcggagcccttcggccacttggtagacgacgatgacatcagtgaccaggaggaccaccgttctgaagagaagagcaaggagcccctgcaggacaacgtgatcgccacctacgaggagcacgaggacagcgtctatgccgtggactggtcctcggctgacccgtggctgtttgcctccctgagctatgacgggaggctcgtgatcaacagggtgcccagggccctgaagtaccacatcctgctatgactcccgggcctgggttatccaggtcccattgagtggttttcctcttggcagattctcaaacagtcgcagctctttggaggtgactcgtgttccaggtggatccctctctgggagagccgctgttcccttcctgtagcagcagcatttatgaatggggtgaatggggctattgtcgacggcacagctaatgcccgaacccagcccctgtcggcagagacagagccccacattattatgtgaataacaatgttttctgttttaagggtgtcaggagtttcgctttttaaaaaaatgtctgttcctgcagtagtaactcttctttctcttgagagtaaaaaatgaaataaaataaatccacgctgca

SEQ ID NO: 333428 - DNA, 1278 bp, Homo sapiens
caaggccttagcccctggccaccccgaatctgtactctatctctgtatgttatttggagaaggttctataaatggaatcacacacagtgtaacctttaataactgatgttctttactcggcttgattccctggaggttgagttgctgcttcattttcaagtttgggttccagccaccatgcgtgctggtcagtggctggttcctctttgctgcggcgggatattccatggcatgacgcaccacggaaaacatcgtgacactcccagctggccagctcagcgtccctggaagggaagggacaactgaagttcacctcaggacggtggagcccacatcataactgcacccaggtggccacagcgaacgacaccaccctccgtggctgggacacccggagcatgagccagatctactgcatagagaatgcccacggacagctggtgcgggaccttgactttaatcccaataagcagtactacttggccagctgcggagacgactgtaaggtgaagttctgggacacccgaaatgtcaccgaacccgtgaagaccctggaggagcactcccactgggtgtggaacgtccgctacaaccactctcatgaccagctggtcctcacgggcagcagtgacagcagagtcatcctttccaacatggtgtccatctcgtcggagcccttcggccacttggtagacgacgatgacatcagtgaccaggaggaccaccgttctgaagagaagagcaaggagcccctgcaggacaacgtgatcgccacctacgaggagcacgaggacagcgtctatgccgtggactggtcctcggctgacccgtggctgtttgcctccctgagctatgacgggaggctcgtgatcaacagggtgcccagggccctgaagtaccacatcctgctatgactcccgggcctgggttatccaggtcccattgagtggttttcctcttggcagattctcaaacagtcgcagctctttggaggtgactcgtgttccaggtggatccctctctgggagagccgctgttcccttcctgtagcagcagcatttatgaatggggtgaatggggctattgtcgacggcacagctaatgcccgaacccagcccctgtcggcagagacagagccccacattattatgtgaataacaatgttttctgttttaagggtgtcaggagtttcgctttttaaaaaaatgtctgttcctgcagtagtaactcttctttctcttgagagtaaaaaatgaaataaaataaatccacgctgca

SEQ ID NO: 333429 - DNA, 1249 bp, Homo sapiens
  misc_feature (2)..(2): n is a, c, g, or t
  misc_feature (6)..(6): n is a, c, g, or t
  misc_feature (8)..(8): n is a, c, g, or t
tnggangnggcactacggaagctgttctgggccagaaagacttccagtttggagtcgtttgctgcggggagggaatgaatgggcgctgggaacacgcccgcgaggtggggacgcgccggccgtagcgaggtccttagcgtgtgagtggccggggtcgggtcgcttccccgcagcatggaggacgatgcaccagtgatctacgggctggagttccaggaaagctcgagccaggctgtgctggccagctcagcgtccctggaagggaagggacaactgaagttcacctcaggacggtggagcccacatcataactgcacccaggtggccacagcgaacgacaccaccctccgtggctgggacacccggagcatgagccagatctactgcatagagaatgcccacggacagctggtgcgggaccttgactttaatcccaataagcagtactacttggccagctgcggagacgactgtaaggtgaagttctgggacacccgaaatgtcaccgaacccgtgaagaccctggaggagcactcccactgggtgtggaacgtccgctacaaccactctcatgaccagctggtcctcacgggcagcagtgacagcagagtcatcctttccaacatggtgtccatctcgtcggagcccttcggccacttggtagacgacgatgacatcagtgaccaggaggaccaccgttctgaagagaagagcaaggagcccctgcaggacaacgtgatcgccacctacgaggagcacgaggacagcgtctatgccgtggactggtcctcggctgacccgtggctgtttgcctccctgagctatgacgggaggctcgtgatcaacagggtgcccagggccctgaagtaccacatcctgctatgactcccgggcctgggttatccaggtcccattgagtggttttcctcttggcagattctcaaacagtcgcagctctttggaggtgactcgtgttccaggtggatccctctctgggagagccgctgttcccttcctgtagcagcagcatttatgaatggggtgaatggggctattgtcgacggcacagctaatgcccgaacccagcccctgtcggcagagacagagccccacattattatgtgaataacaatgttttctgttttaagggtgtcaggagtttcgctttttaaaaaaatgtctgttcctgcagtagtaactcttctttctcttgagagtaaaaaatgaaataaaataaatccacgctgca

SEQ ID NO: 333430 - DNA, 1193 bp, Homo sapiens
ctctggcatgctttcattctcaagatgataccaagtcacatttttgacggctacaaagcaaaaattccttccacggctcgcccagagggtcacagatacgcttctggagagatgagcgtggtgcgaccacacagggttgctgggatggaggaggtggcgccagcctcttcctgcagggcaggaacgccgaggggatgagagcaccctgggccgggggattagacagggtcccgggaaaccagtgtgtgcccgcagcacgcagtggcttttcctaatccatttactattttcctttgctgttcttccttctccctcagcccagatctactgcatagagaatgcccacggacagctggtgcgggaccttgactttaatcccaataagcagtactacttggccagctgcggagacgactgtaaggtgaagttctgggacacccgaaatgtcaccgaacccgtgaagaccctggaggagcactcccactgggtgtggaacgtccgctacaaccactctcatgaccagctggtcctcacgggcagcagtgacagcagagtcatcctttccaacatggtgtccatctcgtcggagcccttcggccacttggtagacgacgatgacatcagtgaccaggaggaccaccgttctgaagagaagagcaaggagcccctgcaggacaacgtgatcgccacctacgaggagcacgaggacagcgtctatgccgtggactggtcctcggctgacccgtggctgtttgcctccctgagctatgacgggaggctcgtgatcaacagggtgcccagggccctgaagtaccacatcctgctatgactcccgggcctgggttatccaggtcccattgagtggttttcctcttggcagattctcaaacagtcgcagctctttggaggtgactcgtgttccaggtggatccctctctgggagagccgctgttcccttcctgtagcagcagcatttatgaatggggtgaatggggctattgtcgacggcacagctaatgcccgaacccagcccctgtcggcagagacagagccccacattattatgtgaataacaatgttttctgttttaagggtgtcaggagtttcgctttttaaaaaaatgtctgttcctgcagtagtaactcttctttctcttgagagtaaaaaatgaaataaaataaatccacgctgca

SEQ ID NO: 333431 - DNA, 486 bp, Homo sapiens
tgcgtcatgaagaacatgtatcacagctcttacctaccagcctgggtatctcaaatgtttatgttaacatttggtacttctctttctcttagtgtcgtgtgggagccaatgggagatgggaagaaaatcatttccttggctgataaccatatcctgctgtgggatttacaggaaagctcgagccaggctgtggtaagtaaaagcaacaacacagcgtttgtttctgtatttttaaaccaaaccccgcatgttctcactcataggtgggaattgaacaatgagatcacttggacacagggtggggaacatcacacaccagggcctgtcgtggggttgggggagcgggagggatagcattaggagacatacctaatgtaaatgactagttaatgggtgcagcacaccaacacggcacatgtatacatatgtaacaaatctgcacattgtgcacatgtaccctagaacttaaagtgtaatgaaaaaaat

SEQ ID NO: 333432 - DNA, 486 bp, Homo sapiens
ttgcctccctgagctatgacgggaggctcgtgatcaacagggtgcccagggccctgaagtaccacatcctgctatgactcccgggcctgggttatccaggtcccattgagtggttttcctcttggcagattctcaaacagtcgcagctctttggaggtgactcgtgttccaggtggatccctctctgggagagccgctgttcccttcctgtagcagcagcatttatgaatggggtgaatggggctattgtcgacggcacagctaatgcccgaacccagcccctgtcggcagagacagagccccacattattatgtgaataacaatgttttctgttttaagggtgtcaggagtttcgctttttaaaaaaatgtctgttcctgcagtagtaactcttctttctcttgagagtaaaaaatgaaataaaataaatccacgctgcacaggtgctcggctcattctttcaggagctctgccctgtgacccca

SEQ ID NO: 333433 - DNA, 1702 bp, Homo sapiens
  misc_feature (2)..(2): n is a, c, g, or t
  misc_feature (6)..(6): n is a, c, g, or t
  misc_feature (8)..(8): n is a, c, g, or t
tnggangnggcactacggaagctgttctgggccagaaagacttccagtttggagtcgtttgctgcggggagggaatgaatgggcgctgggaacacgcccgcgaggtggggacgcgccggccgtagcgaggtccttagcgtgtgagtggccggggtcgggtcgcttccccgcagcatggaggacgatgcaccagtgatctacgggctggagttccaggcacgtgccttaacacctcaaactgcagaaacagatgccattcggtttttggttgggacgcagtctcttaaatatgataatcagatccatatcatagattttgacgatgaaaacaacattataaataaaaatgtcctcctccatcaagcgggtgaaatctggcatattagcgctagccctgcagacagaggtgtgctgacgacctgctacaacagaacttcagacagcaaagtcctgacatgtgcagccgtgtggaggatgccgaaggaattggaatcaggcagccacgagtcccctgatgattcatccagcactgcacagaccctggagctgctctgtcaccttgacaacacagcccatggcaacatggcctgtgtcgtgtgggagccaatgggagatgggaagaaaatcatttccttggctgataaccatatcctgctgtgggatttacaggaaagctcgagccaggctgtgctggccagctcagcgtccctggaagggaagggacaactgaagttcacctcaggacggtggagcccacatcataactgcacccaggtggccacagcgaacgacaccaccctccgtggctgggacacccggagcatgagccagatctactgcatagagaatgcccacggacagctggtgcgggaccttgactttaatcccaataagcagtactacttggccagctgcggagacgactgtaaggtgaagttctgggacacccgaaatgtcaccgaacccgtgaagaccctggaggagcactcccactgggtgtggaacgtccgctacaaccactctcatgaccagctggtcctcacgggcagcagtgacagcagagtcatcctttccaacatggtgtccatctcgtcggagcccttcggccacttggtagacgacgatgacatcagtgaccaggaggaccaccgttctgaagagaagagcaaggagcccctgcaggacaacgtgatcgccacctacgaggagcacgaggacagcgtctatgccgtggactggtcctcggctgacccgtggctgtttgcctccctgagctatgacgggaggctcgtgatcaacagggtgcccagggccctgaagtaccacatcctgctatgactcccgggcctgggttatccaggtcccattgagtggttttcctcttggcagattctcaaacagtcgcagctctttggaggtgactcgtgttccaggtggatccctctctgggagagccgctgttcccttcctgtagcagcagcatttatgaatggggtgaatggggctattgtcgacggcacagctaatgcccgaacccagcccctgtcggcagagacagagccccacattattatgtgaataacaatgttttctgttttaagggtgtcaggagtttcgctttttaaaaaaatgtctgttcctgcagtagtaactcttctttctcttgagagtaaaaaatgaaataaaataaatccacgctgca

SEQ ID NO: 333434 - DNA, 942 bp, Homo sapiens
  misc_feature (2)..(2): n is a, c, g, or t
  misc_feature (6)..(6): n is a, c, g, or t
  misc_feature (8)..(8): n is a, c, g, or t
tnggangnggcactacggaagctgttctgggccagaaagacttccagtttggagtcgtttgctgcggggagggaatgaatgggcgctgggaacacgcccgcgaggtggggacgcgccggccgtagcgaggtccttagcgtgtgagtggccggggtcgggtcgcttccccgcagcatggaggacgatgcaccagtgatctacgggctggagttccaggcacgtgccttaacacctcaaactgcagaaacagatgccattcggtttttggttgggacgcagtctcttaaatatgataatcagatccatatcatagattttgacgatgaaaacaacattataaataaaaatgtcctcctccatcaagcgggtgaaatctggcatattagcgctagccctgcagacagaggtgtgctgacgacctgctacaacagaacttcagacagcaaagtcctgacatgtgcagccgtgtggaggatgccgaaggaattggaatcaggcagccacgagtcccctgatgattcatccagcactgcacagaccctggagctgctctgtcaccttgacaacacagcccatggcaacatggcctgtgtcgtgtgggagccaatgggagatgggaagaaaatcatttccttggctgataaccatatcctgctgtgggatttacaggaaagctcgagccaggctgtgagggaagaatctgaacattctgaaggagcgtgcacggaccctgtgtgtgccatcattcccaggctggaggccttgtggggaagaggaacactggagtcggggaacagggatggccccagacacctgcacctgccacgggcctcactcacagaaggaggacctgccacgagcctcactcaaggaagaaggactcgccacgggcctcactcacagaaggacccgccacgagcctcacgcatggaagaaggaccc

SEQ ID NO: 333435 - DNA, 1724 bp, Homo sapiens
  misc_feature (2)..(2): n is a, c, g, or t
  misc_feature (6)..(6): n is a, c, g, or t
  misc_feature (8)..(8): n is a, c, g, or t
tnggangnggcactacggaagctgttctgggccagaaagacttccagtttggagtcgtttgctgcggggagggaatgaatgggcgctgggaacacgcccgcgaggtggggacgcgccggccgtagcgaggtccttagcgtgtgagtggccggggtcgggtcgcttccccgcagcatggaggacgatgcaccagtgatctacgggctggagttccaggcacgtgccttaacacctcaaactgcagaaacagatgccattcggtttttggttgggacgcagtctcttaaatatgataatcagatccatatcatagattttgacgatgaaaacaacattataaataaaaatgtcctcctccatcaagcgggtgaaatctggcatattagcgctagccctgcagacagaggtgtgctgacgacctgctacaacagaacttcagacagcaaagtcctgacatgtgcagccgtgtggaggatgccgaaggaattggaatcaggcagccacgagtcccctgatgattcatccagcactgcacagaccctggagctgctctgtcaccttgacaacacagcccatggcaacatggcctgtgtcgtgtgggagccaatgggagatgggaagaaaatcatttccttggctgataaccatatcctgctgtgggatttacaggaaagctcgagccaggctgtggaaaacatcgtgacactcccagctggccagctcagcgtccctggaagggaagggacaactgaagttcacctcaggacggtggagcccacatcataactgcacccaggtggccacagcgaacgacaccaccctccgtggctgggacacccggagcatgagccagatctactgcatagagaatgcccacggacagctggtgcgggaccttgactttaatcccaataagcagtactacttggccagctgcggagacgactgtaaggtgaagttctgggacacccgaaatgtcaccgaacccgtgaagaccctggaggagcactcccactgggtgtggaacgtccgctacaaccactctcatgaccagctggtcctcacgggcagcagtgacagcagagtcatcctttccaacatggtgtccatctcgtcggagcccttcggccacttggtagacgacgatgacatcagtgaccaggaggaccaccgttctgaagagaagagcaaggagcccctgcaggacaacgtgatcgccacctacgaggagcacgaggacagcgtctatgccgtggactggtcctcggctgacccgtggctgtttgcctccctgagctatgacgggaggctcgtgatcaacagggtgcccagggccctgaagtaccacatcctgctatgactcccgggcctgggttatccaggtcccattgagtggttttcctcttggcagattctcaaacagtcgcagctctttggaggtgactcgtgttccaggtggatccctctctgggagagccgctgttcccttcctgtagcagcagcatttatgaatggggtgaatggggctattgtcgacggcacagctaatgcccgaacccagcccctgtcggcagagacagagccccacattattatgtgaataacaatgttttctgttttaagggtgtcaggagtttcgctttttaaaaaaatgtctgttcctgcagtagtaactcttctttctcttgagagtaaaaaatgaaataaaataaatccacgctgca

SEQ ID NO: 333436 - DNA, 1639 bp, Homo sapiens
  misc_feature (2)..(2): n is a, c, g, or t
  misc_feature (6)..(6): n is a, c, g, or t
  misc_feature (8)..(8): n is a, c, g, or t
tnggangnggcactacggaagctgttctgggccagaaagacttccagtttggagtcgtttgctgcggggagggaatgaatgggcgctgggaacacgcccgcgaggtggggacgcgccggccgtagcgaggtccttagcgtgtgagtggccggggtcgggtcgcttccccgcagcatggaggacgatgcaccagtgatctacgggctggagttccaggcacgtgccttaacacctcaaactgcagaaacagatgccattcggtttttggttgggacgcagtctcttaaatatgataatcagatccatatcatagattttgacgatgaaaacaacattataaataaaaatgtcctcctccatcaagcgggtgaaatctggcatattagcgctagccctgcagacagaggtgtgctgacgacctgctacaacagaacttcagacagcaaagtcctgacatgtgcagccgtgtggaggatgccgaaggaattggaatcaggcagccacgagtcccctgatgattcatccagcactgcacagaccctggagctgctctgtcaccttgacaacacagcccatggcaacatggcctgtgtcgtgtgggagccaatgggagatgggaagaaaatcatttccttggctgataaccatatcctgctgtgggatttacaggaaagctcgagccaggctgtgctggccagctcagcgtccctggaagggaagggacaactgaagttcacctcaggacggtggagcccacatcataaccagatctactgcatagagaatgcccacggacagctggtgcgggaccttgactttaatcccaataagcagtactacttggccagctgcggagacgactgtaaggtgaagttctgggacacccgaaatgtcaccgaacccgtgaagaccctggaggagcactcccactgggtgtggaacgtccgctacaaccactctcatgaccagctggtcctcacgggcagcagtgacagcagagtcatcctttccaacatggtgtccatctcgtcggagcccttcggccacttggtagacgacgatgacatcagtgaccaggaggaccaccgttctgaagagaagagcaaggagcccctgcaggacaacgtgatcgccacctacgaggagcacgaggacagcgtctatgccgtggactggtcctcggctgacccgtggctgtttgcctccctgagctatgacgggaggctcgtgatcaacagggtgcccagggccctgaagtaccacatcctgctatgactcccgggcctgggttatccaggtcccattgagtggttttcctcttggcagattctcaaacagtcgcagctctttggaggtgactcgtgttccaggtggatccctctctgggagagccgctgttcccttcctgtagcagcagcatttatgaatggggtgaatggggctattgtcgacggcacagctaatgcccgaacccagcccctgtcggcagagacagagccccacattattatgtgaataacaatgttttctgttttaagggtgtcaggagtttcgctttttaaaaaaatgtctgttcctgcagtagtaactcttctttctcttgagagtaaaaaatgaaataaaataaatccacgctgca

SEQ ID NO: 333437 - DNA, 1565 bp, Homo sapiens
  misc_feature (2)..(2): n is a, c, g, or t
  misc_feature (6)..(6): n is a, c, g, or t
  misc_feature (8)..(8): n is a, c, g, or t
tnggangnggcactacggaagctgttctgggccagaaagacttccagtttggagtcgtttgctgcggggagggaatgaatgggcgctgggaacacgcccgcgaggtggggacgcgccggccgtagcgaggtccttagcgtgtgagtggccggggtcgggtcgcttccccgcagcatggaggacgatgcaccagtgatctacgggctggagttccaggcacgtgccttaacacctcaaactgcagaaacagatgccattcggtttttggttgggacgcagtctcttaaatatgataatcagatccatatcatagattttgacgatgaaaacaacattataaataaaaatgtcctcctccatcaagcgggtgaaatctggcatattagcgctagccctgcagacagaggtgtgctgacgacctgctacaacagaagtaagtgcggcttttctaagtgtcgtgtgggagccaatgggagatgggaagaaaatcatttccttggctgataaccatatcctgctgtgggatttacaggaaagctcgagccaggctgtgctggccagctcagcgtccctggaagggaagggacaactgaagttcacctcaggacggtggagcccacatcataactgcacccaggtggccacagcgaacgacaccaccctccgtggctgggacacccggagcatgagccagatctactgcatagagaatgcccacggacagctggtgcgggaccttgactttaatcccaataagcagtactacttggccagctgcggagacgactgtaaggtgaagttctgggacacccgaaatgtcaccgaacccgtgaagaccctggaggagcactcccactgggtgtggaacgtccgctacaaccactctcatgaccagctggtcctcacgggcagcagtgacagcagagtcatcctttccaacatggtgtccatctcgtcggagcccttcggccacttggtagacgacgatgacatcagtgaccaggaggaccaccgttctgaagagaagagcaaggagcccctgcaggacaacgtgatcgccacctacgaggagcacgaggacagcgtctatgccgtggactggtcctcggctgacccgtggctgtttgcctccctgagctatgacgggaggctcgtgatcaacagggtgcccagggccctgaagtaccacatcctgctatgactcccgggcctgggttatccaggtcccattgagtggttttcctcttggcagattctcaaacagtcgcagctctttggaggtgactcgtgttccaggtggatccctctctgggagagccgctgttcccttcctgtagcagcagcatttatgaatggggtgaatggggctattgtcgacggcacagctaatgcccgaacccagcccctgtcggcagagacagagccccacattattatgtgaataacaatgttttctgttttaagggtgtcaggagtttcgctttttaaaaaaatgtctgttcctgcagtagtaactcttctttctcttgagagtaaaaaatgaaataaaataaatccacgctgca

SEQ ID NO: 333438 - DNA, 1429 bp, Homo sapiens
caaggccttagcccctggccaccccgaatctgtactctatctctgtatgttatttggagaaggttctataaatggaatcacacacagtgtaacctttaataactgatgttctttactcggcttgattccctggaggttgagttgctgcttcattttcaagtttgggttccagccaccatgcgtgctggtcagtggctggttcctctttgctgcggcgggatattccatggcatgacgcaccacggtttgttaagcacttgcctgttgaagctcatctgggtttttccttgtttttggcgattatgactacagttgcgtgtcgtgtgggagccaatgggagatgggaagaaaatcatttccttggctgataaccatatcctgctgtgggatttacaggaaagctcgagccaggctgtgctggccagctcagcgtccctggaagggaagggacaactgaagttcacctcaggacggtggagcccacatcataactgcacccaggtggccacagcgaacgacaccaccctccgtggctgggacacccggagcatgagccagatctactgcatagagaatgcccacggacagctggtgcgggaccttgactttaatcccaataagcagtactacttggccagctgcggagacgactgtaaggtgaagttctgggacacccgaaatgtcaccgaacccgtgaagaccctggaggagcactcccactgggtgtggaacgtccgctacaaccactctcatgaccagctggtcctcacgggcagcagtgacagcagagtcatcctttccaacatggtgtccatctcgtcggagcccttcggccacttggtagacgacgatgacatcagtgaccaggaggaccaccgttctgaagagaagagcaaggagcccctgcaggacaacgtgatcgccacctacgaggagcacgaggacagcgtctatgccgtggactggtcctcggctgacccgtggctgtttgcctccctgagctatgacgggaggctcgtgatcaacagggtgcccagggccctgaagtaccacatcctgctatgactcccgggcctgggttatccaggtcccattgagtggttttcctcttggcagattctcaaacagtcgcagctctttggaggtgactcgtgttccaggtggatccctctctgggagagccgctgttcccttcctgtagcagcagcatttatgaatggggtgaatggggctattgtcgacggcacagctaatgcccgaacccagcccctgtcggcagagacagagccccacattattatgtgaataacaatgttttctgttttaagggtgtcaggagtttcgctttttaaaaaaatgtctgttcctgcagtagtaactcttctttctcttgagagtaaaaaatgaaataaaataaatccacgctgca

SEQ ID NO: 333439 - DNA, 1319 bp, Homo sapiens
ctggggaggggggcacaattcagtccataacagtgagacaacaacagtgttgtcaggcattgccgggtgacagtgtaaaaaatactctagtgactacaggccggaaaagatttcctgcgtcatgaagaacatgtatcacagctcttacctaccagcctgggtatctcaaatgtttatgttaacatttggtacttctctttctcttagtgtcgtgtgggagccaatgggagatgggaagaaaatcatttccttggctgataaccatatcctgctgtgggatttacaggaaagctcgagccaggctgtgctggccagctcagcgtccctggaagggaagggacaactgaagttcacctcaggacggtggagcccacatcataactgcacccaggtggccacagcgaacgacaccaccctccgtggctgggacacccggagcatgagccagatctactgcatagagaatgcccacggacagctggtgcgggaccttgactttaatcccaataagcagtactacttggccagctgcggagacgactgtaaggtgaagttctgggacacccgaaatgtcaccgaacccgtgaagaccctggaggagcactcccactgggtgtggaacgtccgctacaaccactctcatgaccagctggtcctcacgggcagcagtgacagcagagtcatcctttccaacatggtgtccatctcgtcggagcccttcggccacttggtagacgacgatgacatcagtgaccaggaggaccaccgttctgaagagaagagcaaggagcccctgcaggacaacgtgatcgccacctacgaggagcacgaggacagcgtctatgccgtggactggtcctcggctgacccgtggctgtttgcctccctgagctatgacgggaggctcgtgatcaacagggtgcccagggccctgaagtaccacatcctgctatgactcccgggcctgggttatccaggtcccattgagtggttttcctcttggcagattctcaaacagtcgcagctctttggaggtgactcgtgttccaggtggatccctctctgggagagccgctgttcccttcctgtagcagcagcatttatgaatggggtgaatggggctattgtcgacggcacagctaatgcccgaacccagcccctgtcggcagagacagagccccacattattatgtgaataacaatgttttctgttttaagggtgtcaggagtttcgctttttaaaaaaatgtctgttcctgcagtagtaactcttctttctcttgagagtaaaaaatgaaataaaataaatccacgctgca

SEQ ID NO: 333440 - DNA, 1688 bp, Homo sapiens
ataacgatgcagccaacatgctcagcctttgtgcatgaaatcctaggcgagcagagaaacgagctggggatcttcttgcaggctcacaactgggccccaccctcttttaggcagggggaggttttagccctaacaccagccccagagggccttgctgaggccttcatggtcagctcgctggcttggggtggtctgattaaatgccaggcgaaggccgtgtgggcctcgagacggagggagggaagagggcgtgcactggagacagcatctgaccaagtgaatgtgtttgtccctttgttattccggaaccgctcaggtggacctgacttgttttgtcgctttctttggggaaagccagatgtttgagttgttttgtattgttttccttcaagttcgagttgattatctctaatcacatacttgcaagcaaacgctctttaatagaggcctattaatatgctttctattttttgctgtgctcagttttatagatttccccaagtaaggttcatttttgccatttaaggaaaggaaacaaagacagagcttcctaattatcctcagtaattattttcaataatatccttgagtatacgatatcctctcgcgttttctgaacagacttcacattcttcttcttttcttcttcctttggaaaacatcgtgacactcccagctggccagctcagcgtccctggaagggaagggacaactgaagttcacctcaggacggtggagcccacatcataactgcacccaggtggccacagcgaacgacaccaccctccgtggctgggacacccggagcatgagccagatctactgcatagagaatgcccacggacagctggtgcgggaccttgactttaatcccaataagcagtactacttggccagctgcggagacgactgtaaggtgaagttctgggacacccgaaatgtcaccgaacccgtgaagaccctggaggagcactcccactgggtgtggaacgtccgctacaaccactctcatgaccagctggtcctcacgggcagcagtgacagcagagtcatcctttccaacatggtgtccatctcgtcggagcccttcggccacttggtagacgacgatgacatcagtgaccaggaggaccaccgttctgaagagaagagcaaggagcccctgcaggacaacgtgatcgccacctacgaggagcacgaggacagcgtctatgccgtggactggtcctcggctgacccgtggctgtttgcctccctgagctatgacgggaggctcgtgatcaacagggtgcccagggccctgaagtaccacatcctgctatgactcccgggcctgggttatccaggtcccattgagtggttttcctcttggcagattctcaaacagtcgcagctctttggaggtgactcgtgttccaggtggatccctctctgggagagccgctgttcccttcctgtagcagcagcatttatgaatggggtgaatggggctattgtcgacggcacagctaatgcccgaacccagcccctgtcggcagagacagagccccacattattatgtgaataacaatgttttctgttttaagggtgtcaggagtttcgctttttaaaaaaatgtctgttcctgcagtagtaactcttctttctcttgagagtaaaaaatgaaataaaataaatccacgctgca

SEQ ID NO: 333441 - DNA, 1020 bp, Homo sapiens
  misc_feature (2)..(2): n is a, c, g, or t
  misc_feature (6)..(6): n is a, c, g, or t
  misc_feature (8)..(8): n is a, c, g, or t
tnggangnggcactacggaagctgttctgggccagaaagacttccagtttggagtcgtttgctgcggggagggaatgaatgggcgctgggaacacgcccgcgaggtggggacgcgccggccgtagcgaggtccttagcgtgtgagtggccggggtcgggtcgcttccccgcagcatggaggacgatgcaccagtgatctacgggctggagttccaggcacgtgccttaacacctcaaactgcagaaacagatgccattcggtttttggttgggacgcagtctcttaaatatgataatcagatccatatcatagattttgacgatgaaaacaacattataaataaaaatgtcctcctccatcaagcgggtgaaatctggcatattagcgctagccctgcagacagaggtgtgctgacgacctgctacaacagaacttcagacagcaaagtcctgacatgtgcagccgtgtggaggatgccgaaggaattggaatcaggcagccacgagtcccctgatgattcatccagcactgcacagaccctggagctgctctgtcaccttgacaacacagcccatggcaacatggcctgtgtcgtgtgggagccaatgggagatgggaagaaaatcatttccttggctgataaccatatcctgctgtgggatttacaggaaagctcgagccaggctgtgctggccagctcagcgtccctggaagggaagggacaactgaagttcacctcaggacggtggagcccacatcataactgcacccaggtggccacagcgaacgacaccaccctccgtggctgggacacccggagcatgagccagatctactgcatagagaatgcccacggacagctggtgcgggaccttgactttaatcccaataagcagtactacttggccagctgcggagacgactgtaaggtgaagttctgggacacccgaaatgtcaccgaacccgtgaagaccctggaggagcactcccactggtagggccgctcctggctgcttcag

SEQ ID NO: 333442 - DNA, 433 bp, Homo sapiens
cctcctgagtagctggaattacaggcacgcaccaccatgcctggcttaatttttctttttttcgtagagacggggtttcaccatgttggccaggctggtctcaaactcctgacctcaggtgatctacccacctcggcctcccaaagtgctgggattacaggagtgtgccactgcgtctggcctaccaaacgaaattcttactcttaatctagaatgagaactattgagagttcatccattagaacccttgaagcctgtccctcagatggttgaaagtctgtagctggaggacggttgaaataaacagaatattgatatgaaatatttctgaaggtatcctttttccatatcctatatttaacttagctggcatattagagttgtccagagaaacagaaccaataggatgtgtatatatacagagaaaaatgta

SEQ ID NO: 333443 - DNA, 403 bp, Homo sapiens
tgatttgaacatacccacatttaacaacagctattcttctggaagactcaaactcttgggttagatttttttaaaaaacatggctttgtgaagaacagaaagaagagatagagaacatgtatttctttataaaattaaactcagccaagtgagaaaagccctatctctataagaaaaaaaaatctaggaaaacatggttactgtcctcccaaagaaaaaataattgcatgaatgtttcaagcaaagcattcaatatatttccaaaccatcttaacatctctctctgtattgccattgctcaagggatatcttctatggttttcccacaggtccatatgcaaaaggtaaatccattgccctgacaccgaagctaaatacacatggtagctgaggttacttggat

SEQ ID NO: 333444 - DNA, 261 bp, Homo sapiens
cttacagggatttaatctttctttgattcactggctataggctgatgcagttctccttcctctctacttttctttttcctttgtgttcctctccccgccagcaccaacatagccaatatagccaatctttgactcccttcttcttttctagttcagataaatgactcactttgtggcttctctcacctttagacccagattcacctttctagcctcatgtcctacctgagcctcaccttcctgtgggatccttcttcggga

SEQ ID NO: 333445 - DNA, 396 bp, Homo sapiens
ctgcctcagcctcctgagtagctgagactacagacacatgtcgccacatctggtcaacttttgattcttcaaagaagctagtaaggaaacattatcatttatgtatcatgtaatatgctaagtgttttaaattatttatgtatttcactcatttctcacaacagctctgtgagttagggattaaacccccccctttttttttcagacagattctcactctgttgccaggctggagtgcagtgtcgcgatcttggctcactgcagcctccacctcctgggttgaagtgattctcctgcctcagcctcccgagtagctgggactacaagcgtgcaccaccatgcccagctaatttttttatttttagtagagacagggttttaccacattggccaaga

SEQ ID NO: 333446 - DNA, 860 bp, Homo sapiens
gagttgtgggtcttcctttgcaacgtttcttcttcgctgtgcctctggtcgccatcacaaactgcattaggaaatgagagcgagcatgtggcctggcttcttgatggagatcgtcctcgctcttttcataaagggtcctagatgaacaccgattccctcctgtggtgattggctatggcagccagtgtcccgtgtcctctccatatgaggagtgagggcctgcagatccctccattggccagcctggttctgggagagagatactgaactcagcttggccctggtcccatttcttccagtacccgctggtggtctctgccctcaccagagctggaaggacttgatgtggtttgaccacatcactgtaggattttctcccagatggggatgaccagctgcatcactccccagagtccttccggagaaataaaagcataggcatggcggctaagggaagaaggcataagaaggcagattgaggattgttaagaagactccgcccttgcccccagctctgcctaccatagtattgctcccttttggtcactgatgcacatgactaagaagagttctctcctgagtaactacatgactttggagatctttgtcattctcttcactgcttatcttccagaactcatgattacccacacatgcctttttaccaggcagtaagaaatgcagcccccctaggtagtagcatggtcccctccttggcccactccactcttgccctcaacctctttcaaccaaacattatcacccaccttaagaaattaaaaaataattctgtcccagtctgtctgaacttagtacatgatccaggatgtgatgggatcttagggcttggctggaaggtt

SEQ ID NO: 333447 - DNA, 225 bp, Homo sapiens
tccatctctactaaaaatataaaaattagctgggcctggtggcatgcgcctgtaatcccagctactcaggagtctgagatgggagaagcacttgaacccaggagccaagattgcaccactgcactccagcctgggtgagagagggagactccatctcaaaaacaaaaacactgtattgcctaaagtcagaagaatgaattaaatgagctcttatgagccaaacta

SEQ ID NO: 333448 - DNA, 220 bp, Homo sapiens
aaaagaaaagaaagaaaacgtttcctgatactcaaagccagatgacatgtctctgctatgccacatattctaacctgggagccaagcagagcaagaacccccctttcacagatctaccctgcaaacatttgggggcagtgttcatgccttttggaacgttgcctgttttgccactcccagcttctctcctttccctgacctattgaaccagcaagaccca

SEQ ID NO: 333449 - DNA, 468 bp, Homo sapiens
catattggaaggctgcgatgtgcggatcacctgaggtcaggagttcgaaaacagcctggccagcatagtgaaaccctgcctctacttaaaatacaaaattagccaggcatggtggtgcctgactataattccagctattcggcagagtgaggcaggagaaccgcttgaacctgagaggcggaggttgcagtgagcagagatcacaccactgtactctagcctgggcaacaacaagagcaaaactctatcttaaaataaaaataaataaataaataaataaataaaaactttataccctttaagcattttctgattaaaaattcttttaaacacttaaaaaaaaatttaggccaggtgcagtggctcacacctgtaatcccagcactttgagaggctgaggtgggtgggtcacctgaggccaggagttcgagaccagcctggccaacatggtgaaactgtttctacttt

SEQ ID NO: 333450 - DNA, 234 bp, Homo sapiens
ttcttgcaaatgaagagacaatatgcccaaaaaatgagctgaaaatggctcatgaagggagggaagatgacctccagcacaccagggcagagtgggggccacatgaaggtgcaagagtgggagggaaccacaacgccttggcagagaggagagcaagtgggggccaagccacaaagctcttcaaggccagtcaacagtgaaacctgaaggagtcccatccatccccaagtctgc

SEQ ID NO: 333451 - DNA, 183 bp, Homo sapiens
ctattcagttaacaggatctaatttaaagacctttccatgtgtctgcagaaaatttgtgggcttattaatgggctcattctgctagtaaatgtctataggcttccgaccatcaaacacacaagaggggagaagccatgacaaaaaacaacaacaacaaaaaccccaaccctgtctgttaccca

SEQ ID NO: 333452 - DNA, 446 bp, Homo sapiens
gaagcaccctggtttccacccactgggtccccatattacccaacttgagaagaccctgaaactccttctcggtttaaaaaccactggattagaaaaagatctgcaaggctaataacaaagtgctcaaagcatttacctctaaggaactgggtatgcctagattgaggtggctgggggaggggtaagcagtaatagaaagcaagattgaaatatcattttcactttttttgattctacatatttttatattatttgaacttttgtttgagtactttttactttttaatttaaaaagtaattaacaggaagaaactattgctctaaaaaagtatttttaatggttaaactttttcaaatggattcccatattttagtaaataatttccctatagcaggacattatttggctaaattacattgcaatgaaaatgaatatctctgtgcct

SEQ ID NO: 333453 - DNA, 304 bp, Homo sapiens
cttttctttctttctttgatggagtctcaaaaaaaggagaagggtgtccaaacatcctggatgaaaatggctccatgctgtcatagaattttatttactttataaatcctaatattttagaacttaaaaaagatactttgtagtttagatggttatagttaagctatttcattttttttaaaaaacgaagaaattagcattcaatgtctgcctagaaacaatcttatatacagtccttatgtacaaatcttttttgtggaatatgttttcgtagttttttgttttttgttttagattgggtctt

SEQ ID NO: 333454 - DNA, 6029 bp, Homo sapiens
  misc_feature (449)..(449): n is a, c, g, or t
ttcccggacccctgtttgctttagagccgagccgcgccgcgccgatgccctcacactctgcgcctcctctcccgggactttaacaccacgctctcctccaccgaccaggtgaccttttgctctgagccagatcagagaagaattcggtgtccgtgcgggacgatgcctgagcaggagagacagatcacagccagagaaggggccagtcggaaaatcttatctaagctttctttgcctacccgtgcctgggaaccagcaatgaagaagagttttgcttttgacaatgttggctatgaaggtggtctggatggcctgggcccttcttctcaggtggccaccagcacagtcaggatcttgggcatgacttgccagtcatgtgtgaagtccattgaggacaggatttccaatttgaaaggcatcatcagcatgaaggtttccctggaacaagncagtgccactgtgaaatatgtgccatcggttgtgtgcctgcaacaggtttgccatcaaattggggacatgggcttcgaggccagcattgcagaaggaaaggcagcctcctggccctcaaggtccttgcctgcccaggaggctgtggtcaagctccgggtggagggcatgacctgccagtcctgtgtcagctccattgaaggcaaggtccggaaactgcaaggagtagtgagagtcaaagtctcactcagcaaccaagaggccgtcatcacttatcagccttatctcattcagcccgaagacctcagggaccatgtaaatgacatgggatttgaagctgccatcaagagcaaagtggctcccttaagcctgggaccaattgatattgagcggttacaaagcactaacccaaagagacctttatcttctgctaaccagaattttaataattctgagaccttggggcaccaaggaagccatgtggtcaccctccaactgagaatagatggaatgcattgtaagtcttgcgtcttgaatattgaagaaaatattggccagctcctaggggttcaaagtattcaagtgtccttggagaacaaaactgcccaagtaaagtatgacccttcttgtaccagcccagtggctctgcagagggctatcgaggcacttccacctgggaattttaaagtttctcttcctgatggagccgaagggagtgggacagatcacaggtcttccagttctcattcccctggctccccaccgagaaaccaggtccagggcacatgcagtaccactctgattgccattgccggcatgacctgtgcatcctgtgtccattccattgaaggcatgatctcccaactggaaggggtgcagcaaatatcggtgtctttggccgaagggactgcaacagttctttataatccctctgtaattagcccagaagaactcagagctgctatagaagacatgggatttgaggcttcagtcgtttctgaaagctgttctactaaccctcttggaaaccacagtgctgggaattccatggtgcaaactacagatggtacacctacatctgtgcaggaagtggctccccacactgggaggctccctgcaaaccatgccccggacatcttggcaaagtccccacaatcaaccagagcagtggcaccgcagaagtgcttcttacagatcaaaggcatgacctgtgcatcctgtgtgtctaacatagaaaggaatctgcagaaagaagctggtgttctctccgtgttggttgccttgatggcaggaaaggcagagatcaagtatgacccagaggtcatccagcccctcgagatagctcagttcatccaggacctgggttttgaggcagcagtcatggaggactacgcaggctccgatggcaacattgagctgacaatcacagggatgacctgcgcgtcctgtgtccacaacatagagtccaaactcacgaggacaaatggcatcacttatgcctccgttgcccttgccaccagcaaagcccttgttaagtttgacccggaaattatcggtccacgggatattatcaaaattattgagagcaaaacctcagaagccctggctaaactcatgtctctccaagccacagaagccaccgttgtgacccttggtgaggacaatttaatcatcagggaggagcaagtccccatggagctggtgcagcggggcgatatcgtcaaggtggtccctgggggaaagtttccagtggatgggaaagtcctggaaggcaataccatggctgatgagtccctcatcacaggagaagccatgccagtcactaagaaacccggaagcactgtaattgcgaggtctataaatgcacatggctctgtgctcattaaagctacccacgtgggcaatgacaccactttggctcagattgtgaaactggtggaagaggctcagatgtcaaagaaccccaacaagcacatctcccagacagaggtgatcatccggtttgctttccagacgtccatcacggtgctgtgcattgcctgcccctgctccctggggctggccacgcccacggctgtcatggtgggcaccggggtggccgcgcagaacggcatcctcatcaagggaggcaagcccctggagatggcgcacaagataaagactgtgatgtttgacaagactggcaccattacccatggcgtccccagggtcatgcgggtgctcctgctgggggatgtggccacactgcccctcaggaaggttctggctgtggtggggactgcggaggccagcagtgaacaccccttgggcgtggcagtcaccaaatactgtaaagaggaacttggaacagagaccttgggatactgcacggacttccaggcagtgccaggctgtggaattgggtgcaaagtcagcaacgtggaaggcatcctggcccacagtgagcgccctttgagtgcaccggccagtcacctgaatgaggctggcagccttcccgcagaaaaagatgcagtcccccagaccttctctgtgctgattggaaaccgtgagtggctgaggcgcaacggtttaaccatttctagcgatgtcagtgacgctatgacagaccacgagatgaaaggacagacagccatcctggtggctattgacggtgtgctctgtgggatgatcgcaatcgcagacgctgtcaagcaggaggctgccctggctgtgcacacgctgcagagcatgggtgtggacgtggttctgatcacgggggacaaccggaagacagccagagctattgccacccaggttggcatcaacaaagtctttgcagaggtgctgccttcgcacaaggtggccaaggtccaggagctccagaataaagggaagaaagtcgccatggtgggggatggggtcaatgactccccggccttggcccaggcagacatgggtgtggccattggcaccggcacggatgtggccatcgaggcagccgacgtcgtccttatcagaaatgatttgctggatgtggtggctagcattcacctttccaagaggactgtccgaaggatacgcatcaacctggtcctggcactgatttataacctggttgggatacccattgcagcaggtgtcttcatgcccatcggcattgtgctgcagccctggatgggctcagcggccatggcagcctcctctgtgtctgtggtgctctcatccctgcagctcaagtgctataagaagcctgacctggagaggtatgaggcacaggcgcatggccacatgaagcccctgacggcatcccaggtcagtgtgcacataggcatggatgacaggtggcgggactcccccagggccacaccatgggaccaggtcagctatgtcagccaggtgtcgctgtcctccctgacgtccgacaagccatctcggcacagcgctgcagcagacgatgatggggacaagtggtctctgctcctgaatggcagggatgaggagcagtacatctgatgacttcaggcaggcgggccggggcagggacttgcctccactcaccacaagctgagcaggacagccagcagcaggatgggctgagctagcctccagctttggggacttccgctccctggatatgtccagtcatcctgccctgcagcacgcggccttgtctgggtgcagctgggcttggcctggagaggacggccctgcctgcctcttggcctcacgggaccgtcagcatgggctttgtcttggactctagtccttggctggactgtagaaggtgagaggcgagtcaccctcctcacagacctctgcttggagtatttaggatgactgctgtgaaatggagaacagtttcatcaggaccaaaaaacctcactgggcctttccagagaactgcagacctcactgtcagggtctttctgatgacgcctgtctgtgtgcatcatgtttctgagaccacagtttacctcaggtgtgcctgttgctttcttcctgcatagtctgttcctttcttcgtacatagtctgttccttttctctcctgtgtgcttgtcagtggggacccctcgcaaccctgcctgtcacctgggagggtgggaccaatgtccttgtggtctttgctgctgctctcaggcgcttctccaatgctctggagtgtgcatttcagcttgaacctgcttcctggctcacacatccccagccagggagcttgccacactcttcttcaagttgaggagagttcttttttgcttaaagcccccttctccatggagtgttggcttctcaatagagtgttgttgctgaccagctggagtgagggcctcagagcctgacctgagagtccgtactcggcttcctgtggggtgtaggttctcgcgattcaggacgtccttccatatccctgcccagcctgtggtgcttgaaacgtttgccccatgggaaacgtatgtgtgcaggagcctccctgcacggcccaaggggcttcgttttcagtcttctgactgtcacctcgtggggttcagtagagaattcatgtgactagcgcctggccttgtgtggcttggaggaaatggtactgcccaaataggaggaaaacacagcctccctgagcctgcattctgcacgctgcccaggggcttcagaaaaggagtggccacagcaccccgaagggagcatctgtttacctggcagtggctctcagagcagcagaacgggttcagttttagactctgaagttggttgtgattgacagaaccctttgggagcaaactagtagagttggattaaattctgggtgaaacccttttctcccacacaaaatagttttagtgatttttttcattgtccattacttgccaggggcagttttagcagcacttttgatagattacgtctaatcctcccaaccaaccagcagggtagctattactgtccacattttacaggcaaggaaacaggctccaagaggctgaggactttgcccaggatgacatagccaatggacaagcagtgtctgtcagctgtgaaggcttcactcttattgtccttctaccttgaatagaagttttcctgataagaataaacgaggaaaaggtccttgcctcctggaagaacaaatctaccaggtgatctattcattgtttcaactcagaatgcacttgattcaggaggtcatctgaccttcaccttggatggttagtttcactttttacatatagtttttgcagggttttattttataaaatccaagcgcgctgttgattgtgttttccttgttttcagcccccccactccagcccgcagcacatttccgctgtccgtcagtaattgtgtcctctctttatgcttgcttggggaatgttgttttctgactaggctgatcattatctaaagaatctaattctgttgatttttaaaacttttaggaccataaacgttgtgttcatatatggacatggaaatatttatataattttatagaaaataaccttttagatggtcaaagtgtaaggagtttttttgtcagataatcatttctacttcaaaaacatttcatgcaatattagaataaagttcctgtcattcctctaaaaaaat

SEQ ID NO: 333455 - DNA, 6685 bp, Homo sapiens
  misc_feature (449)..(449): n is a, c, g, or t
ttcccggacccctgtttgctttagagccgagccgcgccgcgccgatgccctcacactctgcgcctcctctcccgggactttaacaccacgctctcctccaccgaccaggtgaccttttgctctgagccagatcagagaagaattcggtgtccgtgcgggacgatgcctgagcaggagagacagatcacagccagagaaggggccagtcggaaaatcttatctaagctttctttgcctacccgtgcctgggaaccagcaatgaagaagagttttgcttttgacaatgttggctatgaaggtggtctggatggcctgggcccttcttctcaggtggccaccagcacagtcaggatcttgggcatgacttgccagtcatgtgtgaagtccattgaggacaggatttccaatttgaaaggcatcatcagcatgaaggtttccctggaacaagncagtgccactgtgaaatatgtgccatcggttgtgtgcctgcaacaggtttgccatcaaattggggacatgggcttcgaggccagcattgcagaaggaaaggcagcctcctggccctcaaggtccttgcctgcccaggaggctgtggtcaagctccgggtggagggcatgacctgccagtcctgtgtcagctccattgaaggcaaggtccggaaactgcaaggagtagtgagagtcaaagtctcactcagcaaccaagaggccgtcatcacttatcagccttatctcattcagcccgaagacctcagggaccatgtaaatgacatgggatttgaagctgccatcaagagcaaagtggctcccttaagcctgggaccaattgatattgagcggttacaaagcactaacccaaagagacctttatcttctgctaaccagaattttaataattctgagaccttggggcaccaaggaagccatgtggtcaccctccaactgagaatagatggaatgcattgtaagtcttgcgtcttgaatattgaagaaaatattggccagctcctaggggttcaaagtattcaagtgtccttggagaacaaaactgcccaagtaaagtatgacccttcttgtaccagcccagtggctctgcagagggctatcgaggcacttccacctgggaattttaaagtttctcttcctgatggagccgaagggagtgggacagatcacaggtcttccagttctcattcccctggctccccaccgagaaaccaggtccagggcacatgcagtaccactctgattgccattgccggcatgacctgtgcatcctgtgtccattccattgaaggcatgatctcccaactggaaggggtgcagcaaatatcggtgtctttggccgaagggactgcaacagttctttataatccctctgtaattagcccagaagaactcagagctgctatagaagacatgggatttgaggcttcagtcgtttctgaaagctgttctactaaccctcttggaaaccacagtgctgggaattccatggtgcaaactacagatggtacacctacatctgtgcaggaagtggctccccacactgggaggctccctgcaaaccatgccccggacatcttggcaaagtccccacaatcaaccagagcagtggcaccgcagaagtgcttcttacagatcaaaggcatgacctgtgcatcctgtgtgtctaacatagaaaggaatctgcagaaagaagctggtgttctctccgtgttggttgccttgatggcaggaaaggcagagatcaagtatgacccagaggtcatccagcccctcgagatagctcagttcatccaggacctgggttttgaggcagcagtcatggaggactacgcaggctccgatggcaacattgagctgacaatcacagggatgacctgcgcgtcctgtgtccacaacatagagtccaaactcacgaggacaaatggcatcacttatgcctccgttgcccttgccaccagcaaagcccttgttaagtttgacccggaaattatcggtccacgggatattatcaaaattattgaggaaattggctttcatgcttccctggcccagagaaaccccaacgctcatcacttggaccacaagatggaaataaagcagtggaagaagtctttcctgtgcagcctggtgtttggcatccctgtcatggccttaatgatctatatgctgatacccagcaacgagccccaccagtccatggtcctggaccacaacatcattccaggactgtccattctaaatctcatcttctttatcttgtgtacctttgtccagctcctcggtgggtggtacttctacgttcaggcctacaaatctctgagacacaggtcagccaacatggacgtgctcatcgtcctggccacaagcattgcttatgtttattctctggtcatcctggtggttgctgtggctgagaaggcggagaggagccctgtgacattcttcgacacgccccccatgctctttgtgttcattgccctgggccggtggctggaacacttggcaaagagcaaaacctcagaagccctggctaaactcatgtctctccaagccacagaagccaccgttgtgacccttggtgaggacaatttaatcatcagggaggagcaagtccccatggagctggtgcagcggggcgatatcgtcaaggtggtccctgggggaaagtttccagtggatgggaaagtcctggaaggcaataccatggctgatgagtccctcatcacaggagaagccatgccagtcactaagaaacccggaagcactgtaattgcgaggtctataaatgcacatggctctgtgctcattaaagctacccacgtgggcaatgacaccactttggctcagattgtgaaactggtggaagaggctcagatgtcaaaggcacccattcagcagctggctgaccggtttagtggatattttgtcccatttatcatcatcatgtcaactttgacgttggtggtatggattgtaatcggttttatcgattttggtgttgttcagaaatactttcctaaccccaacaagcacatctcccagacagaggtgatcatccggtttgctttccagacgtccatcacggtgctgtgcattgcctgcccctgctccctggggctggccacgcccacggctgtcatggtgggcaccggggtggccgcgcagaacggcatcctcatcaagggaggcaagcccctggagatggcgcacaagataaagactgtgatgtttgacaagactggcaccattacccatggcgtccccagggtcatgcgggtgctcctgctgggggatgtggccacactgcccctcaggaaggttctggctgtggtggggactgcggaggccagcagtgaacaccccttgggcgtggcagtcaccaaatactgtaaagaggaacttggaacagagaccttgggatactgcacggacttccaggcagtgccaggctgtggaattgggtgcaaagtcagcaacgtggaaggcatcctggcccacagtgagcgccctttgagtgcaccggccagtcacctgaatgaggctggcagccttcccgcagaaaaagatgcagtcccccagaccttctctgtgctgattggaaaccgtgagtggctgaggcgcaacggtttaaccatttctagcgatgtcagtgacgctatgacagaccacgagatgaaaggacagacagccatcctggtggctattgacggtgtgctctgtgggatgatcgcaatcgcagacgctgtcaagcaggaggctgccctggctgtgcacacgctgcagagcatgggtgtggacgtggttctgatcacgggggacaaccggaagacagccagagctattgccacccaggttggcatcaacaaagtctttgcagaggtgctgccttcgcacaaggtggccaaggtccaggagctccagaataaagggaagaaagtcgccatggtgggggatggggtcaatgactccccggccttggcccaggcagacatgggtgtggccattggcaccggcacggatgtggccatcgaggcagccgacgtcgtccttatcagaaatgatttgctggatgtggtggctagcattcacctttccaagaggactgtccgaaggatacgcatcaacctggtcctggcactgatttataacctggttgggatacccattgcagcaggtgtcttcatgcccatcggcattgtgctgcagccctggatgggctcagcggccatggcagcctcctctgtgtctgtggtgctctcatccctgcagctcaagtgaatggctcagatgctgttgcgttcctgctttccagctataagaagcctgacctggagaggtatgaggcacaggcgcatggccacatgaagcccctgacggcatcccaggtcagtgtgcacataggcatggatgacaggtggcgggactcccccagggccacaccatgggaccaggtcagctatgtcagccaggtgtcgctgtcctccctgacgtccgacaagccatctcggcacagcgctgcagcagacgatgatggggacaagtggtctctgctcctgaatggcagggatgaggagcagtacatctgatgacttcaggcaggcgggccggggcagggacttgcctccactcaccacaagctgagcaggacagccagcagcaggatgggctgagctagcctccagctttggggacttccgctccctggatatgtccagtcatcctgccctgcagcacgcggccttgtctgggtgcagctgggcttggcctggagaggacggccctgcctgcctcttggcctcacgggaccgtcagcatgggctttgtcttggactctagtccttggctggactgtagaaggtgagaggcgagtcaccctcctcacagacctctgcttggagtatttaggatgactgctgtgaaatggagaacagtttcatcaggaccaaaaaacctcactgggcctttccagagaactgcagacctcactgtcagggtctttctgatgacgcctgtctgtgtgcatcatgtttctgagaccacagtttacctcaggtgtgcctgttgctttcttcctgcatagtctgttcctttcttcgtacatagtctgttccttttctctcctgtgtgcttgtcagtggggacccctcgcaaccctgcctgtcacctgggagggtgggaccaatgtccttgtggtctttgctgctgctctcaggcgcttctccaatgctctggagtgtgcatttcagcttgaacctgcttcctggctcacacatccccagccagggagcttgccacactcttcttcaagttgaggagagttcttttttgcttaaagcccccttctccatggagtgttggcttctcaatagagtgttgttgctgaccagctggagtgagggcctcagagcctgacctgagagtccgtactcggcttcctgtggggtgtaggttctcgcgattcaggacgtccttccatatccctgcccagcctgtggtgcttgaaacgtttgccccatgggaaacgtatgtgtgcaggagcctccctgcacggcccaaggggcttcgttttcagtcttctgactgtcacctcgtggggttcagtagagaattcatgtgactagcgcctggccttgtgtggcttggaggaaatggtactgcccaaataggaggaaaacacagcctccctgagcctgcattctgcacgctgcccaggggcttcagaaaaggagtggccacagcaccccgaagggagcatctgtttacctggcagtggctctcagagcagcagaacgggttcagttttagactctgaagttggttgtgattgacagaaccctttgggagcaaactagtagagttggattaaattctgggtgaaacccttttctcccacacaaaatagttttagtgatttttttcattgtccattacttgccaggggcagttttagcagcacttttgatagattacgtctaatcctcccaaccaaccagcagggtagctattactgtccacattttacaggcaaggaaacaggctccaagaggctgaggactttgcccaggatgacatagccaatggacaagcagtgtctgtcagctgtgaaggcttcactcttattgtccttctaccttgaatagaagttttcctgataagaataaacgaggaaaaggtccttgcctcctggaagaacaaatctaccaggtgatctattcattgtttcaactcagaatgcacttgattcaggaggtcatctgaccttcaccttggatggttagtttcactttttacatatagtttttgcagggttttattttataaaatccaagcgcgctgttgattgtgttttccttgttttcagcccccccactccagcccgcagcacatttccgctgtccgtcagtaattgtgtcctctctttatgcttgcttggggaatgttgttttctgactaggctgatcattatctaaagaatctaattctgttgatttttaaaacttttaggaccataaacgttgtgttcatatatggacatggaaatatttatataattttatagaaaataaccttttagatggtcaaagtgtaaggagtttttttgtcagataatcatttctacttcaaaaacatttcatgcaatattagaataaagttcctgtcattcctctaaaaaaat

SEQ ID NO: 333456 - DNA, 2660 bp, Homo sapiens
ctgtgtatgatctatcacttttttatttaaaaaagatgttcacttatttatgagtgcattcatttaacaaaagttagtggcagcctacaatgtgcaaggcatttgcttaggaagtttctaaatcaggtgagctttcctggaaccatagggagtttaatgtccttttccttggaaactcttgaggttttgatactgaatgttattaaaagatggatgagaggccttcaccaggcttagaaaaaaaaaaagccttgtttctagaatggctcagatgctgttgcgttcctgctttccagctataagaagcctgacctggagaggtatgaggcacaggcgcatggccacatgaagcccctgacggcatcccaggtcagtgtgcacataggcatggatgacaggtggcgggactcccccagggccacaccatgggaccaggtcagctatgtcagccaggtgtcgctgtcctccctgacgtccgacaagccatctcggcacagcgctgcagcagacgatgatggggacaagtggtctctgctcctgaatggcagggatgaggagcagtacatctgatgacttcaggcaggcgggccggggcagggacttgcctccactcaccacaagctgagcaggacagccagcagcaggatgggctgagctagcctccagctttggggacttccgctccctggatatgtccagtcatcctgccctgcagcacgcggccttgtctgggtgcagctgggcttggcctggagaggacggccctgcctgcctcttggcctcacgggaccgtcagcatgggctttgtcttggactctagtccttggctggactgtagaaggtgagaggcgagtcaccctcctcacagacctctgcttggagtatttaggatgactgctgtgaaatggagaacagtttcatcaggaccaaaaaacctcactgggcctttccagagaactgcagacctcactgtcagggtctttctgatgacgcctgtctgtgtgcatcatgtttctgagaccacagtttacctcaggtgtgcctgttgctttcttcctgcatagtctgttcctttcttcgtacatagtctgttccttttctctcctgtgtgcttgtcagtggggacccctcgcaaccctgcctgtcacctgggagggtgggaccaatgtccttgtggtctttgctgctgctctcaggcgcttctccaatgctctggagtgtgcatttcagcttgaacctgcttcctggctcacacatccccagccagggagcttgccacactcttcttcaagttgaggagagttcttttttgcttaaagcccccttctccatggagtgttggcttctcaatagagtgttgttgctgaccagctggagtgagggcctcagagcctgacctgagagtccgtactcggcttcctgtggggtgtaggttctcgcgattcaggacgtccttccatatccctgcccagcctgtggtgcttgaaacgtttgccccatgggaaacgtatgtgtgcaggagcctccctgcacggcccaaggggcttcgttttcagtcttctgactgtcacctcgtggggttcagtagagaattcatgtgactagcgcctggccttgtgtggcttggaggaaatggtactgcccaaataggaggaaaacacagcctccctgagcctgcattctgcacgctgcccaggggcttcagaaaaggagtggccacagcaccccgaagggagcatctgtttacctggcagtggctctcagagcagcagaacgggttcagttttagactctgaagttggttgtgattgacagaaccctttgggagcaaactagtagagttggattaaattctgggtgaaacccttttctcccacacaaaatagttttagtgatttttttcattgtccattacttgccaggggcagttttagcagcacttttgatagattacgtctaatcctcccaaccaaccagcagggtagctattactgtccacattttacaggcaaggaaacaggctccaagaggctgaggactttgcccaggatgacatagccaatggacaagcagtgtctgtcagctgtgaaggcttcactcttattgtccttctaccttgaatagaagttttcctgataagaataaacgaggaaaaggtccttgcctcctggaagaacaaatctaccaggtgatctattcattgtttcaactcagaatgcacttgattcaggaggtcatctgaccttcaccttggatggttagtttcactttttacatatagtttttgcagggttttattttataaaatccaagcgcgctgttgattgtgttttccttgttttcagcccccccactccagcccgcagcacatttccgctgtccgtcagtaattgtgtcctctctttatgcttgcttggggaatgttgttttctgactaggctgatcattatctaaagaatctaattctgttgatttttaaaacttttaggaccataaacgttgtgttcatatatggacatggaaatatttatataattttatagaaaataaccttttagatggtcaaagtgtaaggagtttttttgtcagataatcatttctacttcaaaaacatttcatgcaatattagaataaagttcctgtcattcctctaaaaaaat

SEQ ID NO: 333457 - DNA, 4720 bp, Homo sapiens
  misc_feature (449)..(449): n is a, c, g, or t
  misc_feature (4619)..(4619): n is a, c, g, or t
ttcccggacccctgtttgctttagagccgagccgcgccgcgccgatgccctcacactctgcgcctcctctcccgggactttaacaccacgctctcctccaccgaccaggtgaccttttgctctgagccagatcagagaagaattcggtgtccgtgcgggacgatgcctgagcaggagagacagatcacagccagagaaggggccagtcggaaaatcttatctaagctttctttgcctacccgtgcctgggaaccagcaatgaagaagagttttgcttttgacaatgttggctatgaaggtggtctggatggcctgggcccttcttctcaggtggccaccagcacagtcaggatcttgggcatgacttgccagtcatgtgtgaagtccattgaggacaggatttccaatttgaaaggcatcatcagcatgaaggtttccctggaacaagncagtgccactgtgaaatatgtgccatcggttgtgtgcctgcaacaggtttgccatcaaattggggacatgggcttcgaggccagcattgcagaaggaaaggcagcctcctggccctcaaggtccttgcctgcccaggaggctgtggtcaagctccgggtggagggcatgacctgccagtcctgtgtcagctccattgaaggcaaggtccggaaactgcaaggagtagtgagagtcaaagtctcactcagcaaccaagaggccgtcatcacttatcagccttatctcattcagcccgaagacctcagggaccatgtaaatgacatgggatttgaagctgccatcaagagcaaagtggctcccttaagcctgggaccaattgatattgagcggttacaaagcactaacccaaagagacctttatcttctgctaaccagaattttaataattctgagaccttggggcaccaaggaagccatgtggtcaccctccaactgagaatagatggaatgcattgtaagtcttgcgtcttgaatattgaagaaaatattggccagctcctaggggttcaaagtattcaagtgtccttggagaacaaaactgcccaagtaaagtatgacccttcttgtaccagcccagtggctctgcagagggctatcgaggcacttccacctgggaattttaaagtttctcttcctgatggagccgaagggagtgggacagatcacaggtcttccagttctcattcccctggctccccaccgagaaaccaggtccagggcacatgcagtaccactctgattgccattgccggcatgacctgtgcatcctgtgtccattccattgaaggcatgatctcccaactggaaggggtgcagcaaatatcggtgtctttggccgaagggactgcaacagttctttataatccctctgtaattagcccagaagaactcagagctgctatagaagacatgggatttgaggcttcagtcgtttctgaaagctgttctactaaccctcttggaaaccacagtgctgggaattccatggtgcaaactacagatggtacacctacatctgtgcaggaagtggctccccacactgggaggctccctgcaaaccatgccccggacatcttggcaaagtccccacaatcaaccagagcagtggcaccgcagaagtgcttcttacagatcaaaggcatgacctgtgcatcctgtgtgtctaacatagaaaggaatctgcagaaagaagctggtgttctctccgtgttggttgccttgatggcaggaaaggcagagatcaagtatgacccagaggtcatccagcccctcgagatagctcagttcatccaggacctgggttttgaggcagcagtcatggaggactacgcaggctccgatggcaacattgagctgacaatcacagggatgacctgcgcgtcctgtgtccacaacatagagtccaaactcacgaggacaaatggcatcacttatgcctccgttgcccttgccaccagcaaagcccttgttaagtttgacccggaaattatcggtccacgggatattatcaaaattattgaggaaattggctttcatgcttccctggcccagagaaaccccaacgctcatcacttggaccacaagatggaaataaagcagtggaagaagtctttcctgtgcagcctggtgtttggcatccctgtcatggccttaatgatctatatgctgatacccagcaacgagccccaccagtccatggtcctggaccacaacatcattccaggactgtccattctaaatctcatcttctttatcttgtgtacctttgtccagctcctcggtgggtggtacttctacgttcaggcctacaaatctctgagacacaggtcagccaacatggacgtgctcatcgtcctggccacaagcattgcttatgtttattctctggtcatcctggtggttgctgtggctgagaaggcggagaggagccctgtgacattcttcgacacgccccccatgctctttgtgttcattgccctgggccggtggctggaacacttggcaaagagcaaaacctcagaagccctggctaaactcatgtctctccaagccacagaagccaccgttgtgacccttggtgaggacaatttaatcatcagggaggagcaagtccccatggagctggtgcagcggggcgatatcgtcaaggtggtccctgggggaaagtttccagtggatgggaaagtcctggaaggcaataccatggctgatgagtccctcatcacaggagaagccatgccagtcactaagaaacccggaagcactgtaattgcgaggtctataaatgcacatggctctgtgctcattaaagctacccacgtgggcaatgacaccactttggctcagattgtgaaactggtggaagaggctcagatgtcaaaggcacccattcagcagctggctgaccggtttagtggatattttgtcccatttatcatcatcatgtcaactttgacgttggtggtatggattgtaatcggttttatcgattttggtgttgttcagaaatactttcctaaccccaacaagcacatctcccagacagaggtgatcatccggtttgctttccagacgtccatcacggtgctgtgcattgcctgcccctgctccctggggctggccacgcccacggctgtcatggtgggcaccggggtggccgcgcagaacggcatcctcatcaagggaggcaagcccctggagatggcgcacaagataaagactgtgatgtttgacaagactggcaccattacccatggcgtccccagggtcatgcgggtgctcctgctgggggatgtggccacactgcccctcaggaaggttctggctgtggtggggactgcggaggccagcagtgaacaccccttgggcgtggcagtcaccaaatactgtaaagaggaacttggaacagagaccttgggatactgcacggacttccaggcagtgccaggctgtggaattgggtgcaaagtcagcaacgtggaaggcatcctggcccacagtgagcgccctttgagtgcaccggccagtcacctgaatgaggctggcagccttcccgcagaaaaagatgcagtcccccagaccttctctgtgctgattggaaaccgtgagtggctgaggcgcaacggtttaaccatttctagcgatgtcagtgacgctatgacagaccacgagatgaaaggacagacagccatcctggtggctattgacggtgtgctctgtgggatgatcgcaatcgcagacgctgtcaagcaggaggctgccctggctgtgcacacgctgcagagcatgggtgtggacgtggttctgatcacgggggacaaccggaagacagccagagctattgccacccaggttggcatcaacaaagtctttgcagaggtgctgccttcgcacaaggtggccaaggtccaggagctccagaataaagggaagaaagtcgccatggtgggggatggggtcaatgactccccggccttggcccaggcagacatgggtgtggccattggcaccggcacggatgtggccatcgaggcagccgacgtcgtccttatcagaaatgatttgctggatgtggtggctagcattcacctttccaagaggactgtccgaaggatacgcatcaacctggtcctggcactgatttataacctggttgggatacccattgcagcaggtgtcttcatgcccatcggcattgtgctgcagccctggatgggctcagcggccatggcagcctcctctgtgtctgtggtgctctcatccctgcagctcaagtgaatggctcagatgctgttgcgttcctgctttccagctataagaagcctgacctggagaggtatgaggcacaggcgcatggccacatgaagcccctgacggcatcccaggtcagtgtgcacataggcatggatgacaggtggcgggactcccccagggccacaccatgggaccaggtcagctatgtcagccaggtgtcgctgtcctccctgacgtccgacaagccatctcggcacagcgctgcagcagacgatgatggggacaagtggtctctgctcctgaatggcagggatgaggagcagtacatctgatgacttcaggcaggcgggcgggcngggttggcttccctcccacggtgggcggacagcccggggtggttggtaccccttaggggtcccgcccggtttcgtctgccggagcctgttgggcctggtgg

SEQ ID NO: 333458 - DNA, 2118 bp, Homo sapiens
  misc_feature (449)..(449): n is a, c, g, or t
ttcccggacccctgtttgctttagagccgagccgcgccgcgccgatgccctcacactctgcgcctcctctcccgggactttaacaccacgctctcctccaccgaccaggtgaccttttgctctgagccagatcagagaagaattcggtgtccgtgcgggacgatgcctgagcaggagagacagatcacagccagagaaggggccagtcggaaaatcttatctaagctttctttgcctacccgtgcctgggaaccagcaatgaagaagagttttgcttttgacaatgttggctatgaaggtggtctggatggcctgggcccttcttctcaggtggccaccagcacagtcaggatcttgggcatgacttgccagtcatgtgtgaagtccattgaggacaggatttccaatttgaaaggcatcatcagcatgaaggtttccctggaacaagncagtgccactgtgaaatatgtgccatcggttgtgtgcctgcaacaggtttgccatcaaattggggacatgggcttcgaggccagcattgcagaaggaaaggcagcctcctggccctcaaggtccttgcctgcccaggaggctgtggtcaagctccgggtggagggcatgacctgccagtcctgtgtcagctccattgaaggcaaggtccggaaactgcaaggagtagtgagagtcaaagtctcactcagcaaccaagaggccgtcatcacttatcagccttatctcattcagcccgaagacctcagggaccatgtaaatgacatgggatttgaagctgccatcaagagcaaagtggctcccttaagcctgggaccaattgatattgagcggttacaaagcactaacccaaagagacctttatcttctgctaaccagaattttaataattctgagaccttggggcaccaaggaagccatgtggtcaccctccaactgagaatagatggaatgcattgtaagtcttgcgtcttgaatattgaagaaaatattggccagctcctaggggttcaaagtattcaagtgtccttggagaacaaaactgcccaagtaaagtatgacccttcttgtaccagcccagtggctctgcagagggctatcgaggcacttccacctgggaattttaaagtttctcttcctgatggagccgaagggagtgggacagatcacaggtcttccagttctcattcccctggctccccaccgagaaaccaggtccagggcacatgcagtaccactctgattgccattgccggcatgacctgtgcatcctgtgtccattccattgaaggcatgatctcccaactggaaggggtgcagcaaatatcggtgtctttggccgaagggactgcaacagttctttataatccctctgtaattagcccagaagaactcagagctgctatagaagacatgggatttgaggcttcagtcgtttctgaaagctgttctactaaccctcttggaaaccacagtgctgggaattccatggtgcaaactacagatggtacacctacatctgtgcaggaagtggctccccacactgggaggctccctgcaaaccatgccccggacatcttggcaaagtccccacaatcaaccagagcagtggcaccgcagaagtgcttcttacagatcaaaggcatgacctgtgcatcctgtgtgtctaacatagaaaggaatctgcagaaagaagctggtgttctctccgtgttggttgccttgatggcaggaaaggcagagatcaagtatgacccagaggtcatccagcccctcgagatagctcagttcatccaggacctgggttttgaggcagcagtcatggaggactacgcaggctccgatggcaacattgagctgacaatcacagggatgacctgcgcgtcctgtgtccacaacatagagtccaaactcacgaggacaaatggcatcacttatgcctccgttgcccttgccaccagcaaagcccttgttaagtttgacccggaaattatcggtccacgggatattatcaaaattattgaggtaagtaattcattaaaaaattgtagtcacctttttaaaaacagtaatatataatcagtgaagaaaaatgagaaaatatagctaaga

SEQ ID NO: 333459 - DNA, 6650 bp, Homo sapiens
  misc_feature (449)..(449): n is a, c, g, or t
ttcccggacccctgtttgctttagagccgagccgcgccgcgccgatgccctcacactctgcgcctcctctcccgggactttaacaccacgctctcctccaccgaccaggtgaccttttgctctgagccagatcagagaagaattcggtgtccgtgcgggacgatgcctgagcaggagagacagatcacagccagagaaggggccagtcggaaaatcttatctaagctttctttgcctacccgtgcctgggaaccagcaatgaagaagagttttgcttttgacaatgttggctatgaaggtggtctggatggcctgggcccttcttctcaggtggccaccagcacagtcaggatcttgggcatgacttgccagtcatgtgtgaagtccattgaggacaggatttccaatttgaaaggcatcatcagcatgaaggtttccctggaacaagncagtgccactgtgaaatatgtgccatcggttgtgtgcctgcaacaggtttgccatcaaattggggacatgggcttcgaggccagcattgcagaaggaaaggcagcctcctggccctcaaggtccttgcctgcccaggaggctgtggtcaagctccgggtggagggcatgacctgccagtcctgtgtcagctccattgaaggcaaggtccggaaactgcaaggagtagtgagagtcaaagtctcactcagcaaccaagaggccgtcatcacttatcagccttatctcattcagcccgaagacctcagggaccatgtaaatgacatgggatttgaagctgccatcaagagcaaagtggctcccttaagcctgggaccaattgatattgagcggttacaaagcactaacccaaagagacctttatcttctgctaaccagaattttaataattctgagaccttggggcaccaaggaagccatgtggtcaccctccaactgagaatagatggaatgcattgtaagtcttgcgtcttgaatattgaagaaaatattggccagctcctaggggttcaaagtattcaagtgtccttggagaacaaaactgcccaagtaaagtatgacccttcttgtaccagcccagtggctctgcagagggctatcgaggcacttccacctgggaattttaaagtttctcttcctgatggagccgaagggagtgggacagatcacaggtcttccagttctcattcccctggctccccaccgagaaaccaggtccagggcacatgcagtaccactctgattgccattgccggcatgacctgtgcatcctgtgtccattccattgaaggcatgatctcccaactggaaggggtgcagcaaatatcggtgtctttggccgaagggactgcaacagttctttataatccctctgtaattagcccagaagaactcagagctgctatagaagacatgggatttgaggcttcagtcgtttctgaaagctgttctactaaccctcttggaaaccacagtgctgggaattccatggtgcaaactacagatggtacacctacatctgtgcaggaagtggctccccacactgggaggctccctgcaaaccatgccccggacatcttggcaaagtccccacaatcaaccagagcagtggcaccgcagaagtgcttcttacagatcaaaggcatgacctgtgcatcctgtgtgtctaacatagaaaggaatctgcagaaagaagctggtgttctctccgtgttggttgccttgatggcaggaaaggcagagatcaagtatgacccagaggtcatccagcccctcgagatagctcagttcatccaggacctgggttttgaggcagcagtcatggaggactacgcaggctccgatggcaacattgagctgacaatcacagggatgacctgcgcgtcctgtgtccacaacatagagtccaaactcacgaggacaaatggcatcacttatgcctccgttgcccttgccaccagcaaagcccttgttaagtttgacccggaaattatcggtccacgggatattatcaaaattattgaggaaattggctttcatgcttccctggcccagagaaaccccaacgctcatcacttggaccacaagatggaaataaagcagtggaagaagtctttcctgtgcagcctggtgtttggcatccctgtcatggccttaatgatctatatgctgatacccagcaacgagccccaccagtccatggtcctggaccacaacatcattccaggactgtccattctaaatctcatcttctttatcttgtgtacctttgtccagctcctcggtgggtggtacttctacgttcaggcctacaaatctctgagacacaggtcagccaacatggacgtgctcatcgtcctggccacaagcattgcttatgtttattctctggtcatcctggtggttgctgtggctgagaaggcggagaggagccctgtgacattcttcgacacgccccccatgctctttgtgttcattgccctgggccggtggctggaacacttggcaaagagcaaaacctcagaagccctggctaaactcatgtctctccaagccacagaagccaccgttgtgacccttggtgaggacaatttaatcatcagggaggagcaagtccccatggagctggtgcagcggggcgatatcgtcaaggtggtccctgggggaaagtttccagtggatgggaaagtcctggaaggcaataccatggctgatgagtccctcatcacaggagaagccatgccagtcactaagaaacccggaagcactgtaattgcgaggtctataaatgcacatggctctgtgctcattaaagctacccacgtgggcaatgacaccactttggctcagattgtgaaactggtggaagaggctcagatgtcaaaggcacccattcagcagctggctgaccggtttagtggatattttgtcccatttatcatcatcatgtcaactttgacgttggtggtatggattgtaatcggttttatcgattttggtgttgttcagaaatactttcctaaccccaacaagcacatctcccagacagaggtgatcatccggtttgctttccagacgtccatcacggtgctgtgcattgcctgcccctgctccctggggctggccacgcccacggctgtcatggtgggcaccggggtggccgcgcagaacggcatcctcatcaagggaggcaagcccctggagatggcgcacaagataaagactgtgatgtttgacaagactggcaccattacccatggcgtccccagggtcatgcgggtgctcctgctgggggatgtggccacactgcccctcaggaaggttctggctgtggtggggactgcggaggccagcagtgaacaccccttgggcgtggcagtcaccaaatactgtaaagaggaacttggaacagagaccttgggatactgcacggacttccaggcagtgccaggctgtggaattgggtgcaaagtcagcaacgtggaaggcatcctggcccacagtgagcgccctttgagtgcaccggccagtcacctgaatgaggctggcagccttcccgcagaaaaagatgcagtcccccagaccttctctgtgctgattggaaaccgtgagtggctgaggcgcaacggtttaaccatttctagcgatgtcagtgacgctatgacagaccacgagatgaaaggacagacagccatcctggtggctattgacggtgtgctctgtgggatgatcgcaatcgcagacgctgtcaagcaggaggctgccctggctgtgcacacgctgcagagcatgggtgtggacgtggttctgatcacgggggacaaccggaagacagccagagctattgccacccaggttggcatcaacaaagtctttgcagaggtgctgccttcgcacaaggtggccaaggtccaggagctccagaataaagggaagaaagtcgccatggtgggggatggggtcaatgactccccggccttggcccaggcagacatgggtgtggccattggcaccggcacggatgtggccatcgaggcagccgacgtcgtccttatcagaaatgatttgctggatgtggtggctagcattcacctttccaagaggactgtccgaaggatacgcatcaacctggtcctggcactgatttataacctggttgggatacccattgcagcaggtgtcttcatgcccatcggcattgtgctgcagccctggatgggctcagcggccatggcagcctcctctgtgtctgtggtgctctcatccctgcagctcaagtgctataagaagcctgacctggagaggtatgaggcacaggcgcatggccacatgaagcccctgacggcatcccaggtcagtgtgcacataggcatggatgacaggtggcgggactcccccagggccacaccatgggaccaggtcagctatgtcagccaggtgtcgctgtcctccctgacgtccgacaagccatctcggcacagcgctgcagcagacgatgatggggacaagtggtctctgctcctgaatggcagggatgaggagcagtacatctgatgacttcaggcaggcgggccggggcagggacttgcctccactcaccacaagctgagcaggacagccagcagcaggatgggctgagctagcctccagctttggggacttccgctccctggatatgtccagtcatcctgccctgcagcacgcggccttgtctgggtgcagctgggcttggcctggagaggacggccctgcctgcctcttggcctcacgggaccgtcagcatgggctttgtcttggactctagtccttggctggactgtagaaggtgagaggcgagtcaccctcctcacagacctctgcttggagtatttaggatgactgctgtgaaatggagaacagtttcatcaggaccaaaaaacctcactgggcctttccagagaactgcagacctcactgtcagggtctttctgatgacgcctgtctgtgtgcatcatgtttctgagaccacagtttacctcaggtgtgcctgttgctttcttcctgcatagtctgttcctttcttcgtacatagtctgttccttttctctcctgtgtgcttgtcagtggggacccctcgcaaccctgcctgtcacctgggagggtgggaccaatgtccttgtggtctttgctgctgctctcaggcgcttctccaatgctctggagtgtgcatttcagcttgaacctgcttcctggctcacacatccccagccagggagcttgccacactcttcttcaagttgaggagagttcttttttgcttaaagcccccttctccatggagtgttggcttctcaatagagtgttgttgctgaccagctggagtgagggcctcagagcctgacctgagagtccgtactcggcttcctgtggggtgtaggttctcgcgattcaggacgtccttccatatccctgcccagcctgtggtgcttgaaacgtttgccccatgggaaacgtatgtgtgcaggagcctccctgcacggcccaaggggcttcgttttcagtcttctgactgtcacctcgtggggttcagtagagaattcatgtgactagcgcctggccttgtgtggcttggaggaaatggtactgcccaaataggaggaaaacacagcctccctgagcctgcattctgcacgctgcccaggggcttcagaaaaggagtggccacagcaccccgaagggagcatctgtttacctggcagtggctctcagagcagcagaacgggttcagttttagactctgaagttggttgtgattgacagaaccctttgggagcaaactagtagagttggattaaattctgggtgaaacccttttctcccacacaaaatagttttagtgatttttttcattgtccattacttgccaggggcagttttagcagcacttttgatagattacgtctaatcctcccaaccaaccagcagggtagctattactgtccacattttacaggcaaggaaacaggctccaagaggctgaggactttgcccaggatgacatagccaatggacaagcagtgtctgtcagctgtgaaggcttcactcttattgtccttctaccttgaatagaagttttcctgataagaataaacgaggaaaaggtccttgcctcctggaagaacaaatctaccaggtgatctattcattgtttcaactcagaatgcacttgattcaggaggtcatctgaccttcaccttggatggttagtttcactttttacatatagtttttgcagggttttattttataaaatccaagcgcgctgttgattgtgttttccttgttttcagcccccccactccagcccgcagcacatttccgctgtccgtcagtaattgtgtcctctctttatgcttgcttggggaatgttgttttctgactaggctgatcattatctaaagaatctaattctgttgatttttaaaacttttaggaccataaacgttgtgttcatatatggacatggaaatatttatataattttatagaaaataaccttttagatggtcaaagtgtaaggagtttttttgtcagataatcatttctacttcaaaaacatttcatgcaatattagaataaagttcctgtcattcctctaaaaaaat

SEQ ID NO: 333460 - DNA, 5678 bp, Homo sapiens
  misc_feature (449)..(449): n is a, c, g, or t
ttcccggacccctgtttgctttagagccgagccgcgccgcgccgatgccctcacactctgcgcctcctctcccgggactttaacaccacgctctcctccaccgaccaggtgaccttttgctctgagccagatcagagaagaattcggtgtccgtgcgggacgatgcctgagcaggagagacagatcacagccagagaaggggccagtcggaaaatcttatctaagctttctttgcctacccgtgcctgggaaccagcaatgaagaagagttttgcttttgacaatgttggctatgaaggtggtctggatggcctgggcccttcttctcaggtggccaccagcacagtcaggatcttgggcatgacttgccagtcatgtgtgaagtccattgaggacaggatttccaatttgaaaggcatcatcagcatgaaggtttccctggaacaagncagtgccactgtgaaatatgtgccatcggttgtgtgcctgcaacaggtttgccatcaaattggggacatgggcttcgaggccagcattgcagaaggaaaggcagcctcctggccctcaaggtccttgcctgcccaggaggctgtggtcaagctccgggtggagggcatgacctgccagtcctgtgtcagctccattgaaggcaaggtccggaaactgcaaggagtagtgagagtcaaagtctcactcagcaaccaagaggccgtcatcacttatcagccttatctcattcagcccgaagacctcagggaccatgtaaatgacatgggatttgaagctgccatcaagagcaaagtggctcccttaagcctgggaccaattgatattgagcggttacaaagcactaacccaaagagacctttatcttctgctaaccagaattttaataattctgagaccttggggcaccaaggaagccatgtggtcaccctccaactgagaatagatggaatgcattgtaagtcttgcgtcttgaatattgaagaaaatattggccagctcctaggggttcaaagtattcaagtgtccttggagaacaaaactgcccaagtaaagtatgacccttcttgtaccagcccagtggctctgcagagggctatcgaggcacttccacctgggaattttaaagtttctcttcctgatggagccgaagggagtgggacagatcacaggtcttccagttctcattcccctggctccccaccgagaaaccaggtccagggcacatgcagtaccactctgattgccattgccggcatgacctgtgcatcctgtgtccattccattgaaggcatgatctcccaactggaaggggtgcagcaaatatcggtgtctttggccgaagggactgcaacagttctttataatccctctgtaattagcccagaagaactcagagctgctatagaagacatgggatttgaggcttcagtcgtttctgaaagctgttctactaaccctcttggaaaccacagtgctgggaattccatggtgcaaactacagatggtacacctacatctgtgcaggaagtggctccccacactgggaggctccctgcaaaccatgccccggacatcttggcaaagtccccacaatcaaccagagcagtggcaccgcagaagtgcttcttacagatcaaaggcatgacctgtgcatcctgtgtgtctaacatagaaaggaatctgcagaaagaagctggtgttctctccgtgttggttgccttgatggcaggaaaggcagagatcaagtatgacccagaggtcatccagcccctcgagatagctcagttcatccaggacctgggttttgaggcagcagtcatggaggactacgcaggctccgatggcaacattgagctgacaatcacagggatgacctgcgcgtcctgtgtccacaacatagagtccaaactcacgaggacaaatggcatcacttatgcctccgttgcccttgccaccagcaaagcccttgttaagtttgacccggaaattatcggtccacgggatattatcaaaattattgaggaaattggctttcatgcttccctggcccagagaaaccccaacgctcatcacttggaccacaagatggaaataaagcagtggaagaagtctttcctgtgcagcctggtgtttggcatccctgtcatggccttaatgatctatatgctgatacccagcaacgagccccaccagtccatggtcctggaccacaacatcattccaggactgtccattctaaatctcatcttctttatcttgtgtacctttgtccagctcctcggtgggtggtacttctacgttcaggcctacaaatctctgagacacaggtcagccaacatggacgtgctcatcgtcctggccacaagcattgcttatgtttattctctggtcatcctggtggttgctgtggctgagaaggcggagaggagccctgtgacattcttcgacacgccccccatgctctttgtgttcattgccctgggccggtggctggaacacttggcaaagagcaaaacctcagaagccctggctaaactcatgtctctccaagccacagaagccaccgttgtgacccttggtgaggacaatttaatcatcagggaggagcaagtccccatggagctggtgcagcggggcgatatcgtcaaggtggtccctgggggaaagtttccagtggatgggaaagtcctggaaggcaataccatggctgatgagtccctcatcacaggagaagccatgccagtcactaagaaacccggaagcactgtaattgcgaggtctataaatgcacatggctctgtgctcattaaagctacccacgtgggcaatgacaccactttggctcagattgtgaaactggtggaagaggctcagatgtcaaaggcacccattcagcagctggctgaccggtttagtggatattttgtcccatttatcatcatcatgtcaactttgacgttggtggtatggattgtaatcggttttatcgattttggtgttgttcagaaatactttcctaaccccaacaagcacatctcccagacagaggtgatcatccggtttgctttccagacgtccatcacggtgctgtgcattgcctgcccctgctccctggggctggccacgcccacggctgtcatggtgggcaccggggtggccgcgcagaacggcatcctcatcaagggaggcaagcccctggagatggcgcacaagataaagactgtgatgtttgacaagactggcaccattacccatggcgtccccagggtcatgcgggtgctcctgctgggggatgtggccacactgcccctcaggaaggttctggctgtggtggggactgcggaggccagcagtgaacaccccttgggcgtggcagtcaccaaatactgtaaagaggaacttggaacagagaccttgggatactgcacggacttccaggcagtgccaggctgtggaattgggtgcaaagtcagcaacgtggaaggcatcctggcccacagtgagcgccctttgagtgcaccggccagtcacctgaatgaggctggcagccttcccgcagaaaaagatgcagtcccccagaccttctctgtgctgattggaaaccgtgagtggctgaggcgcaacggtttaaccatttctagcgatgtcagtgacgctatgacagaccacgagatgaaaggacagacagccatcctggtggctattgacggtgtgctctgtgggatgatcgcaatcgcagacgctgtcaagcaggaggctgccctggctgtgcacacgctgcagagcatgggtgtggacgtggttctgatcacgggggacaaccggaagacagccagagctattgccacccaggttggcatcaacaaagtctttgcagaggtgctgccttcgcacaaggtggccaaggtccaggagctccagaataaagggaagaaagtcgccatggtgggggatggggtcaatgactccccggccttggcccaggcagacatgggtgtggccattggcaccggcacggatgtggccatcgaggcagccgacgtcgtccttatcagaaatgatttgctggatgtggtggctagcattcacctttccaagaggactgtccgaaggatacgcatcaacctggtcctggcactgatttataacctggttgggatacccattgcagcaggtgtcttcatgcccatcggcattgtgctgcagccctggatgggctcagcggccatggcagcctcctctgtgtctgtggtgctctcatccctgcagctcaagtgctataagaagcctgacctggagaggtatgaggcacaggcgcatggccacatgaagcccctgacggcatcccaggtcagtgtgcacataggcatggatgacaggtggcgggactcccccagggccacaccatgggaccaggtcagctatgtcagccaggtgtcgctgtcctccctgacgtccgacaagccatctcggcacagcgctgcagcagacgatgatggggacaagtggtctctgctcctgaatggcagggatgaggagcagtacatctgatgacttcaggcaggcgggccggggcagggacttgcctccactcaccacaagctgagcaggacagccagcagcaggatgggctgagctagcctccagctttggggacttccgctccctggatatgtccagtcatcctgccctgcagcacgcggccttgtctgggtgcagctgggcttggcctggagaggacggccctgcctgcctcttggcctcacgggaccgtcagcatgggctttgtcttggactctagtccttggctggactgtagaaggtgagaggcgagtcaccctcctcacagacctctgcttggagtatttaggatgactgctgtgaaatggagaacagtttcatcaggaccaaaaaacctcactgggcctttccagagaactgcagacctcactgtcagggtctttctgatgacgcctgtctgtgtgcatcatgtttctgagaccacagtttacctcaggcaaggaaacaggctccaagaggctgaggactttgcccaggatgacatagccaatggacaagcagtgtctgtcagctgtgaaggcttcactcttattgtccttctaccttgaatagaagttttcctgataagaataaacgaggaaaaggtccttgcctcctggaagaacaaatctaccaggtgatctattcattgtttcaactcagaatgcacttgattcaggaggtcatctgaccttcaccttggatggttagtttcactttttacatatagtttttgcagggttttattttataaaatccaagcgcgctgttgattgtgttttccttgttttcagcccccccactccagcccgcagcacatttccgctgtccgtcagtaattgtgtcctctctttatgcttgcttggggaatgttgttttctgactaggctgatcattatctaaagaatctaattctgttgatttttaaaacttttaggaccataaacgttgtgttcatatatggacatggaaatatttatataattttatagaaaataaccttttagatggtcaaagtgtaaggagtttttttgtcagataatcatttctacttcaaaaacatttcatgcaatattagaataaagttcctgtcattcctctaaaaaaat

SEQ ID NO: 333461 - DNA, 3708 bp, Homo sapiens
cccctgaaatgtccttatgtgattagagttctgggagcttccttattgaactctcaacctgcctctgactctgtcctgttttcagaaccccaacaagcacatctcccagacagaggtgatcatccggtttgctttccagacgtccatcacggtgctgtgcattgcctgcccctgctccctggggctggccacgcccacggctgtcatggtgggcaccggggtggccgcgcagaacggcatcctcatcaagggaggcaagcccctggagatggcgcacaagataaagactgtgatgtttgacaagactggcaccattacccatggcgtccccagggtcatgcgggtgctcctgctgggggatgtggccacactgcccctcaggaaggttctggctgtggtggggactgcggaggccagcagtgaacaccccttgggcgtggcagtcaccaaatactgtaaagaggaacttggaacagagaccttgggatactgcacggacttccaggcagtgccaggctgtggaattgggtgcaaagtcagcaacgtggaaggcatcctggcccacagtgagcgccctttgagtgcaccggccagtcacctgaatgaggctggcagccttcccgcagaaaaagatgcagtcccccagaccttctctgtgctgattggaaaccgtgagtggctgaggcgcaacggtttaaccatttctagcgatgtcagtgacgctatgacagaccacgagatgaaaggacagacagccatcctggtggctattgacggtgtgctctgtgggatgatcgcaatcgcagacgctgtcaagcaggaggctgccctggctgtgcacacgctgcagagcatgggtgtggacgtggttctgatcacgggggacaaccggaagacagccagagctattgccacccaggttggcatcaacaaagtctttgcagaggtgctgccttcgcacaaggtggccaaggtccaggagctccagaataaagggaagaaagtcgccatggtgggggatggggtcaatgactccccggccttggcccaggcagacatgggtgtggccattggcaccggcacggatgtggccatcgaggcagccgacgtcgtccttatcagaaatgatttgctggatgtggtggctagcattcacctttccaagaggactgtccgaaggatacgcatcaacctggtcctggcactgatttataacctggttgggatacccattgcagcaggtgtcttcatgcccatcggcattgtgctgcagccctggatgggctcagcggccatggcagcctcctctgtgtctgtggtgctctcatccctgcagctcaagtgctataagaagcctgacctggagaggtatgaggcacaggcgcatggccacatgaagcccctgacggcatcccaggtcagtgtgcacataggcatggatgacaggtggcgggactcccccagggccacaccatgggaccaggtcagctatgtcagccaggtgtcgctgtcctccctgacgtccgacaagccatctcggcacagcgctgcagcagacgatgatggggacaagtggtctctgctcctgaatggcagggatgaggagcagtacatctgatgacttcaggcaggcgggccggggcagggacttgcctccactcaccacaagctgagcaggacagccagcagcaggatgggctgagctagcctccagctttggggacttccgctccctggatatgtccagtcatcctgccctgcagcacgcggccttgtctgggtgcagctgggcttggcctggagaggacggccctgcctgcctcttggcctcacgggaccgtcagcatgggctttgtcttggactctagtccttggctggactgtagaaggtgagaggcgagtcaccctcctcacagacctctgcttggagtatttaggatgactgctgtgaaatggagaacagtttcatcaggaccaaaaaacctcactgggcctttccagagaactgcagacctcactgtcagggtctttctgatgacgcctgtctgtgtgcatcatgtttctgagaccacagtttacctcaggtgtgcctgttgctttcttcctgcatagtctgttcctttcttcgtacatagtctgttccttttctctcctgtgtgcttgtcagtggggacccctcgcaaccctgcctgtcacctgggagggtgggaccaatgtccttgtggtctttgctgctgctctcaggcgcttctccaatgctctggagtgtgcatttcagcttgaacctgcttcctggctcacacatccccagccagggagcttgccacactcttcttcaagttgaggagagttcttttttgcttaaagcccccttctccatggagtgttggcttctcaatagagtgttgttgctgaccagctggagtgagggcctcagagcctgacctgagagtccgtactcggcttcctgtggggtgtaggttctcgcgattcaggacgtccttccatatccctgcccagcctgtggtgcttgaaacgtttgccccatgggaaacgtatgtgtgcaggagcctccctgcacggcccaaggggcttcgttttcagtcttctgactgtcacctcgtggggttcagtagagaattcatgtgactagcgcctggccttgtgtggcttggaggaaatggtactgcccaaataggaggaaaacacagcctccctgagcctgcattctgcacgctgcccaggggcttcagaaaaggagtggccacagcaccccgaagggagcatctgtttacctggcagtggctctcagagcagcagaacgggttcagttttagactctgaagttggttgtgattgacagaaccctttgggagcaaactagtagagttggattaaattctgggtgaaacccttttctcccacacaaaatagttttagtgatttttttcattgtccattacttgccaggggcagttttagcagcacttttgatagattacgtctaatcctcccaaccaaccagcagggtagctattactgtccacattttacaggcaaggaaacaggctccaagaggctgaggactttgcccaggatgacatagccaatggacaagcagtgtctgtcagctgtgaaggcttcactcttattgtccttctaccttgaatagaagttttcctgataagaataaacgaggaaaaggtccttgcctcctggaagaacaaatctaccaggtgatctattcattgtttcaactcagaatgcacttgattcaggaggtcatctgaccttcaccttggatggttagtttcactttttacatatagtttttgcagggttttattttataaaatccaagcgcgctgttgattgtgttttccttgttttcagcccccccactccagcccgcagcacatttccgctgtccgtcagtaattgtgtcctctctttatgcttgcttggggaatgttgttttctgactaggctgatcattatctaaagaatctaattctgttgatttttaaaacttttaggaccataaacgttgtgttcatatatggacatggaaatatttatataattttatagaaaataaccttttagatggtcaaagtgtaaggagtttttttgtcagataatcatttctacttcaaaaacatttcatgcaatattagaataaagttcctgtcattcctctaaaaaaat

SEQ ID NO: 333462 - DNA, 375 bp, Homo sapiens
aagaactgagtcgacaatgctatgtatacattaaatatagtacaaaatgtacatttaatatagtgtaagatgaaggccatcgttttattcagattcttgtgaatagcttcctgtgaaccccccccacccttcaaaaaataaataaaggtcgaaaaagcgaaataagcataaaatgccatctgtcccctcagtttcatctaaccctaaggattgaattatgggagtaaaggccagggtgattccctggaatatccccagcacatcctagaatttcttgtaactctcatatctggcatcttttacagtgtttctcttcaagggcactgttggcattcagggtgaaacaatccttggcatgataggatgtttgccctc

SEQ ID NO: 333463 - DNA, 305 bp, Homo sapiens
gggagggcaggaaataatgacgtttaactaatttctgcacataattatggagtatttgctgtgtacccaatattgctagtcattgcttataaggagataatgaacttacaagcaagacaacattcatacgaggaaccattaaatagaagatgatacgtaattaagtgccaaatgattggtacgaatctcatgaacagatgacttgtttcatgctgaagatcctgcacagagacagacgtgctttcataaggagacagactgtttgagatgatcaggatcagaacgggaagtcagggatatgtggt

SEQ ID NO: 333464 - DNA, 102 bp, Homo sapiens
aaaaaaaagctctcaagcctcttccctgcttaagaagtgacccagactcagtcccctgctctaaagcagccaggatagtcccaagaggaggctaggcagaag

SEQ ID NO: 333465 - DNA, 449 bp, Homo sapiens
ctcactgcctctctgcaaacctcttaatacccttagtcaattgtaagaagctgcttggaaccctgtaagatggtctttggccagatcaagtcttgctcctcttcctctgaatcttgtaggggcctttaatctttctgtaactgtgattccccagaacaggatgcctttgttagcctagcatcttttctgttacttctatgaaacaaggagagacgctccctgggacccttaactatttctggaagcaaaatgacccttgccccactgaagacttaggagcctggtcacttccaaccgggcttttcatctttgtgactctcagtcatgggcaagaggctagctagctccaatcctaatgcccgtgccatcaactgcttcatttctggtttcttccttgcttttgtgataccctcattgactctttccactgtaccctgtggaaaacttgc

SEQ ID NO: 333466 - DNA, 156 bp, Homo sapiens
ccattctccatacataagtagaaatgtggtacacttaacggaaattttagcttttttatatttttccattattatgtcctcatgtttgacatctttttttcttctagttgcttatcattaatatgatgcagacattttgtttaaaaagacctcatt

SEQ ID NO: 333467 - DNA, 375 bp, Homo sapiens
gctccactggcccttgttaaagagaagacaacttccagtgacatgtaactgacaagtgagcatgtcactggcatgtgggtaaatttcctcaaaagcatgaagagtaaagctgtgaataagaatcataatattaatagtttaatgaaaacacataggacaatggtgaaagtcatgttctagaataaattacgattagcttgattctttaagattattctaccttttaagtaaaatagatatgattaaaggaagaaggacatttttattccatccatctttatgcttcaaatattcaacttctagaaacttggggaaaatccagactctctaaataggaacaggctgttaactactgcctgagtgaatcgtgtagct

SEQ ID NO: 333468 - DNA, 269 bp, Homo sapiens
gaattattagaaagttgtaagagctctgagggaattaaacaaagggctataataggaaatgagaagggctattttaagtagctcgttggaggttacatctgatctgagacttgagtgaagttgtagaaggtttttggggaaaatgctccatgcagacggaacacataagtgaagattctaaggcaacagtaagcttgatgttcaaggaacaaaaagaaggctggcacttggccaggtcttgtagtgctttgtggacaaaggtaacaagg

SEQ ID NO: 333469 - DNA, 89 bp, Homo sapiens
aatttagagtacaggaagtgtatacaaaagaatttcgaaacaatccttttttcctgtctgataaggatgatatctatccagttgacact

SEQ ID NO: 333470 - DNA, 109 bp, Homo sapiens
gttgtgaaaaaaaatttagtatctaagggtttacctcatcccaaactagatttttttcaaatgactccaggaagataagctaaagaagttagtgtacgatatttctttt

SEQ ID NO: 333471 - DNA, 546 bp, Homo sapiens
ccatgtgaccaaagaaacattgcttgcaatttttcaaaagatcttgaaaggtaaagaagttcatggatgccaaagagttgcttgacatacagggagattgaggagagggagcttcccattactcatcacagctttgaaagtgtaaatatggaataggtgtgtaaggctttttggggccatggaaagaggggtggttttaagaacaactttttgttgcctttctctttcagccgtgtaaaagagagataaatattcaataatgcgtttggacagtcttggataaaggtgactaagactgacatgctttttaaaacaatttttttaatgaaataaatgatggactatttgcttcttacaaaagataaagggccagttagtggttgttgaacagaagaaggaggtggtgttttcacagaggttaggatgggttgtaaacactttattattatacagagcctaatatctaatctttgtcatcagatccatacattggcataaaacttgaaatacttcaattcaagaagtatttattgaacagcatctatc

SEQ ID NO: 333472 - DNA, 321 bp, Homo sapiens
ggggagggggacggggtataaccttataagggggataatgcaacttaggcaatgtctggcaaaattgtaaccccatagtactcaaccagtgaggaactgggggagggacttgcgtgctaggagataaattacctgccgtaactgctccaggtgtgcctgcctaccagatatcccgtcttgcaagactgctataagaatctcacttctgctgttcatcgtgtctccaagtctattccttgagtttggacaggtgaatgagattcctacactcctcagctttcagtggtggttacccctagagtaaggcactgcaagagcctg

SEQ ID NO: 333473 - DNA, 1427 bp, Homo sapiens
tttcctcccaggggctgctgagccttcaggtgcttcagggtgctgagcagtcagctgtgtcctgggggcattctgaaggatgtagtttgggggaaggggactgtgtcagtcctgcctgggtgacccatcagctgcaggagacatcagccctgggcagctgcttcctgagataggtgtcaagtctcatcctgacctcagctctccccttcctggctaatgtcacagacctcctgcctgtaactggggcacagggcttcccctttggcctgtcccctccctcttttctagattgtggttggaaaaatcagacatagtcacggttggctcggactgaagagatgatccagcgtgtccttttctttttgcaggtagagaaaagtgaggcccagggagaaggactttgctaatagcagttaggagtgatagagtactttttatatgacagatctggtgcattttgtcctcacaaaaagacctgtcacatggggattctattatgcccacttcccaaatgtgagaggtaaaatggtactactttgggttagtagagggcatccaggaccccaggatctctgactagtagccctcccattgtgggtggtgttcccccgactgttccatcattccccttaccacccccatattttggaagggaacccaggctcagtacccagctgtcctctcctctgtttggctgggcttgctatactaaaccagttcttcctgtccagctgggagcattccctgatctgccttcctgccactccctctcaggccaattaaaggcagccttgttttgggagtcccctccacccaaaggtgttcctacccaggggcacagcctactgacttggccccgggcccaggcggttgtggggaagtgtcccccacctatcacctatcaagtgtactttagcttaaggacatttctggtcttctacagcgtcctcttcttgattacatgggagtaggggtgggggcggaagcctaggggcttctaggacccttgagtgaacagtgagagctcttgggacttcttgagcccagggagttatcaaacacccacgaaaatatttgggccatgatttggagggttccatgaggttggggggaggcctctttccccgctgggctgacatcccccaccttaaaatgaaaggtttgaacagggtagcctccagagtcctttccatctctcaatttgattaataacttaagtacctactattcaaaagaggtctctctcttgaaggaattaacttgagggaattaacatactccaccaaatgctgaatccctccctctctccccccgcacaccgagggcaggaactctgctctatttgtttttgtgaaatacctgtcccctagtttgtactcaggaaatgcttgtatgaatgaataaattcgtgcatgtaactttaaaaa

SEQ ID NO: 333474 - DNA, 217 bp, Homo sapiens
taatgagaaaaagaaagcccttccacatgattgacacttctgagtagtgtgatcccagttcatgtccattgtctgggatagctattaaataaaacttcctctcataaaattctctccatttagaagataaattctgtgattcacaagcctctttttatttataatagcccttcccctttctttatgaatttgaatttgttttttaaagaaactgtga

SEQ ID NO: 333475 - DNA, 1341 bp, Homo sapiens
ctgtgcagccagcccttctccatccttggcttcggtgacattgtggtccccggcttcctggttgcttactgttgccgctttgatgtgcaagtctgctcccgtcagatctacttcgtggcctgcaccgtggcctatgctgtgggcctgctggtcacattcatggccatggtcctcatgcagatgggccaacctgccttgctctacctagtgtccagcaccctgctcaccagcctggctgtggctgcctgccgccaagagctcagcctcttctggactggccagggcagagctaagatgtgtgggctcggctgtgccccttcggctggctctaggcagaagcaggagggcgcagcagatgcccacacagccagcacacttgagagaggcaccagccgaggagcaggggacttagacagcaaccctggagaagacaccactgagattgtcaccatatctgagaatgaagccaccaatccagaggaccgcagtgatagctccgagggctggagtgacgcccacttggatcctaatgagctgcccttcatcccccctggggcctcggaggagctgatgccactgatgccaatggccatgctgatcccactcatgcccctgatgcccccgccctcagagctgggccatgtccatgcccaggcccaggcccacgagactggcctgccctgggcgggactccacaagaggaagggtttgaaagtaagaaagagcatgtcgacccaggctcccttgtgaactggaggcactgggacacacgcctctcaaagggctggtggaacattgcagagcaaagccatgcatggcaacaagaaatcagggcatcaaagagatttcatatctacccaaggagtctctctgtttgtcgggagtgcaagagagcagcaaccacataataagagtgtgcagggctcgaagggtccttaggagtgggcaccacccccaaataatgaaggggggaaactgaggctccaagagggcctatgacttgcacaagttcaagcggcaaggtcgggatttgcatccagggctcactgggcagctactcccctctgcctgcttgcccaaccccttcccaatccagagtggcagcttcttagcctggcacacagcccccatcccatccctgccacccaccctaggctcattgcccatcttctctccatgctcaggtcaaacagaactccttgtcctccccacccgctctctctgcgtatgctgttccctccagctgggatgcccttccctctccagacagaaacactccagcctggctccctgactcactagaagattccgaagcatcctttactcctcagctcacatcca

SEQ ID NO: 333476 - DNA, 1044 bp, Homo sapiens
ctgtgcagccagcccttctccatccttggcttcggtgacattgtggtccccggcttcctggttgcttactgttgccgctttgatgtgcaagtctgctcccgtcagatctacttcgtggcctgcaggacacactgggcatttcctactgcctgttcgtcctgcaccgtgtgcggctgcccactctcaagaactgctcctccttccggctggagtgacgcccacttggatcctaatgagctgcccttcatcccccctggggcctcggaggagctgatgccactgatgccaatggccatgctgatcccactcatgcccctgatgcccccgccctcagagctgggccatgtccatgcccaggcccaggcccacgagactggcctgccctgggcgggactccacaagaggaagggtttgaaagtaagaaagagcatgtcgacccaggctcccttgtgaactggaggcactgggacacacgcctctcaaagggctggtggaacattgcagagcaaagccatgcatggcaacaagaaatcagggcatcaaagagatttcatatctacccaaggagtctctctgtttgtcgggagtgcaagagagcagcaaccacataataagagtgtgcagggctcgaagggtccttaggagtgggcaccacccccaaataatgaaggggggaaactgaggctccaagagggcctatgacttgcacaagttcaagcggcaaggtcgggatttgcatccagggctcactgggcagctactcccctctgcctgcttgcccaaccccttcccaatccagagtggcagcttcttagcctggcacacagcccccatcccatccctgccacccaccctaggctcattgcccatcttctctccatgctcaggtcaaacagaactccttgtcctccccacccgctctctctgcgtatgctgttccctccagctgggatgcccttccctctccagacagaaacactccagcctggctccctgactcactagaagattccgaagcatcctttactcctcagctcacatcca

SEQ ID NO: 333477 - DNA, 210 bp, Homo sapiens
ccaggagagaggcccagagaaaaatacataagtcatgcatgtttctatcgaatgctgcaggaaagccaaggaaggtgaagaatatctccttcaagaggacactgtcaggagagcaggggaggccagaactaaatcgcaagggagtaagaactgagtaggcaaggagggggtgggacagactggacaggaaacaatgcacagctgcactgg

SEQ ID NO: 333478 - DNA, 1079 bp, Homo sapiens
gtggctaagggggcaggtcctgggcttctggactgtccttgtctccaccccgcctgcccccagcgggccctccaggtgtctgcagggccctaggtgctggctggccaggtgggggtgttctcatagccggggatcctgcagctccccgttttctgctgccgccctgctctgctgctgactaggatagcagggctaaggacatggtgggagcctgtcccaaacagcacttcccccggcctggacatggtgccagtgccttctgtgtattcgttcactgagtccccacaacacccctgtgaagcaggcgctgtcatcacctgatgcatgaggaagcccagcgtcatgggtgtgtgacctgcctgaggtcccccacctggtgggcaggggtgtggcctctgccccatcctggtgccacgctggcttcctctgggatacactcgtctgagctgggctccctgtgggcagccctgtgccctgggaggtggagagaggggcctgcgggaagggagaggtgggcagggggaggctggggcccggctgtctctcaacgactgtttgcttccccagtcttctcaccaggccagtgggagccagcccctcccacagttggccagtgggcagcctggggcctcttctcttcttcgctctccttcctcctctcccctcacttctctatctcttctctctccacacagcgtttctggaccgcctgcctcagtggtccctctcgggggtggcctggggtcttggtgtctatgttggggggctgggagggcagtgactcttcatttgctgcgtcctgctcagtggcctgggtgggactgtggcctgaggtgtgactaaccgtggctttgtctctgtctgtctcccccaaaccccgtgctctgctgtgccttcccgcgcggcccctcacccgccgccgacccacagctccggaaaggcccaccagtccctccgcctcccaaacacaccccgtccaaggaagtcaagcaggagcagatcctcagcctgtttgaggacacgtttgtccctgagatcagcgtgaccaccccctcccaggtcagccgcggccgccgcgg

SEQ ID NO: 333479 - DNA, 2265 bp, Homo sapiens
ggcggtgcagctggagcgtcaggggagtcccgctcgccgcagccccagcgccgcgcgcgcccctccctcctcgcggacctggcggtgccggcgcccggagtggccctttaaaaggcagcttattgtccggagggggcgggcggggggcgccgaccgcggcctgaggcccggcccctcccctctccctccctctgtccccgcgtcgctcgctggctagctcgctggctcgctcgcccgtccggcgcacgctccgcctccgtcagttggctccgctgtcgggtgcgcggcgtggagcggcagccggtctggacgcgcggccggggctgggggctgggagcgcggcgcgcaagatctccccgcgcgagagcggcccctgccaccgggcgaggcctgcgccgcgatggcagagatgggcagtaaaggggtgacggcgggaaagatcgccagcaacgtgcagaagaagctcacccgcgcgcaggagaaggttctccagaagctggggaaggcagatgagaccaaggatgagcagtttgagcagtgcgtccagaatttcaacaagcagctgacggagggcacccggctgcagaaggatctccggacctacctggcctccgtcaaagccatgcacgaggcttccaagaagctgaatgagtgtctgcaggaggtgtatgagcccgattggcccggcagggatgaggcaaacaagatcgcagagaacaacgacctgctgtggatggattaccaccagaagctggtggaccaggcgctgctgaccatggacacgtacctgggccagttccccgacatcaagtcacgcattgccaagcgggggcgcaagctggtggactacgacagtgcccggcaccactacgagtcccttcaaactgccaaaaagaaggatgaagccaaaattgccaaggccgaggaggagctcatcaaagcccagaaggtgtttgaggagatgaatgtggatctgcaggaggagctgccgtccctgtggaacagccgcgtaggtttctacgtcaacacgttccagagcatcgcgggcctggaggaaaacttccacaaggagatgagcaagctcaaccagaacctcaatgatgtgctggtcggcctggagaagcaacacgggagcaacaccttcacggtcaaggcccagcccagaaagaaaagtaaactgttttcgcggctgcgcagaaagaagaacagtgacaacgcgcctgcaaaagggaacaagagcccttcgcctccagatggctcccctgccgccacccccgagatcagagtcaaccacgagccagagccggccggcggggccacgcccggggccaccctccccaagtccccatctcagccagcagaggcctcggaggtggcgggtgggacccaacctgcggctggagcccaggagccaggggagacggcggcaagtgaagcagcctccagctctcttcctgctgtcgtggtggagaccttcccagcaactgtgaatggcaccgtggagggcggcagtggggccgggcgcttggacctgcccccaggtttcatgttcaaggtacaggcccagcacgactacacggccactgacacagacgagctgcagctcaaggctggtgatgtggtgctggtgatccccttccagaaccctgaagagcaggatgaaggctggctcatgggcgtgaaggagagcgactggaaccagcacaaggagctggagaagtgccgtggcgtcttccccgagaacttcactgagagggtcccatgacggcggggcccaggcagcctccgggcgtgtgaagaacacctcctcccgaaaaatgtgtggttcttttttttgttttgttttcgtttttcatcttttgaagagcaaagggaaatcaagaggagacccccaggcagaggggcgttctcccaaagattaggtcgttttccaaagagccgcgtcccggcaagtccggcggaattcaccagtgttcctgaagctgctgtgtcctctagttgagtttctggcgcccctgcctgtgcccgcatgtgtgcctggccgcagggcggggctgggggctgccgagccaccatgcttgcctgaagcttcggccgcgccacccgggcaagggtcctcttttcctggcagctgctgtgggtggggcccagacaccagcctagcctggctctgccccgcagacggtctgtgtgctgtttgaaaataaatcttagtgttcaaaacaaaatgaaacaaaaaaaaaatgataaaaactctcagaaaaa

SEQ ID NO: 333480 - DNA, 2457 bp, Homo sapiens
ggcggtgcagctggagcgtcaggggagtcccgctcgccgcagccccagcgccgcgcgcgcccctccctcctcgcggacctggcggtgccggcgcccggagtggccctttaaaaggcagcttattgtccggagggggcgggcggggggcgccgaccgcggcctgaggcccggcccctcccctctccctccctctgtccccgcgtcgctcgctggctagctcgctggctcgctcgcccgtccggcgcacgctccgcctccgtcagttggctccgctgtcgggtgcgcggcgtggagcggcagccggtctggacgcgcggccggggctgggggctgggagcgcggcgcgcaagatctccccgcgcgagagcggcccctgccaccgggcgaggcctgcgccgcgatggcagagatgggcagtaaaggggtgacggcgggaaagatcgccagcaacgtgcagaagaagctcacccgcgcgcaggagaaggttctccagaagctggggaaggcagatgagaccaaggatgagcagtttgagcagtgcgtccagaatttcaacaagcagctgacggagggcacccggctgcagaaggatctccggacctacctggcctccgtcaaagccatgcacgaggcttccaagaagctgaatgagtgtctgcaggaggtgtatgagcccgattggcccggcagggatgaggcaaacaagatcgcagagaacaacgacctgctgtggatggattaccaccagaagctggtggaccaggcgctgctgaccatggacacgtacctgggccagttccccgacatcaagtcacgcattgccaagcgggggcgcaagctggtggactacgacagtgcccggcaccactacgagtcccttcaaactgccaaaaagaaggatgaagccaaaattgccaaggccgaggaggagctcatcaaagcccagaaggtgtttgaggagatgaatgtggatctgcaggaggagctgccgtccctgtggaacagccgcgtaggtttctacgtcaacacgttccagagcatcgcgggcctggaggaaaacttccacaaggagatgagcaagctcaaccagaacctcaatgatgtgctggtcggcctggagaagcaacacgggagcaacaccttcacggtcaaggcccagcccagtgacaacgcgcctgcaaaagggaacaagagcccttcgcctccagatggctcccctgccgccacccccgagatcagagtcaaccacgagccagagccggccggcggggccacgcccggggccaccctccccaagtccccatctcagctccggaaaggcccaccagtccctccgcctcccaaacacaccccgtccaaggaagtcaagcaggagcagatcctcagcctgtttgaggacacgtttgtccctgagatcagcgtgaccaccccctcccagcccacagagagtccagccggcagcctgccttccggggagcccagcgctgccgagggcacctttgctgtgtcctggcccagccagacggccgagccggggcctgcccaaccagcagaggcctcggaggtggcgggtgggacccaacctgcggctggagcccaggagccaggggagacggcggcaagtgaagcagcctccagctctcttcctgctgtcgtggtggagaccttcccagcaactgtgaatggcaccgtggagggcggcagtggggccgggcgcttggacctgcccccaggtttcatgttcaaggtacaggcccagcacgactacacggccactgacacagacgagctgcagctcaaggctggtgatgtggtgctggtgatccccttccagaaccctgaagagcaggatgaaggctggctcatgggcgtgaaggagagcgactggaaccagcacaaggagctggagaagtgccgtggcgtcttccccgagaacttcactgagagggtcccatgacggcggggcccaggcagcctccgggcgtgtgaagaacacctcctcccgaaaaatgtgtggttcttttttttgttttgttttcgtttttcatcttttgaagagcaaagggaaatcaagaggagacccccaggcagaggggcgttctcccaaagattaggtcgttttccaaagagccgcgtcccggcaagtccggcggaattcaccagtgttcctgaagctgctgtgtcctctagttgagtttctggcgcccctgcctgtgcccgcatgtgtgcctggccgcagggcggggctgggggctgccgagccaccatgcttgcctgaagcttcggccgcgccacccgggcaagggtcctcttttcctggcagctgctgtgggtggggcccagacaccagcctagcctggctctgccccgcagacggtctgtgtgctgtttgaaaataaatcttagtgttcaaaacaaaatgaaacaaaaaaaaaatgataaaaactctcagaaaaa

SEQ ID NO: 333481 - DNA, 2682 bp, Homo sapiens
ggcggtgcagctggagcgtcaggggagtcccgctcgccgcagccccagcgccgcgcgcgcccctccctcctcgcggacctggcggtgccggcgcccggagtggccctttaaaaggcagcttattgtccggagggggcgggcggggggcgccgaccgcggcctgaggcccggcccctcccctctccctccctctgtccccgcgtcgctcgctggctagctcgctggctcgctcgcccgtccggcgcacgctccgcctccgtcagttggctccgctgtcgggtgcgcggcgtggagcggcagccggtctggacgcgcggccggggctgggggctgggagcgcggcgcgcaagatctccccgcgcgagagcggcccctgccaccgggcgaggcctgcgccgcgatggcagagatgggcagtaaaggggtgacggcgggaaagatcgccagcaacgtgcagaagaagctcacccgcgcgcaggagaaggttctccagaagctggggaaggcagatgagaccaaggatgagcagtttgagcagtgcgtccagaatttcaacaagcagctgacggagggcacccggctgcagaaggatctccggacctacctggcctccgtcaaagccatgcacgaggcttccaagaagctgaatgagtgtctgcaggaggtgtatgagcccgattggcccggcagggatgaggcaaacaagatcgcagagaacaacgacctgctgtggatggattaccaccagaagctggtggaccaggcgctgctgaccatggacacgtacctgggccagttccccgacatcaagtcacgcattgccaagcgggggcgcaagctggtggactacgacagtgcccggcaccactacgagtcccttcaaactgccaaaaagaaggatgaagccaaaattgccaagcctgtctcgctgcttgagaaagccgccccccagtggtgccaaggcaaactgcaggctcatctcgtagctcaaactaacctgctccgaaatcaggccgaggaggagctcatcaaagcccagaaggtgtttgaggagatgaatgtggatctgcaggaggagctgccgtccctgtggaacagccgcgtaggtttctacgtcaacacgttccagagcatcgcgggcctggaggaaaacttccacaaggagatgagcaagctcaaccagaacctcaatgatgtgctggtcggcctggagaagcaacacgggagcaacaccttcacggtcaaggcccagcccagtgacaacgcgcctgcaaaagggaacaagagcccttcgcctccagatggctcccctgccgccacccccgagatcagagtcaaccacgagccagagccggccggcggggccacgcccggggccaccctccccaagtccccatctcagctccggaaaggcccaccagtccctccgcctcccaaacacaccccgtccaaggaagtcaagcaggagcagatcctcagcctgtttgaggacacgtttgtccctgagatcagcgtgaccaccccctcccagtttgaggccccggggcctttctcggagcaggccagtctgctggacctggactttgaccccctcccgcccgtgacgagccctgtgaaggcacccacgccctctggtcagtcaattccatgggacctctgggagcccacagagagtccagccggcagcctgccttccggggagcccagcgctgccgagggcacctttgctgtgtcctggcccagccagacggccgagccggggcctgcccaaccagcagaggcctcggaggtggcgggtgggacccaacctgcggctggagcccaggagccaggggagacggcggcaagtgaagcagcctccagctctcttcctgctgtcgtggtggagaccttcccagcaactgtgaatggcaccgtggagggcggcagtggggccgggcgcttggacctgcccccaggtttcatgttcaaggtacaggcccagcacgactacacggccactgacacagacgagctgcagctcaaggctggtgatgtggtgctggtgatccccttccagaaccctgaagagcaggatgaaggctggctcatgggcgtgaaggagagcgactggaaccagcacaaggagctggagaagtgccgtggcgtcttccccgagaacttcactgagagggtcccatgacggcggggcccaggcagcctccgggcgtgtgaagaacacctcctcccgaaaaatgtgtggttcttttttttgttttgttttcgtttttcatcttttgaagagcaaagggaaatcaagaggagacccccaggcagaggggcgttctcccaaagattaggtcgttttccaaagagccgcgtcccggcaagtccggcggaattcaccagtgttcctgaagctgctgtgtcctctagttgagtttctggcgcccctgcctgtgcccgcatgtgtgcctggccgcagggcggggctgggggctgccgagccaccatgcttgcctgaagcttcggccgcgccacccgggcaagggtcctcttttcctggcagctgctgtgggtggggcccagacaccagcctagcctggctctgccccgcagacggtctgtgtgctgtttgaaaataaatcttagtgttcaaaacaaaatgaaacaaaaaaaaaatgataaaaactctcagaaaaa

SEQ ID NO: 333482 - DNA, 2460 bp, Homo sapiens
ggcggtgcagctggagcgtcaggggagtcccgctcgccgcagccccagcgccgcgcgcgcccctccctcctcgcggacctggcggtgccggcgcccggagtggccctttaaaaggcagcttattgtccggagggggcgggcggggggcgccgaccgcggcctgaggcccggcccctcccctctccctccctctgtccccgcgtcgctcgctggctagctcgctggctcgctcgcccgtccggcgcacgctccgcctccgtcagttggctccgctgtcgggtgcgcggcgtggagcggcagccggtctggacgcgcggccggggctgggggctgggagcgcggcgcgcaagatctccccgcgcgagagcggcccctgccaccgggcgaggcctgcgccgcgatggcagagatgggcagtaaaggggtgacggcgggaaagatcgccagcaacgtgcagaagaagctcacccgcgcgcaggagaaggttctccagaagctggggaaggcagatgagaccaaggatgagcagtttgagcagtgcgtccagaatttcaacaagcagctgacggagggcacccggctgcagaaggatctccggacctacctggcctccgtcaaagccatgcacgaggcttccaagaagctgaatgagtgtctgcaggaggtgtatgagcccgattggcccggcagggatgaggcaaacaagatcgcagagaacaacgacctgctgtggatggattaccaccagaagctggtggaccaggcgctgctgaccatggacacgtacctgggccagttccccgacatcaagtcacgcattgccaagcgggggcgcaagctggtggactacgacagtgcccggcaccactacgagtcccttcaaactgccaaaaagaaggatgaagccaaaattgccaaggccgaggaggagctcatcaaagcccagaaggtgtttgaggagatgaatgtggatctgcaggaggagctgccgtccctgtggaacagccgcgtaggtttctacgtcaacacgttccagagcatcgcgggcctggaggaaaacttccacaaggagatgagcaagctcaaccagaacctcaatgatgtgctggtcggcctggagaagcaacacgggagcaacaccttcacggtcaaggcccagcccagtgacaacgcgcctgcaaaagggaacaagagcccttcgcctccagatggctcccctgccgccacccccgagatcagagtcaaccacgagccagagccggccggcggggccacgcccggggccaccctccccaagtccccatctcagtttgaggccccggggcctttctcggagcaggccagtctgctggacctggactttgaccccctcccgcccgtgacgagccctgtgaaggcacccacgccctctggtcagtcaattccatgggacctctgggagcccacagagagtccagccggcagcctgccttccggggagcccagcgctgccgagggcacctttgctgtgtcctggcccagccagacggccgagccggggcctgcccaaccagcagaggcctcggaggtggcgggtgggacccaacctgcggctggagcccaggagccaggggagacggcggcaagtgaagcagcctccagctctcttcctgctgtcgtggtggagaccttcccagcaactgtgaatggcaccgtggagggcggcagtggggccgggcgcttggacctgcccccaggtttcatgttcaaggtacaggcccagcacgactacacggccactgacacagacgagctgcagctcaaggctggtgatgtggtgctggtgatccccttccagaaccctgaagagcaggatgaaggctggctcatgggcgtgaaggagagcgactggaaccagcacaaggagctggagaagtgccgtggcgtcttccccgagaacttcactgagagggtcccatgacggcggggcccaggcagcctccgggcgtgtgaagaacacctcctcccgaaaaatgtgtggttcttttttttgttttgttttcgtttttcatcttttgaagagcaaagggaaatcaagaggagacccccaggcagaggggcgttctcccaaagattaggtcgttttccaaagagccgcgtcccggcaagtccggcggaattcaccagtgttcctgaagctgctgtgtcctctagttgagtttctggcgcccctgcctgtgcccgcatgtgtgcctggccgcagggcggggctgggggctgccgagccaccatgcttgcctgaagcttcggccgcgccacccgggcaagggtcctcttttcctggcagctgctgtgggtggggcccagacaccagcctagcctggctctgccccgcagacggtctgtgtgctgtttgaaaataaatcttagtgttcaaaacaaaatgaaacaaaaaaaaaatgataaaaactctcagaaaaa

SEQ ID NO: 333483 - DNA, 2130 bp, Homo sapiens
ggcggtgcagctggagcgtcaggggagtcccgctcgccgcagccccagcgccgcgcgcgcccctccctcctcgcggacctggcggtgccggcgcccggagtggccctttaaaaggcagcttattgtccggagggggcgggcggggggcgccgaccgcggcctgaggcccggcccctcccctctccctccctctgtccccgcgtcgctcgctggctagctcgctggctcgctcgcccgtccggcgcacgctccgcctccgtcagttggctccgctgtcgggtgcgcggcgtggagcggcagccggtctggacgcgcggccggggctgggggctgggagcgcggcgcgcaagatctccccgcgcgagagcggcccctgccaccgggcgaggcctgcgccgcgatggcagagatgggcagtaaaggggtgacggcgggaaagatcgccagcaacgtgcagaagaagctcacccgcgcgcaggagaaggttctccagaagctggggaaggcagatgagaccaaggatgagcagtttgagcagtgcgtccagaatttcaacaagcagctgacggagggcacccggctgcagaaggatctccggacctacctggcctccgtcaaagccatgcacgaggcttccaagaagctgaatgagtgtctgcaggaggtgtatgagcccgattggcccggcagggatgaggcaaacaagatcgcagagaacaacgacctgctgtggatggattaccaccagaagctggtggaccaggcgctgctgaccatggacacgtacctgggccagttccccgacatcaagtcacgcattgccaagcgggggcgcaagctggtggactacgacagtgcccggcaccactacgagtcccttcaaactgccaaaaagaaggatgaagccaaaattgccaaggccgaggaggagctcatcaaagcccagaaggtgtttgaggagatgaatgtggatctgcaggaggagctgccgtccctgtggaacagccgcgtaggtttctacgtcaacacgttccagagcatcgcgggcctggaggaaaacttccacaaggagatgagcaagctcaaccagaacctcaatgatgtgctggtcggcctggagaagcaacacgggagcaacaccttcacggtcaaggcccagcccagtgacaacgcgcctgcaaaagggaacaagagcccttcgcctccagatggctcccctgccgccacccccgagatcagagtcaaccacgagccagagccggccggcggggccacgcccggggccaccctccccaagtccccatctcagagctctcttcctgctgtcgtggtggagaccttcccagcaactgtgaatggcaccgtggagggcggcagtggggccgggcgcttggacctgcccccaggtttcatgttcaaggtacaggcccagcacgactacacggccactgacacagacgagctgcagctcaaggctggtgatgtggtgctggtgatccccttccagaaccctgaagagcaggatgaaggctggctcatgggcgtgaaggagagcgactggaaccagcacaaggagctggagaagtgccgtggcgtcttccccgagaacttcactgagagggtcccatgacggcggggcccaggcagcctccgggcgtgtgaagaacacctcctcccgaaaaatgtgtggttcttttttttgttttgttttcgtttttcatcttttgaagagcaaagggaaatcaagaggagacccccaggcagaggggcgttctcccaaagattaggtcgttttccaaagagccgcgtcccggcaagtccggcggaattcaccagtgttcctgaagctgctgtgtcctctagttgagtttctggcgcccctgcctgtgcccgcatgtgtgcctggccgcagggcggggctgggggctgccgagccaccatgcttgcctgaagcttcggccgcgccacccgggcaagggtcctcttttcctggcagctgctgtgggtggggcccagacaccagcctagcctggctctgccccgcagacggtctgtgtgctgtttgaaaataaatcttagtgttcaaaacaaaatgaaacaaaaaaaaaatgataaaaactctcagaaaaa

SEQ ID NO: 333484 - DNA, 2553 bp, Homo sapiens
ggcggtgcagctggagcgtcaggggagtcccgctcgccgcagccccagcgccgcgcgcgcccctccctcctcgcggacctggcggtgccggcgcccggagtggccctttaaaaggcagcttattgtccggagggggcgggcggggggcgccgaccgcggcctgaggcccggcccctcccctctccctccctctgtccccgcgtcgctcgctggctagctcgctggctcgctcgcccgtccggcgcacgctccgcctccgtcagttggctccgctgtcgggtgcgcggcgtggagcggcagccggtctggacgcgcggccggggctgggggctgggagcgcggcgcgcaagatctccccgcgcgagagcggcccctgccaccgggcgaggcctgcgccgcgatggcagagatgggcagtaaaggggtgacggcgggaaagatcgccagcaacgtgcagaagaagctcacccgcgcgcaggagaaggttctccagaagctggggaaggcagatgagaccaaggatgagcagtttgagcagtgcgtccagaatttcaacaagcagctgacggagggcacccggctgcagaaggatctccggacctacctggcctccgtcaaagccatgcacgaggcttccaagaagctgaatgagtgtctgcaggaggtgtatgagcccgattggcccggcagggatgaggcaaacaagatcgcagagaacaacgacctgctgtggatggattaccaccagaagctggtggaccaggcgctgctgaccatggacacgtacctgggccagttccccgacatcaagtcacgcattgccaagcgggggcgcaagctggtggactacgacagtgcccggcaccactacgagtcccttcaaactgccaaaaagaaggatgaagccaaaattgccaagcctgtctcgctgcttgagaaagccgccccccagtggtgccaaggcaaactgcaggctcatctcgtagctcaaactaacctgctccgaaatcaggccgaggaggagctcatcaaagcccagaaggtgtttgaggagatgaatgtggatctgcaggaggagctgccgtccctgtggaacagccgcgtaggtttctacgtcaacacgttccagagcatcgcgggcctggaggaaaacttccacaaggagatgagcaagctcaaccagaacctcaatgatgtgctggtcggcctggagaagcaacacgggagcaacaccttcacggtcaaggcccagcccagtgacaacgcgcctgcaaaagggaacaagagcccttcgcctccagatggctcccctgccgccacccccgagatcagagtcaaccacgagccagagccggccggcggggccacgcccggggccaccctccccaagtccccatctcagtttgaggccccggggcctttctcggagcaggccagtctgctggacctggactttgaccccctcccgcccgtgacgagccctgtgaaggcacccacgccctctggtcagtcaattccatgggacctctgggagcccacagagagtccagccggcagcctgccttccggggagcccagcgctgccgagggcacctttgctgtgtcctggcccagccagacggccgagccggggcctgcccaaccagcagaggcctcggaggtggcgggtgggacccaacctgcggctggagcccaggagccaggggagacggcggcaagtgaagcagcctccagctctcttcctgctgtcgtggtggagaccttcccagcaactgtgaatggcaccgtggagggcggcagtggggccgggcgcttggacctgcccccaggtttcatgttcaaggtacaggcccagcacgactacacggccactgacacagacgagctgcagctcaaggctggtgatgtggtgctggtgatccccttccagaaccctgaagagcaggatgaaggctggctcatgggcgtgaaggagagcgactggaaccagcacaaggagctggagaagtgccgtggcgtcttccccgagaacttcactgagagggtcccatgacggcggggcccaggcagcctccgggcgtgtgaagaacacctcctcccgaaaaatgtgtggttcttttttttgttttgttttcgtttttcatcttttgaagagcaaagggaaatcaagaggagacccccaggcagaggggcgttctcccaaagattaggtcgttttccaaagagccgcgtcccggcaagtccggcggaattcaccagtgttcctgaagctgctgtgtcctctagttgagtttctggcgcccctgcctgtgcccgcatgtgtgcctggccgcagggcggggctgggggctgccgagccaccatgcttgcctgaagcttcggccgcgccacccgggcaagggtcctcttttcctggcagctgctgtgggtggggcccagacaccagcctagcctggctctgccccgcagacggtctgtgtgctgtttgaaaataaatcttagtgttcaaaacaaaatgaaacaaaaaaaaaatgataaaaactctcagaaaaa

SEQ ID NO: 333485 - DNA, 1975 bp, Homo sapiens
agcggagagaaagcctggccgggtgtctgacagtggccttccccctgcccgcctgcctgtcctctgtctgtgtctgcctgcctggggagcctcggtgtgagaacgccggggcacgagggtgtgcatcctgcctccgtggcccccgaccgcaggctctgctgggaggaaggggcgagacagggctcacttctcagcccgcccttcctgtgcaggcaggtggggaggagatgatgcggaaggttctccagaagctggggaaggcagatgagaccaaggatgagcagtttgagcagtgcgtccagaatttcaacaagcagctgacggagggcacccggctgcagaaggatctccggacctacctggcctccgtcaaagccatgcacgaggcttccaagaagctgaatgagtgtctgcaggaggtgtatgagcccgattggcccggcagggatgaggcaaacaagatcgcagagaacaacgacctgctgtggatggattaccaccagaagctggtggaccaggcgctgctgaccatggacacgtacctgggccagttccccgacatcaagtcacgcattgccaagcgggggcgcaagctggtggactacgacagtgcccggcaccactacgagtcccttcaaactgccaaaaagaaggatgaagccaaaattgccaaggccgaggaggagctcatcaaagcccagaaggtgtttgaggagatgaatgtggatctgcaggaggagctgccgtccctgtggaacagccgcgtaggtttctacgtcaacacgttccagagcatcgcgggcctggaggaaaacttccacaaggagatgagcaagctcaaccagaacctcaatgatgtgctggtcggcctggagaagcaacacgggagcaacaccttcacggtcaaggcccagcccagtgacaacgcgcctgcaaaagggaacaagagcccttcgcctccagatggctcccctgccgccacccccgagatcagagtcaaccacgagccagagccggccggcggggccacgcccggggccaccctccccaagtccccatctcagccagcagaggcctcggaggtggcgggtgggacccaacctgcggctggagcccaggagccaggggagacggcggcaagtgaagcagcctccagctctcttcctgctgtcgtggtggagaccttcccagcaactgtgaatggcaccgtggagggcggcagtggggccgggcgcttggacctgcccccaggtttcatgttcaaggtacaggcccagcacgactacacggccactgacacagacgagctgcagctcaaggctggtgatgtggtgctggtgatccccttccagaaccctgaagagcaggatgaaggctggctcatgggcgtgaaggagagcgactggaaccagcacaaggagctggagaagtgccgtggcgtcttccccgagaacttcactgagagggtcccatgacggcggggcccaggcagcctccgggcgtgtgaagaacacctcctcccgaaaaatgtgtggttcttttttttgttttgttttcgtttttcatcttttgaagagcaaagggaaatcaagaggagacccccaggcagaggggcgttctcccaaagattaggtcgttttccaaagagccgcgtcccggcaagtccggcggaattcaccagtgttcctgaagctgctgtgtcctctagttgagtttctggcgcccctgcctgtgcccgcatgtgtgcctggccgcagggcggggctgggggctgccgagccaccatgcttgcctgaagcttcggccgcgccacccgggcaagggtcctcttttcctggcagctgctgtgggtggggcccagacaccagcctagcctggctctgccccgcagacggtctgtgtgctgtttgaaaataaatcttagtgttcaaaacaaaatgaaacaaaaaaaaaatgataaaaactctcagaaaaa

SEQ ID NO: 333486 - DNA, 1839 bp, Homo sapiens
caaagcatcacatttctttaatcaatgttttacatgacacgggagccttcaacgatgaagatgcaaggaccagagagaactgtctgttttcagacataagttggttctccagaagctggggaaggcagatgagaccaaggatgagcagtttgagcagtgcgtccagaatttcaacaagcagctgacggagggcacccggctgcagaaggatctccggacctacctggcctccgtcaaagccatgcacgaggcttccaagaagctgaatgagtgtctgcaggaggtgtatgagcccgattggcccggcagggatgaggcaaacaagatcgcagagaacaacgacctgctgtggatggattaccaccagaagctggtggaccaggcgctgctgaccatggacacgtacctgggccagttccccgacatcaagtcacgcattgccaagcgggggcgcaagctggtggactacgacagtgcccggcaccactacgagtcccttcaaactgccaaaaagaaggatgaagccaaaattgccaaggccgaggaggagctcatcaaagcccagaaggtgtttgaggagatgaatgtggatctgcaggaggagctgccgtccctgtggaacagccgcgtaggtttctacgtcaacacgttccagagcatcgcgggcctggaggaaaacttccacaaggagatgagcaagctcaaccagaacctcaatgatgtgctggtcggcctggagaagcaacacgggagcaacaccttcacggtcaaggcccagcccagtgacaacgcgcctgcaaaagggaacaagagcccttcgcctccagatggctcccctgccgccacccccgagatcagagtcaaccacgagccagagccggccggcggggccacgcccggggccaccctccccaagtccccatctcagccagcagaggcctcggaggtggcgggtgggacccaacctgcggctggagcccaggagccaggggagacggcggcaagtgaagcagcctccagctctcttcctgctgtcgtggtggagaccttcccagcaactgtgaatggcaccgtggagggcggcagtggggccgggcgcttggacctgcccccaggtttcatgttcaaggtacaggcccagcacgactacacggccactgacacagacgagctgcagctcaaggctggtgatgtggtgctggtgatccccttccagaaccctgaagagcaggatgaaggctggctcatgggcgtgaaggagagcgactggaaccagcacaaggagctggagaagtgccgtggcgtcttccccgagaacttcactgagagggtcccatgacggcggggcccaggcagcctccgggcgtgtgaagaacacctcctcccgaaaaatgtgtggttcttttttttgttttgttttcgtttttcatcttttgaagagcaaagggaaatcaagaggagacccccaggcagaggggcgttctcccaaagattaggtcgttttccaaagagccgcgtcccggcaagtccggcggaattcaccagtgttcctgaagctgctgtgtcctctagttgagtttctggcgcccctgcctgtgcccgcatgtgtgcctggccgcagggcggggctgggggctgccgagccaccatgcttgcctgaagcttcggccgcgccacccgggcaagggtcctcttttcctggcagctgctgtgggtggggcccagacaccagcctagcctggctctgccccgcagacggtctgtgtgctgtttgaaaataaatcttagtgttcaaaacaaaatgaaacaaaaaaaaaatgataaaaactctcagaaaaa

SEQ ID NO: 333487 - DNA, 2641 bp, Homo sapiens
ggcggtgcagctggagcgtcaggggagtcccgctcgccgcagccccagcgccgcgcgcgcccctccctcctcgcggacctggcggtgccggcgcccggagtggccctttaaaaggcagcttattgtccggagggggcgggcggggggcgccgaccgcggcctgaggcccggcccctcccctctccctccctctgtccccgcgtcgctcgctggctagctcgctggctcgctcgcccgtccggcgcacgctccgcctccgtcagttggctccgctgtcgggtgcgcggcgtggagcggcagccggtctggacgcgcggccggggctgggggctgggagcgcggcgcgcaagatctccccgcgcgagagcggcccctgccaccgggcgaggcctgcgccgcgatggcagagatgggcagtaaaggggtgacggcgggaaagatcgccagcaacgtgcagaagaagctcacccgcgcgcaggagaaggttctccagaagctggggaaggcagatgagaccaaggatgagcagtttgagcagtgcgtccagaatttcaacaagcagctgacggagggcacccggctgcagaaggatctccggacctacctggcctccgtcaaagccatgcacgaggcttccaagaagctgaatgagtgtctgcaggaggtgtatgagcccgattggcccggcagggatgaggcaaacaagatcgcagagaacaacgacctgctgtggatggattaccaccagaagctggtggaccaggcgctgctgaccatggacacgtacctgggccagttccccgacatcaagtcacgcattgccaagcgggggcgcaagctggtggactacgacagtgcccggcaccactacgagtcccttcaaactgccaaaaagaaggatgaagccaaaattgccaaggccgaggaggagctcatcaaagcccagaaggtgtttgaggagatgaatgtggatctgcaggaggagctgccgtccctgtggaacagccgcgtaggtttctacgtcaacacgttccagagcatcgcgggcctggaggaaaacttccacaaggagatgagcaagctcaaccagaacctcaatgatgtgctggtcggcctggagaagcaacacgggagcaacaccttcacggtcaaggcccagcccagtgacaacgcgcctgcaaaagggaacaagagcccttcgcctccagatggctcccctgccgccacccccgagatcagagtcaaccacgagccagagccggccggcggggccacgcccggggccaccctccccaagtccccatctcagagctctcttcctgctgtcgtggtggagaccttcccagcaactgtgaatggcaccgtggagggcggcagtggggccgggcgcttggacctgcccccaggtttcatgttcaaggtacaggcccagcacgactacacggccactgacacagacgagctgcagctcaaggctggtgatgtggtgctggtgatccccttccagaaccctgaagagcaggatgaaggctggctcatgggcgtgaaggagagcgactggaaccagcacaaggagctggagaagtgccgtggcgtcttccccgagaacttcactgagagggtcccatgacggcggggcccaggcagcctccgggcgtgtgaagaacacctcctcccgaaaaatgtgtggttcttttttttgttttgttttcgtttttcatcttttgaagagcaaagggaaatcaagaggagacccccaggcagaggggcgttctcccaaagattaggtcgttttccaaagagccgcgtcccggcaagtccggcggaattcaccagtgttcctgaagctgctgtgtcctctagttgagtttctggcgcccctgcctgtgcccgcatgtgtgcctggccgcagggcggggctgggggctgccgagccaccatgcttgcctgaagcttcggccgcgccacccgggcaagggtcctcttttcctggcagctgctgtgggtggggcccagacaccagcctagcctggctctgccccgcagacggtctgtgtgctgtttgaaaataaatcttagtgttcaaaacaaaatgaaacaaaaaaaaaatgataaaaactctcagaaaaaaaaaaaaaaagaaaaaaaaaaaaaaaaaaaaaaaaaaaaaaaaaaaaagggggggggcgccaaaaaatatccccccggggggccccattttcgcgcccccgttttttgtgaaaaaagggtggcgccccaataagaaggagagagcggcgtattatttaaacgacaaaagagcgaagggagggcaggagagtttaaaacaaaacgggttggatgcaagtggggaagaaaagttgtcaatgagagtggagagaaacaatttgtgggtggagaaggagagaacccctatccacttgtgtggggggggggggagcaacaaatagtgggggaccacaatcaactcaaacagaagagaatttaaaaacgcatcagaggggaaacaataattaaaatttaaaaggggttatataggtggtgttaaacacaacagggggaatatatagatggtagggctaggaaaaattagtggcaaaaagagagtaatatgaattattaggaacaatttttaattatg

SEQ ID NO: 333488 - DNA, 2526 bp, Homo sapiens
ggcggtgcagctggagcgtcaggggagtcccgctcgccgcagccccagcgccgcgcgcgcccctccctcctcgcggacctggcggtgccggcgcccggagtggccctttaaaaggcagcttattgtccggagggggcgggcggggggcgccgaccgcggcctgaggcccggcccctcccctctccctccctctgtccccgcgtcgctcgctggctagctcgctggctcgctcgcccgtccggcgcacgctccgcctccgtcagttggctccgctgtcgggtgcgcggcgtggagcggcagccggtctggacgcgcggccggggctgggggctgggagcgcggcgcgcaagatctccccgcgcgagagcggcccctgccaccgggcgaggcctgcgccgcgatggcagagatgggcagtaaaggggtgacggcgggaaagatcgccagcaacgtgcagaagaagctcacccgcgcgcaggagaaggttctccagaagctggggaaggcagatgagaccaaggatgagcagtttgagcagtgcgtccagaatttcaacaagcagctgacggagggcacccggctgcagaaggatctccggacctacctggcctccgtcaaagccatgcacgaggcttccaagaagctgaatgagtgtctgcaggaggtgtatgagcccgattggcccggcagggatgaggcaaacaagatcgcagagaacaacgacctgctgtggatggattaccaccagaagctggtggaccaggcgctgctgaccatggacacgtacctgggccagttccccgacatcaagtcacgcattgccaagcgggggcgcaagctggtggactacgacagtgcccggcaccactacgagtcccttcaaactgccaaaaagaaggatgaagccaaaattgccaaggccgaggaggagctcatcaaagcccagaaggtgtttgaggagatgaatgtggatctgcaggaggagctgccgtccctgtggaacagccgcgtaggtttctacgtcaacacgttccagagcatcgcgggcctggaggaaaacttccacaaggagatgagcaagctcaaccagaacctcaatgatgtgctggtcggcctggagaagcaacacgggagcaacaccttcacggtcaaggcccagcccagtgacaacgcgcctgcaaaagggaacaagagcccttcgcctccagatggctcccctgccgccacccccgagatcagagtcaaccacgagccagagccggccggcggggccacgcccggggccaccctccccaagtccccatctcagctccggaaaggcccaccagtccctccgcctcccaaacacaccccgtccaaggaagtcaagcaggagcagatcctcagcctgtttgaggacacgtttgtccctgagatcagcgtgaccaccccctcccagcccacagagagtccagccggcagcctgccttccggggagcccagcgctgccgagggcacctttgctgtgtcctggcccagccagacggccgagccggggcctgcccaaccagcagaggcctcggaggtggcgggtgggacccaacctgcggctggagcccaggagccaggggagacggcggcaagtgaagcagcctccagctctcttcctgctgtcgtggtggagaccttcccagcaactgtgaatggcaccgtggagggcggcagtggggccgggcgcttggacctgcccccaggtttcatgttcaaggtacaggcccagcacgactacacggccactgacacagacgagctgcagctcaaggctggtgatgtggtgctggtgatccccttccagaaccctgaagagcaggatgaaggctggctcatgggcgtgaaggagagcgactggaaccagcacaaggagctggagaagtgccgtggcgtcttccccgagaacttcactgagagggtcccatgacggcggggcccaggcagcctccgggcgtgtgaagaacacctcctcccgaaaaatgtgtggttcttttttttgttttgttttcgtttttcatcttttgaagagcaaagggaaatcaagaggagacccccaggcagaggggcgttctcccaaagattaggtcgttttccaaagagccgcgtcccggcaagtccggcggaattcaccagtgttcctgaagctgctgtgtcctctagttgagtttctggcgcccctgcctgtgcccgcatgtgtgcctggccgcagggcggggctgggggctgccgagccaccatgcttgcctgaagcttcggccgcgccacccgggcaagggtcctcttttcctggcagctgctgtgggtggggcccagacaccagcctagcctggctctgccccgcagacggtctgtgtgctgtttgaaaataaatcttagtgttcaaaacaaaatgaaacaaaaaaaaaatgataaaaactctcagaaaaaaatcggatttccggttaacactgtgacttcaattgaaacacctttttgtagtatctggaggtggacatt

SEQ ID NO: 333489 - DNA, 2414 bp, Homo sapiens
ggcggtgcagctggagcgtcaggggagtcccgctcgccgcagccccagcgccgcgcgcgcccctccctcctcgcggacctggcggtgccggcgcccggagtggccctttaaaaggcagcttattgtccggagggggcgggcggggggcgccgaccgcggcctgaggcccggcccctcccctctccctccctctgtccccgcgtcgctcgctggctagctcgctggctcgctcgcccgtccggcgcacgctccgcctccgtcagttggctccgctgtcgggtgcgcggcgtggagcggcagccggtctggacgcgcggccggggctgggggctgggagcgcggcgcgcaagatctccccgcgcgagagcggcccctgccaccgggcgaggcctgcgccgcgatggcagagatgggcagtaaaggggtgacggcgggaaagatcgccagcaacgtgcagaagaagctcacccgcgcgcaggagaaggttctccagaagctggggaaggcagatgagaccaaggatgagcagtttgagcagtgcgtccagaatttcaacaagcagctgacggagggcacccggctgcagaaggatctccggacctacctggcctccgtcaaagccatgcacgaggcttccaagaagctgaatgagtgtctgcaggaggtgtatgagcccgattggcccggcagggatgaggcaaacaagatcgcagagaacaacgacctgctgtggatggattaccaccagaagctggtggaccaggcgctgctgaccatggacacgtacctgggccagttccccgacatcaagtcacgcattgccaagcgggggcgcaagctggtggactacgacagtgcccggcaccactacgagtcccttcaaactgccaaaaagaaggatgaagccaaaattgccaaggccgaggaggagctcatcaaagcccagaaggtgtttgaggagatgaatgtggatctgcaggaggagctgccgtccctgtggaacagccgcgtaggtttctacgtcaacacgttccagagcatcgcgggcctggaggaaaacttccacaaggagatgagcaagctcaaccagaacctcaatgatgtgctggtcggcctggagaagcaacacgggagcaacaccttcacggtcaaggcccagcccagtgacaacgcgcctgcaaaagggaacaagagcccttcgcctccagatggctcccctgccgccacccccgagatcagagtcaaccacgagccagagccggccggcggggccacgcccggggccaccctccccaagtccccatctcagctccggaaaggcccaccagtccctccgcctcccaaacacaccccgtccaaggaagtcaagcaggagcagatcctcagcctgtttgaggacacgtttgtccctgagatcagcgtgaccaccccctcccagcccacagagagtccagccggcagcctgccttccggggagcccagcgctgccgagggcacctttgctgtgtcctggcccagccagacggccgagccggggcctgcccaaccagcagaggcctcggaggtggcgggtgggacccaacctgcggctggagcccaggagccaggggagacggcggcaagtgaagcagcctccagctctcttcctgctgtcgtggtggagaccttcccagcaactgtgaatggcaccgtggagggcggcagtggggccgggcgcttggacctgcccccaggtttcatgttcaaggtacaggcccagcacgactacacggccactgacacagacgagctgcagctcaaggctggtgatgtggtgctggtgatccccttccagaaccctgaagagcaggatgaaggctggctcatgggcgtgaaggagagcgactggaaccagcacaaggagctggagaagtgccgtggcgtcttccccgagaacttcactgagagggtcccatgacggcggggcccaggcagcctccgggcgtgtgaagaacacctcctcccgaaaaatgtgtggttcttttttttgttttgttttcgtttttcatcttttgaagagcaaagggaaatcaagaggagacccccaggcagaggggcgttctcccaaagattaggtcgttttccaaagagccgcgtcccggcaagtccggcggaattcaccagtgttcctgaagctgctgtgtcctctagttgagtttcggggctgggggctgccgagccaccatgcttgcctgaagcttcggccgcgccacccgggcaagggtcctcttttcctggcagctgctgtgggtggggcccagacaccagcctagcctggctctgccccgcagacggtctgtgtgctgtttgaaaataaatcttagtgttcaaaacaaaatgaaacaaaaaaaaaatgataaaaactctcagaaaaa

SEQ ID NO: 333490 - DNA, 2335 bp, Homo sapiens
ggcggtgcagctggagcgtcaggggagtcccgctcgccgcagccccagcgccgcgcgcgcccctccctcctcgcggacctggcggtgccggcgcccggagtggccctttaaaaggcagcttattgtccggagggggcgggcggggggcgccgaccgcggcctgaggcccggcccctcccctctccctccctctgtccccgcgtcgctcgctggctagctcgctggctcgctcgcccgtccggcgcacgctccgcctccgtcagttggctccgctgtcgggtgcgcggcgtggagcggcagccggtctggacgcgcggccggggctgggggctgggagcgcggcgcgcaagatctccccgcgcgagagcggcccctgccaccgggcgaggcctgcgccgcgatggcagagatgggcagtaaaggggtgacggcgggaaagatcgccagcaacgtgcagaagaagctcacccgcgcgcaggagaaggttctccagaagctggggaaggcagatgagaccaaggatgagcagtttgagcagtgcgtccagaatttcaacaagcagctgacggagggcacccggctgcagaaggatctccggacctacctggcctccgtcaaagccatgcacgaggcttccaagaagctgaatgagtgtctgcaggaggtgtatgagcccgattggcccggcagggatgaggcaaacaagatcgcagagaacaacgacctgctgtggatggattaccaccagaagctggtggaccaggcgctgctgaccatggacacgtacctgggccagttccccgacatcaagtcacgcattgccaagcgggggcgcaagctggtggactacgacagtgcccggcaccactacgagtcccttcaaactgccaaaaagaaggatgaagccaaaattgccaaggccgaggaggagctcatcaaagcccagaaggtgtttgaggagatgaatgtggatctgcaggaggagctgccgtccctgtggaacagccgcgtaggtttctacgtcaacacgttccagagcatcgcgggcctggaggaaaacttccacaaggagatgagcaagctcaaccagaacctcaatgatgtgctggtcggcctggagaagcaacacgggagcaacaccttcacggtcaaggcccagcccagtgacaacgcgcctgcaaaagggaacaagagcccttcgcctccagatggctcccctgccgccacccccgagatcagagtcaaccacgagccagagccggccggcggggccacgcccggggccaccctccccaagtccccatctcagctccggaaaggcccaccagtccctccgcctcccaaacacaccccgtccaaggaagtcaagcaggagcagatcctcagcctgtttgaggacacgtttgtccctgagatcagcgtgaccaccccctcccagcccacagagagtccagccggcagcctgccttccggggagcccagcgctgccgagggcacctttgctgtgtcctggcccagccagacggccgagccggggcctgcccaaccagcagaggcctcggaggtggcgggtgggacccaacctgcggctggagcccaggagccaggggagacggcggcaagtgaagcagcctccagctctcttcctgctgtcgtggtggagaccttcccagcaactgtgaatggcaccgtggagggcggcagtggggccgggcgcttggacctgcccccaggtttcatgttcaaggtacaggcccagcacgactacacggccactgacacagacgagctgcagctcaaggctggtgatgtggtgctggtgatccccttccagaaccctgaagagcaggatgaaggctggctcatgggcgtgaaggagagcgactggaaccagcacaaggagctggagaagtgccgtggcgtcttccccgagaacttcactgagagggtcccatgacggcggggcccaggcagcctccgggcgtgtgaagaacacctcctcccgaaaaatgtgtggttcttttttttgttttgttttcgtttttcatcttttgaagagcaaagggaaatcaagaggagacccccaggcagaggggcgttctcccaaagattaggtcgttttccaaagagccgcgtcccggcaagtccggcggaattcaccagtgttcctgaagctgctgtgtcctctagttgagtttctggcgcccctgcctgtgcccgcatgtgtgcctggccgcagggtgccccgcagacggtctgtgtgctgtttgaaaataaatcttagtgttcaaaacaaaatgaaacaaaaaaaaaatgataaaaactctcagaaaaa

SEQ ID NO: 333491 - DNA, 2223 bp, Homo sapiens
ggcggtgcagctggagcgtcaggggagtcccgctcgccgcagccccagcgccgcgcgcgcccctccctcctcgcggacctggcggtgccggcgcccggagtggccctttaaaaggcagcttattgtccggagggggcgggcggggggcgccgaccgcggcctgaggcccggcccctcccctctccctccctctgtccccgcgtcgctcgctggctagctcgctggctcgctcgcccgtccggcgcacgctccgcctccgtcagttggctccgctgtcgggtgcgcggcgtggagcggcagccggtctggacgcgcggccggggctgggggctgggagcgcggcgcgcaagatctccccgcgcgagagcggcccctgccaccgggcgaggcctgcgccgcgatggcagagatgggcagtaaaggggtgacggcgggaaagatcgccagcaacgtgcagaagaagctcacccgcgcgcaggagaaggttctccagaagctggggaaggcagatgagaccaaggatgagcagtttgagcagtgcgtccagaatttcaacaagcagctgacggagggcacccggctgcagaaggatctccggacctacctggcctccgtcaaagccatgcacgaggcttccaagaagctgaatgagtgtctgcaggaggtgtatgagcccgattggcccggcagggatgaggcaaacaagatcgcagagaacaacgacctgctgtggatggattaccaccagaagctggtggaccaggcgctgctgaccatggacacgtacctgggccagttccccgacatcaagtcacgcattgccaagcgggggcgcaagctggtggactacgacagtgcccggcaccactacgagtcccttcaaactgccaaaaagaaggatgaagccaaaattgccaaggccgaggaggagctcatcaaagcccagaaggtgtttgaggagatgaatgtggatctgcaggaggagctgccgtccctgtggaacagccgcgtaggtttctacgtcaacacgttccagagcatcgcgggcctggaggaaaacttccacaaggagatgagcaagctcaaccagaacctcaatgatgtgctggtcggcctggagaagcaacacgggagcaacaccttcacggtcaaggcccagcccagtgacaacgcgcctgcaaaagggaacaagagcccttcgcctccagatggctcccctgccgccacccccgagatcagagtcaaccacgagccagagccggccggcggggccacgcccggggccaccctccccaagtccccatctcagctccggaaaggcccaccagtccctccgcctcccaaacacaccccgtccaaggaagtcaagcaggagcagatcctcagcctgtttgaggacacgtttgtccctgagatcagcgtgaccaccccctcccagcccacagagagtccagccggcagcctgccttccggggagcccagcgctgccgagggcacctttgctgtgtcctggcccagccagacggccgagccggggcctgcccaaccagcagaggcctcggaggtggcgggtgggacccaacctgcggctggagcccaggagccaggggagacggcggcaagtgaagcagcctccagctctcttcctgctgtcgtggtggagaccttcccagcaactgtgaatggcaccgtggagggcggcagtggggccgggcgcttggacctgcccccaggtttcatgttcaaggtacaggcccagcacgactacacggccactgacacagacgagctgcagctcaaggctggtgatgtggtgctggtgatccccttccagaaccctgaagagcaggatgaaggctggctcatgggcgtgaaggagagcgactggaaccagcacaaggagctggagaagtgccgtggcgtcttccccgagaacttcactgagagggtcccatgacggcggggcccaggcagcctccgggcgtgtgaagaacacctcctcccgaaaaatgtgtggttcttttttttgttttgttttcgtttttcatctttccgcgccacccgggcaagggtcctcttttcctggcagctgctgtgggtggggcccagacaccagcctagcctggctctgccccgcagacggtctgtgtgctgtttgaaaataaatcttagtgttcaaaacaaaatgaaacaaaaaaaaaatgataaaaactctcagaaaaa

SEQ ID NO: 333492 - DNA, 1205 bp, Homo sapiens
cctttgacagtggtaggagagaggatgtgggaggcgggtggctggccgggctccgctggtacccaccctgcccccaccaaccccagccgctggtgacattttctcttgtcttgtgatcctgcccattgcctttccaccccggcctccccgccccctccctgttctctcctcgtggcctgttaccagcccacagagagtccagccggcagcctgccttccggggagcccagcgctgccgagggcacctttgctgtgtcctggcccagccagacggccgagccggggcctgcccaaccagcagaggcctcggaggtggcgggtgggacccaacctgcggctggagcccaggagccaggggagacggcggcaagtgaagcagcctccagctctcttcctgctgtcgtggtggagaccttcccagcaactgtgaatggcaccgtggagggcggcagtggggccgggcgcttggacctgcccccaggtttcatgttcaaggtacaggcccagcacgactacacggccactgacacagacgagctgcagctcaaggctggtgatgtggtgctggtgatccccttccagaaccctgaagagcaggatgaaggctggctcatgggcgtgaaggagagcgactggaaccagcacaaggagctggagaagtgccgtggcgtcttccccgagaacttcactgagagggtcccatgacggcggggcccaggcagcctccgggcgtgtgaagaacacctcctcccgaaaaatgtgtggttcttttttttgttttgttttcgtttttcatcttttgaagagcaaagggaaatcaagaggagacccccaggcagaggggcgttctcccaaagattaggtcgttttccaaagagccgcgtcccggcaagtccggcggaattcaccagtgttcctgaagctgctgtgtcctctagttgagtttctggcgcccctgcctgtgcccgcatgtgtgcctggccgcagggcggggctgggggctgccgagccaccatgcttgcctgaagcttcggccgcgccacccgggcaagggtcctcttttcctggcagctgctgtgggtggggcccagacaccagcctagcctggctctgccccgcagacggtctgtgtgctgtttgaaaataaatcttagtgttcaaaacaaaatgaaacaaaaaaaaaatgataaaaactctcagaaaaa

SEQ ID NO: 333493 - DNA, 1226 bp, Homo sapiens
ggcggtgcagctggagcgtcaggggagtcccgctcgccgcagccccagcgccgcgcgcgcccctccctcctcgcggacctggcggtgccggcgcccggagtggccctttaaaaggcagcttattgtccggagggggcgggcggggggcgccgaccgcggcctgaggcccggcccctcccctctccctccctctgtccccgcgtcgctcgctggctagctcgctggctcgctcgcccgtccggcgcacgctccgcctccgtcagttggctccgctgtcgggtgcgcggcgtggagcggcagccggtctggacgcgcggccggggctgggggctgggagcgcggcgcgcaagatctccccgcgcgagagcggcccctgccaccgggcgaggcctgcgccgcgatggcagagatgggcagtaaaggggtgacggcgggaaagatcgccagcaacgtgcagaagaagctcacccgcgcgcaggagaaggcttggacctgcccccaggtttcatgttcaaggtacaggcccagcacgactacacggccactgacacagacgagctgcagctcaaggctggtgatgtggtgctggtgatccccttccagaaccctgaagagcaggatgaaggctggctcatgggcgtgaaggagagcgactggaaccagcacaaggagctggagaagtgccgtggcgtcttccccgagaacttcactgagagggtcccatgacggcggggcccaggcagcctccgggcgtgtgaagaacacctcctcccgaaaaatgtgtggttcttttttttgttttgttttcgtttttcatcttttgaagagcaaagggaaatcaagaggagacccccaggcagaggggcgttctcccaaagattaggtcgttttccaaagagccgcgtcccggcaagtccggcggaattcaccagtgttcctgaagctgctgtgtcctctagttgagtttctggcgcccctgcctgtgcccgcatgtgtgcctggccgcagggcggggctgggggctgccgagccaccatgcttgcctgaagcttcggccgcgccacccgggcaagggtcctcttttcctggcagctgctgtgggtggggcccagacaccagcctagcctggctctgccccgcagacggtctgtgtgctgtttgaaaataaatcttagtgttcaaaacaaaatgaaacaaaaaaaaaatgataaaaactctcagaaaaa

SEQ ID NO: 333494 - DNA, 1612 bp, Homo sapiens
ggcggtgcagctggagcgtcaggggagtcccgctcgccgcagccccagcgccgcgcgcgcccctccctcctcgcggacctggcggtgccggcgcccggagtggccctttaaaaggcagcttattgtccggagggggcgggcggggggcgccgaccgcggcctgaggcccggcccctcccctctccctccctctgtccccgcgtcgctcgctggctagctcgctggctcgctcgcccgtccggcgcacgctccgcctccgtcagttggctccgctgtcgggtgcgcggcgtggagcggcagccggtctggacgcgcggccggggctgggggctgggagcgcggcgcgcaagatctccccgcgcgagagcggcccctgccaccgggcgaggcctgcgccgcgatggcagagatgggcagtaaaggggtgacggcgggaaagatcgccagcaacgtgcagaagaagctcacccgcgcgcaggagaaggttctccagaagctggggaaggcagatgagaccaaggatgagcagtttgagcagtgcgtccagaatttcaacaagcagctgacggagggcacccggctgcagaaggatctccggacctacctggcctccgtcaaagccatgcacgaggcttccaagaagctgaatgagtgtctgcaggaggtgtatgagcccgattggcccggcagggatgaggcaaacaagatcgcagagaacaacgacctgctgtggatggattaccaccagaagctggtggaccaggcgctgctgaccatggacacgtacctgggccagttccccgacatcaagtcacgcattgccaagcgggggcgcaagctggtggactacgacagtgcccggcaccactacgagtcccttcaaactgccaaaaagaaggatgaagccaaaattgccaaggccgaggaggagctcatcaaagcccagaaggtgtttgaggagatgaatgtggatctgcaggaggagctgccgtccctgtggaacagccgcgtaggtttctacgtcaacacgttccagagcatcgcgggcctggaggaaaacttccacaaggagatgagcaagctcaaccagaacctcaatgatgtgctggtcggcctggagaagcaacacgggagcaacaccttcacggtcaaggcccagcccagtgacaacgcgcctgcaaaagggaacaagagcccttcgcctccagatggctcccctgccgccacccccgagatcagagtcaaccacgagccagagccggccggcggggccacgcccggggccaccctccccaagtccccatctcagccagcagaggcctcggaggtggcgggtgggacccaacctgcggctggagcccaggagccaggggagacggcggcaagtgaagcagcctccagctctcttcctgctgtcgtggtggagaccttcccagcaactccgcgccacccgggcaagggtcctcttttcctggcagctgctgtgggtggggcccagacaccagcctagcctggctctgccccgcagacggtctgtgtgctgtttgaaaataaatcttagtgttcaaaacaaaatgaaacaaaaaaaaaatgataaaaactctcagaaaaa

SEQ ID NO: 333495 - DNA, 1380 bp, Homo sapiens
ggcggtgcagctggagcgtcaggggagtcccgctcgccgcagccccagcgccgcgcgcgcccctccctcctcgcggacctggcggtgccggcgcccggagtggccctttaaaaggcagcttattgtccggagggggcgggcggggggcgccgaccgcggcctgaggcccggcccctcccctctccctccctctgtccccgcgtcgctcgctggctagctcgctggctcgctcgcccgtccggcgcacgctccgcctccgtcagttggctccgctgtcgggtgcgcggcgtggagcggcagccggtctggacgcgcggccggggctgggggctgggagcgcggcgcgcaagatctccccgcgcgagagcggcccctgccaccgggcgaggcctgcgccgcgatggcagagatgggcagtaaaggggtgacggcgggaaagatcgccagcaacgtgcagaagaagctcacccgcgcgcaggagaaggttctccagaagctggggaaggcagatgagaccaaggatgagcagtttgagcagtgcgtccagaatttcaacaagcagctgacggagggcacccggctgcagaaggatctccggacctacctggcctccgtcaaagccatgcacgaggcttccaagaagctgaatgagtgtctgcaggaggtgtatgagcccgattggcccggcagggatgaggcaaacaagatcgcagagaacaacgacctgctgtggatggattaccaccagaagctggtggaccaggcgctgctgaccatggacacgtacctgggccagttccccgacatcaagtcacgcattgccaagcgggggcgcaagctggtggactacgacagtgcccggcaccactacgagtcccttcaaactgccaaaaagaaggatgaagccaaaattgccaaggccgaggaggagctcatcaaagcccagaaggtgtttgaggagatgaatgtggatctgcaggaggagctgccgtccctgtggaacagccgcgtaggtttctacgtcaacacgttccagagcatcgcgggcctggaggaaaacttccacaaggagatgagcaagctcaaccagaacctcaatgatgtgctggtcggcctggagaagcaacacgggagcaacaccttcacggtcaaggcccagcccagcggggctgggggctgccgagccaccatgcttgcctgaagcttcggccgcgccacccgggcaagggtcctcttttcctggcagctgctgtgggtggggcccagacaccagcctagcctggctctgccccgcagacggtctgtgtgctgtttgaaaataaatcttagtgttcaaaacaaaatgaaacaaaaaaaaaatgataaaaactctcagaaaaa

SEQ ID NO: 333496 - DNA, 1380 bp, Homo sapiens
ggcggtgcagctggagcgtcaggggagtcccgctcgccgcagccccagcgccgcgcgcgcccctccctcctcgcggacctggcggtgccggcgcccggagtggccctttaaaaggcagcttattgtccggagggggcgggcggggggcgccgaccgcggcctgaggcccggcccctcccctctccctccctctgtccccgcgtcgctcgctggctagctcgctggctcgctcgcccgtccggcgcacgctccgcctccgtcagttggctccgctgtcgggtgcgcggcgtggagcggcagccggtctggacgcgcggccggggctgggggctgggagcgcggcgcgcaagatctccccgcgcgagagcggcccctgccaccgggcgaggcctgcgccgcgatggcagagatgggcagtaaaggggtgacggcgggaaagatcgccagcaacgtgcagaagaagctcacccgcgcgcaggagaaggttctccagaagctggggaaggcagatgagaccaaggatgagcagtttgagcagtgcgtccagaatttcaacaagcagctgacggagggcacccggctgcagaaggatctccggacctacctggcctccgtcaaagccatgcacgaggcttccaagaagctgaatgagtgtctgcaggaggtgtatgagcccgattggcccggcagggatgaggcaaacaagatcgcagagaacaacgacctgctgtggatggattaccaccagaagctggtggaccaggcgctgctgaccatggacacgtacctgggccagttccccgacatcaagtcacgcattgccaagcgggggcgcaagctggtggactacgacagtgcccggcaccactacgagtcccttcaaactgccaaaaagaaggatgaagccaaaattgccaaggccgaggaggagctcatcaaagcccagaaggtgtttgaggagatgaatgtggatctgcaggaggagctgccgtccctgtggaacagccgcgtaggtttctacgtcaacacgttccagagcatcgcgggcctggaggaaaacttccacaaggagatgagcaagctcaaccagaacctcaatgatgtgctggtcggcctggagaagcaacacgggagcaacaccttcacggtcaaggcccagcccagaaagaaaagtaaactgttttcgcggctgcgcagaaagaagaacagccgcgccacccgggcaagggtcctcttttcctggcagctgctgtgggtggggcccagacaccagcctagcctggctctgccccgcagacggtctgtgtgctgtttgaaaataaatcttagtgttcaaaacaaaatgaaacaaaaaaaaaatgataaaaactctcagaaaaa

SEQ ID NO: 333497 - DNA, 539 bp, Homo sapiens
ggcggtgcagctggagcgtcaggggagtcccgctcgccgcagccccagcgccgcgcgcgcccctccctcctcgcggacctggcggtgccggcgcccggagtggccctttaaaaggcagcttattgtccggagggggcgggcggggggcgccgaccgcggcctgaggcccggcccctcccctctccctccctctgtccccgcgtcgctcgctggctagctcgctggctcgctcgcccgtccggcgcacgctccgcctccgtcagttggctccgctgtcgggtgcgcggcgtggagcggcagccggtctggacgcgcggccggggcggggctgggggctgccgagccaccatgcttgcctgaagcttcggccgcgccacccgggcaagggtcctcttttcctggcagctgctgtgggtggggcccagacaccagcctagcctggctctgccccgcagacggtctgtgtgctgtttgaaaataaatcttagtgttcaaaacaaaatgaaacaaaaaaaaaatgataaaaactctcagaaaaa

SEQ ID NO: 333498 - DNA, 2349 bp, Homo sapiens
ggcggtgcagctggagcgtcaggggagtcccgctcgccgcagccccagcgccgcgcgcgcccctccctcctcgcggacctggcggtgccggcgcccggagtggccctttaaaaggcagcttattgtccggagggggcgggcggggggcgccgaccgcggcctgaggcccggcccctcccctctccctccctctgtccccgcgtcgctcgctggctagctcgctggctcgctcgcccgtccggcgcacgctccgcctccgtcagttggctccgctgtcgggtgcgcggcgtggagcggcagccggtctggacgcgcggccggggctgggggctgggagcgcggcgcgcaagatctccccgcgcgagagcggcccctgccaccgggcgaggcctgcgccgcgatggcagagatgggcagtaaaggggtgacggcgggaaagatcgccagcaacgtgcagaagaagctcacccgcgcgcaggagaaggttctccagaagctggggaaggcagatgagaccaaggatgagcagtttgagcagtgcgtccagaatttcaacaagcagctgacggagggcacccggctgcagaaggatctccggacctacctggcctccgtcaaagccatgcacgaggcttccaagaagctgaatgagtgtctgcaggaggtgtatgagcccgattggcccggcagggatgaggcaaacaagatcgcagagaacaacgacctgctgtggatggattaccaccagaagctggtggaccaggcgctgctgaccatggacacgtacctgggccagttccccgacatcaagtcacgcattgccaagcgggggcgcaagctggtggactacgacagtgcccggcaccactacgagtcccttcaaactgccaaaaagaaggatgaagccaaaattgccaaggccgaggaggagctcatcaaagcccagaaggtgtttgaggagatgaatgtggatctgcaggaggagctgccgtccctgtggaacagccgcgtaggtttctacgtcaacacgttccagagcatcgcgggcctggaggaaaacttccacaaggagatgagcaagctcaaccagaacctcaatgatgtgctggtcggcctggagaagcaacacgggagcaacaccttcacggtcaaggcccagcccagtgacaacgcgcctgcaaaagggaacaagagcccttcgcctccagatggctcccctgccgccacccccgagatcagagtcaaccacgagccagagccggccggcggggccacgcccggggccaccctccccaagtccccatctcagctccggaaaggcccaccagtccctccgcctcccaaacacaccccgtccaaggaagtcaagcaggagcagatcctcagcctgtttgaggacacgtttgtccctgagatcagcgtgaccaccccctcccagccagcagaggcctcggaggtggcgggtgggacccaacctgcggctggagcccaggagccaggggagacggcggcaagtgaagcagcctccagctctcttcctgctgtcgtggtggagaccttcccagcaactgtgaatggcaccgtggagggcggcagtggggccgggcgcttggacctgcccccaggtttcatgttcaaggtacaggcccagcacgactacacggccactgacacagacgagctgcagctcaaggctggtgatgtggtgctggtgatccccttccagaaccctgaagagcaggatgaaggctggctcatgggcgtgaaggagagcgactggaaccagcacaaggagctggagaagtgccgtggcgtcttccccgagaacttcactgagagggtcccatgacggcggggcccaggcagcctccgggcgtgtgaagaacacctcctcccgaaaaatgtgtggttcttttttttgttttgttttcgtttttcatcttttgaagagcaaagggaaatcaagaggagacccccaggcagaggggcgttctcccaaagattaggtcgttttccaaagagccgcgtcccggcaagtccggcggaattcaccagtgttcctgaagctgctgtgtcctctagttgagtttctggcgcccctgcctgtgcccgcatgtgtgcctggccgcagggcggggctgggggctgccgagccaccatgcttgcctgaagcttcggccgcgccacccgggcaagggtcctcttttcctggcagctgctgtgggtggggcccagacaccagcctagcctggctctgccccgcagacggtctgtgtgctgtttgaaaataaatcttagtgttcaaaacaaaatgaaacaaaaaaaaaatgataaaaactctcagaaaaa

SEQ ID NO: 333499 - DNA, 2220 bp, Homo sapiens
ggcggtgcagctggagcgtcaggggagtcccgctcgccgcagccccagcgccgcgcgcgcccctccctcctcgcggacctggcggtgccggcgcccggagtggccctttaaaaggcagcttattgtccggagggggcgggcggggggcgccgaccgcggcctgaggcccggcccctcccctctccctccctctgtccccgcgtcgctcgctggctagctcgctggctcgctcgcccgtccggcgcacgctccgcctccgtcagttggctccgctgtcgggtgcgcggcgtggagcggcagccggtctggacgcgcggccggggctgggggctgggagcgcggcgcgcaagatctccccgcgcgagagcggcccctgccaccgggcgaggcctgcgccgcgatggcagagatgggcagtaaaggggtgacggcgggaaagatcgccagcaacgtgcagaagaagctcacccgcgcgcaggagaaggttctccagaagctggggaaggcagatgagaccaaggatgagcagtttgagcagtgcgtccagaatttcaacaagcagctgacggagggcacccggctgcagaaggatctccggacctacctggcctccgtcaaagccatgcacgaggcttccaagaagctgaatgagtgtctgcaggaggtgtatgagcccgattggcccggcagggatgaggcaaacaagatcgcagagaacaacgacctgctgtggatggattaccaccagaagctggtggaccaggcgctgctgaccatggacacgtacctgggccagttccccgacatcaagtcacgcattgccaagcgggggcgcaagctggtggactacgacagtgcccggcaccactacgagtcccttcaaactgccaaaaagaaggatgaagccaaaattgccaaggccgaggaggagctcatcaaagcccagaaggtgtttgaggagatgaatgtggatctgcaggaggagctgccgtccctgtggaacagccgcgtaggtttctacgtcaacacgttccagagcatcgcgggcctggaggaaaacttccacaaggagatgagcaagctcaaccagaacctcaatgatgtgctggtcggcctggagaagcaacacgggagcaacaccttcacggtcaaggcccagcccagtgacaacgcgcctgcaaaagggaacaagagcccttcgcctccagatggctcccctgccgccacccccgagatcagagtcaaccacgagccagagccggccggcggggccacgcccggggccaccctccccaagtccccatctcagccagcagaggcctcggaggtggcgggtgggacccaacctgcggctggagcccaggagccaggggagacggcggcaagtgaagcagcctccagctctcttcctgctgtcgtggtggagaccttcccagcaactgtgaatggcaccgtggagggcggcagtggggccgggcgcttggacctgcccccaggtttcatgttcaaggtacaggcccagcacgactacacggccactgacacagacgagctgcagctcaaggctggtgatgtggtgctggtgatccccttccagaaccctgaagagcaggatgaaggctggctcatgggcgtgaaggagagcgactggaaccagcacaaggagctggagaagtgccgtggcgtcttccccgagaacttcactgagagggtcccatgacggcggggcccaggcagcctccgggcgtgtgaagaacacctcctcccgaaaaatgtgtggttcttttttttgttttgttttcgtttttcatcttttgaagagcaaagggaaatcaagaggagacccccaggcagaggggcgttctcccaaagattaggtcgttttccaaagagccgcgtcccggcaagtccggcggaattcaccagtgttcctgaagctgctgtgtcctctagttgagtttctggcgcccctgcctgtgcccgcatgtgtgcctggccgcagggcggggctgggggctgccgagccaccatgcttgcctgaagcttcggccgcgccacccgggcaagggtcctcttttcctggcagctgctgtgggtggggcccagacaccagcctagcctggctctgccccgcagacggtctgtgtgctgtttgaaaataaatcttagtgttcaaaacaaaatgaaacaaaaaaaaaatgataaaaactctcagaaaaa

SEQ ID NO: 333500 - DNA, 2328 bp, Homo sapiens
ggcggtgcagctggagcgtcaggggagtcccgctcgccgcagccccagcgccgcgcgcgcccctccctcctcgcggacctggcggtgccggcgcccggagtggccctttaaaaggcagcttattgtccggagggggcgggcggggggcgccgaccgcggcctgaggcccggcccctcccctctccctccctctgtccccgcgtcgctcgctggctagctcgctggctcgctcgcccgtccggcgcacgctccgcctccgtcagttggctccgctgtcgggtgcgcggcgtggagcggcagccggtctggacgcgcggccggggctgggggctgggagcgcggcgcgcaagatctccccgcgcgagagcggcccctgccaccgggcgaggcctgcgccgcgatggcagagatgggcagtaaaggggtgacggcgggaaagatcgccagcaacgtgcagaagaagctcacccgcgcgcaggagaaggttctccagaagctggggaaggcagatgagaccaaggatgagcagtttgagcagtgcgtccagaatttcaacaagcagctgacggagggcacccggctgcagaaggatctccggacctacctggcctccgtcaaagccatgcacgaggcttccaagaagctgaatgagtgtctgcaggaggtgtatgagcccgattggcccggcagggatgaggcaaacaagatcgcagagaacaacgacctgctgtggatggattaccaccagaagctggtggaccaggcgctgctgaccatggacacgtacctgggccagttccccgacatcaagtcacgcattgccaagcgggggcgcaagctggtggactacgacagtgcccggcaccactacgagtcccttcaaactgccaaaaagaaggatgaagccaaaattgccaaggccgaggaggagctcatcaaagcccagaaggtgtttgaggagatgaatgtggatctgcaggaggagctgccgtccctgtggaacagccgcgtaggtttctacgtcaacacgttccagagcatcgcgggcctggaggaaaacttccacaaggagatgagcaagctcaaccagaacctcaatgatgtgctggtcggcctggagaagcaacacgggagcaacaccttcacggtcaaggcccagcccagtgacaacgcgcctgcaaaagggaacaagagcccttcgcctccagatggctcccctgccgccacccccgagatcagagtcaaccacgagccagagccggccggcggggccacgcccggggccaccctccccaagtccccatctcagcccacagagagtccagccggcagcctgccttccggggagcccagcgctgccgagggcacctttgctgtgtcctggcccagccagacggccgagccggggcctgcccaaccagcagaggcctcggaggtggcgggtgggacccaacctgcggctggagcccaggagccaggggagacggcggcaagtgaagcagcctccagctctcttcctgctgtcgtggtggagaccttcccagcaactgtgaatggcaccgtggagggcggcagtggggccgggcgcttggacctgcccccaggtttcatgttcaaggtacaggcccagcacgactacacggccactgacacagacgagctgcagctcaaggctggtgatgtggtgctggtgatccccttccagaaccctgaagagcaggatgaaggctggctcatgggcgtgaaggagagcgactggaaccagcacaaggagctggagaagtgccgtggcgtcttccccgagaacttcactgagagggtcccatgacggcggggcccaggcagcctccgggcgtgtgaagaacacctcctcccgaaaaatgtgtggttcttttttttgttttgttttcgtttttcatcttttgaagagcaaagggaaatcaagaggagacccccaggcagaggggcgttctcccaaagattaggtcgttttccaaagagccgcgtcccggcaagtccggcggaattcaccagtgttcctgaagctgctgtgtcctctagttgagtttctggcgcccctgcctgtgcccgcatgtgtgcctggccgcagggcggggctgggggctgccgagccaccatgcttgcctgaagcttcggccgcgccacccgggcaagggtcctcttttcctggcagctgctgtgggtggggcccagacaccagcctagcctggctctgccccgcagacggtctgtgtgctgtttgaaaataaatcttagtgttcaaaacaaaatgaaacaaaaaaaaaatgataaaaactctcagaaaaa

SEQ ID NO: 333501 - DNA, 2394 bp, Homo sapiens
ggcggtgcagctggagcgtcaggggagtcccgctcgccgcagccccagcgccgcgcgcgcccctccctcctcgcggacctggcggtgccggcgcccggagtggccctttaaaaggcagcttattgtccggagggggcgggcggggggcgccgaccgcggcctgaggcccggcccctcccctctccctccctctgtccccgcgtcgctcgctggctagctcgctggctcgctcgcccgtccggcgcacgctccgcctccgtcagttggctccgctgtcgggtgcgcggcgtggagcggcagccggtctggacgcgcggccggggctgggggctgggagcgcggcgcgcaagatctccccgcgcgagagcggcccctgccaccgggcgaggcctgcgccgcgatggcagagatgggcagtaaaggggtgacggcgggaaagatcgccagcaacgtgcagaagaagctcacccgcgcgcaggagaaggttctccagaagctggggaaggcagatgagaccaaggatgagcagtttgagcagtgcgtccagaatttcaacaagcagctgacggagggcacccggctgcagaaggatctccggacctacctggcctccgtcaaagccatgcacgaggcttccaagaagctgaatgagtgtctgcaggaggtgtatgagcccgattggcccggcagggatgaggcaaacaagatcgcagagaacaacgacctgctgtggatggattaccaccagaagctggtggaccaggcgctgctgaccatggacacgtacctgggccagttccccgacatcaagtcacgcattgccaagcgggggcgcaagctggtggactacgacagtgcccggcaccactacgagtcccttcaaactgccaaaaagaaggatgaagccaaaattgccaaggccgaggaggagctcatcaaagcccagaaggtgtttgaggagatgaatgtggatctgcaggaggagctgccgtccctgtggaacagccgcgtaggtttctacgtcaacacgttccagagcatcgcgggcctggaggaaaacttccacaaggagatgagcaagctcaaccagaacctcaatgatgtgctggtcggcctggagaagcaacacgggagcaacaccttcacggtcaaggcccagcccagaaagaaaagtaaactgttttcgcggctgcgcagaaagaagaacagtgacaacgcgcctgcaaaagggaacaagagcccttcgcctccagatggctcccctgccgccacccccgagatcagagtcaaccacgagccagagccggccggcggggccacgcccggggccaccctccccaagtccccatctcagctccggaaaggcccaccagtccctccgcctcccaaacacaccccgtccaaggaagtcaagcaggagcagatcctcagcctgtttgaggacacgtttgtccctgagatcagcgtgaccaccccctcccagccagcagaggcctcggaggtggcgggtgggacccaacctgcggctggagcccaggagccaggggagacggcggcaagtgaagcagcctccagctctcttcctgctgtcgtggtggagaccttcccagcaactgtgaatggcaccgtggagggcggcagtggggccgggcgcttggacctgcccccaggtttcatgttcaaggtacaggcccagcacgactacacggccactgacacagacgagctgcagctcaaggctggtgatgtggtgctggtgatccccttccagaaccctgaagagcaggatgaaggctggctcatgggcgtgaaggagagcgactggaaccagcacaaggagctggagaagtgccgtggcgtcttccccgagaacttcactgagagggtcccatgacggcggggcccaggcagcctccgggcgtgtgaagaacacctcctcccgaaaaatgtgtggttcttttttttgttttgttttcgtttttcatcttttgaagagcaaagggaaatcaagaggagacccccaggcagaggggcgttctcccaaagattaggtcgttttccaaagagccgcgtcccggcaagtccggcggaattcaccagtgttcctgaagctgctgtgtcctctagttgagtttctggcgcccctgcctgtgcccgcatgtgtgcctggccgcagggcggggctgggggctgccgagccaccatgcttgcctgaagcttcggccgcgccacccgggcaagggtcctcttttcctggcagctgctgtgggtggggcccagacaccagcctagcctggctctgccccgcagacggtctgtgtgctgtttgaaaataaatcttagtgttcaaaacaaaatgaaacaaaaaaaaaatgataaaaactctcagaaaaa

SEQ ID NO: 333502 - DNA, 2175 bp, Homo sapiens
ggcggtgcagctggagcgtcaggggagtcccgctcgccgcagccccagcgccgcgcgcgcccctccctcctcgcggacctggcggtgccggcgcccggagtggccctttaaaaggcagcttattgtccggagggggcgggcggggggcgccgaccgcggcctgaggcccggcccctcccctctccctccctctgtccccgcgtcgctcgctggctagctcgctggctcgctcgcccgtccggcgcacgctccgcctccgtcagttggctccgctgtcgggtgcgcggcgtggagcggcagccggtctggacgcgcggccggggctgggggctgggagcgcggcgcgcaagatctccccgcgcgagagcggcccctgccaccgggcgaggcctgcgccgcgatggcagagatgggcagtaaaggggtgacggcgggaaagatcgccagcaacgtgcagaagaagctcacccgcgcgcaggagaaggttctccagaagctggggaaggcagatgagaccaaggatgagcagtttgagcagtgcgtccagaatttcaacaagcagctgacggagggcacccggctgcagaaggatctccggacctacctggcctccgtcaaagccatgcacgaggcttccaagaagctgaatgagtgtctgcaggaggtgtatgagcccgattggcccggcagggatgaggcaaacaagatcgcagagaacaacgacctgctgtggatggattaccaccagaagctggtggaccaggcgctgctgaccatggacacgtacctgggccagttccccgacatcaagtcacgcattgccaagcgggggcgcaagctggtggactacgacagtgcccggcaccactacgagtcccttcaaactgccaaaaagaaggatgaagccaaaattgccaaggccgaggaggagctcatcaaagcccagaaggtgtttgaggagatgaatgtggatctgcaggaggagctgccgtccctgtggaacagccgcgtaggtttctacgtcaacacgttccagagcatcgcgggcctggaggaaaacttccacaaggagatgagcaagctcaaccagaacctcaatgatgtgctggtcggcctggagaagcaacacgggagcaacaccttcacggtcaaggcccagcccagaaagaaaagtaaactgttttcgcggctgcgcagaaagaagaacagtgacaacgcgcctgcaaaagggaacaagagcccttcgcctccagatggctcccctgccgccacccccgagatcagagtcaaccacgagccagagccggccggcggggccacgcccggggccaccctccccaagtccccatctcagagctctcttcctgctgtcgtggtggagaccttcccagcaactgtgaatggcaccgtggagggcggcagtggggccgggcgcttggacctgcccccaggtttcatgttcaaggtacaggcccagcacgactacacggccactgacacagacgagctgcagctcaaggctggtgatgtggtgctggtgatccccttccagaaccctgaagagcaggatgaaggctggctcatgggcgtgaaggagagcgactggaaccagcacaaggagctggagaagtgccgtggcgtcttccccgagaacttcactgagagggtcccatgacggcggggcccaggcagcctccgggcgtgtgaagaacacctcctcccgaaaaatgtgtggttcttttttttgttttgttttcgtttttcatcttttgaagagcaaagggaaatcaagaggagacccccaggcagaggggcgttctcccaaagattaggtcgttttccaaagagccgcgtcccggcaagtccggcggaattcaccagtgttcctgaagctgctgtgtcctctagttgagtttctggcgcccctgcctgtgcccgcatgtgtgcctggccgcagggcggggctgggggctgccgagccaccatgcttgcctgaagcttcggccgcgccacccgggcaagggtcctcttttcctggcagctgctgtgggtggggcccagacaccagcctagcctggctctgccccgcagacggtctgtgtgctgtttgaaaataaatcttagtgttcaaaacaaaatgaaacaaaaaaaaaatgataaaaactctcagaaaaa

SEQ ID NO: 333503 - DNA, 2259 bp, Homo sapiens
ggcggtgcagctggagcgtcaggggagtcccgctcgccgcagccccagcgccgcgcgcgcccctccctcctcgcggacctggcggtgccggcgcccggagtggccctttaaaaggcagcttattgtccggagggggcgggcggggggcgccgaccgcggcctgaggcccggcccctcccctctccctccctctgtccccgcgtcgctcgctggctagctcgctggctcgctcgcccgtccggcgcacgctccgcctccgtcagttggctccgctgtcgggtgcgcggcgtggagcggcagccggtctggacgcgcggccggggctgggggctgggagcgcggcgcgcaagatctccccgcgcgagagcggcccctgccaccgggcgaggcctgcgccgcgatggcagagatgggcagtaaaggggtgacggcgggaaagatcgccagcaacgtgcagaagaagctcacccgcgcgcaggagaaggttctccagaagctggggaaggcagatgagaccaaggatgagcagtttgagcagtgcgtccagaatttcaacaagcagctgacggagggcacccggctgcagaaggatctccggacctacctggcctccgtcaaagccatgcacgaggcttccaagaagctgaatgagtgtctgcaggaggtgtatgagcccgattggcccggcagggatgaggcaaacaagatcgcagagaacaacgacctgctgtggatggattaccaccagaagctggtggaccaggcgctgctgaccatggacacgtacctgggccagttccccgacatcaagtcacgcattgccaagcgggggcgcaagctggtggactacgacagtgcccggcaccactacgagtcccttcaaactgccaaaaagaaggatgaagccaaaattgccaaggccgaggaggagctcatcaaagcccagaaggtgtttgaggagatgaatgtggatctgcaggaggagctgccgtccctgtggaacagccgcgtaggtttctacgtcaacacgttccagagcatcgcgggcctggaggaaaacttccacaaggagatgagcaagctcaaccagaacctcaatgatgtgctggtcggcctggagaagcaacacgggagcaacaccttcacggtcaaggcccagcccagtgacaacgcgcctgcaaaagggaacaagagcccttcgcctccagatggctcccctgccgccacccccgagatcagagtcaaccacgagccagagccggccggcggggccacgcccggggccaccctccccaagtccccatctcagctccggaaaggcccaccagtccctccgcctcccaaacacaccccgtccaaggaagtcaagcaggagcagatcctcagcctgtttgaggacacgtttgtccctgagatcagcgtgaccaccccctcccagagctctcttcctgctgtcgtggtggagaccttcccagcaactgtgaatggcaccgtggagggcggcagtggggccgggcgcttggacctgcccccaggtttcatgttcaaggtacaggcccagcacgactacacggccactgacacagacgagctgcagctcaaggctggtgatgtggtgctggtgatccccttccagaaccctgaagagcaggatgaaggctggctcatgggcgtgaaggagagcgactggaaccagcacaaggagctggagaagtgccgtggcgtcttccccgagaacttcactgagagggtcccatgacggcggggcccaggcagcctccgggcgtgtgaagaacacctcctcccgaaaaatgtgtggttcttttttttgttttgttttcgtttttcatcttttgaagagcaaagggaaatcaagaggagacccccaggcagaggggcgttctcccaaagattaggtcgttttccaaagagccgcgtcccggcaagtccggcggaattcaccagtgttcctgaagctgctgtgtcctctagttgagtttctggcgcccctgcctgtgcccgcatgtgtgcctggccgcagggcggggctgggggctgccgagccaccatgcttgcctgaagcttcggccgcgccacccgggcaagggtcctcttttcctggcagctgctgtgggtggggcccagacaccagcctagcctggctctgccccgcagacggtctgtgtgctgtttgaaaataaatcttagtgttcaaaacaaaatgaaacaaaaaaaaaatgataaaaactctcagaaaaa

SEQ ID NO: 333504 - DNA, 2153 bp, Homo sapiens
ggcggtgcagctggagcgtcaggggagtcccgctcgccgcagccccagcgccgcgcgcgcccctccctcctcgcggacctggcggtgccggcgcccggagtggccctttaaaaggcagcttattgtccggagggggcgggcggggggcgccgaccgcggcctgaggcccggcccctcccctctccctccctctgtccccgcgtcgctcgctggctagctcgctggctcgctcgcccgtccggcgcacgctccgcctccgtcagttggctccgctgtcgggtgcgcggcgtggagcggcagccggtctggacgcgcggccggggctgggggctgggagcgcggcgcgcaagatctccccgcgcgagagcggcccctgccaccgggcgaggcctgcgccgcgatggcagagatgggcagtaaaggggtgacggcgggaaagatcgccagcaacgtgcagaagaagctcacccgcgcgcaggagaaggttctccagaagctggggaaggcagatgagaccaaggatgagcagtttgagcagtgcgtccagaatttcaacaagcagctgacggagggcacccggctgcagaaggatctccggacctacctggcctccgtcaaagccatgcacgaggcttccaagaagctgaatgagtgtctgcaggaggtgtatgagcccgattggcccggcagggatgaggcaaacaagatcgcagagaacaacgacctgctgtggatggattaccaccagaagctggtggaccaggcgctgctgaccatggacacgtacctgggccagttccccgacatcaagtcacgcattgccaagcgggggcgcaagctggtggactacgacagtgcccggcaccactacgagtcccttcaaactgccaaaaagaaggatgaagccaaaattgccaaggccgaggaggagctcatcaaagcccagaaggtgtttgaggagatgaatgtggatctgcaggaggagctgccgtccctgtggaacagccgcgtaggtttctacgtcaacacgttccagagcatcgcgggcctggaggaaaacttccacaaggagatgagcaagctcaaccagaacctcaatgatgtgctggtcggcctggagaagcaacacgggagcaacaccttcacggtcaaggcccagcccagtgacaacgcgcctgcaaaagggaacaagagcccttcgcctccagatggctcccctgccgccacccccgagatcagagtcaaccacgagccagagccggccggcggggccacgcccggggccaccctccccaagtccccatctcagctgacccgtacctctgccaccagagctctcttcctgctgtcgtggtggagaccttcccagcaactgtgaatggcaccgtggagggcggcagtggggccgggcgcttggacctgcccccaggtttcatgttcaaggtacaggcccagcacgactacacggccactgacacagacgagctgcagctcaaggctggtgatgtggtgctggtgatccccttccagaaccctgaagagcaggatgaaggctggctcatgggcgtgaaggagagcgactggaaccagcacaaggagctggagaagtgccgtggcgtcttccccgagaacttcactgagagggtcccatgacggcggggcccaggcagcctccgggcgtgtgaagaacacctcctcccgaaaaatgtgtggttcttttttttgttttgttttcgtttttcatcttttgaagagcaaagggaaatcaagaggagacccccaggcagaggggcgttctcccaaagattaggtcgttttccaaagagccgcgtcccggcaagtccggcggaattcaccagtgttcctgaagctgctgtgtcctctagttgagtttctggcgcccctgcctgtgcccgcatgtgtgcctggccgcagggcggggctgggggctgccgagccaccatgcttgcctgaagcttcggccgcgccacccgggcaagggtcctcttttcctggcagctgctgtgggtggggcccagacaccagcctagcctggctctgccccgcagacggtctgtgtgctgtttgaaaataaatcttagtgttcaaaacaaaatgaaacaaaaaaaaaatgataaaaactctcagaaaaa

SEQ ID NO: 333505 - DNA, 2421 bp, Homo sapiens
ggcggtgcagctggagcgtcaggggagtcccgctcgccgcagccccagcgccgcgcgcgcccctccctcctcgcggacctggcggtgccggcgcccggagtggccctttaaaaggcagcttattgtccggagggggcgggcggggggcgccgaccgcggcctgaggcccggcccctcccctctccctccctctgtccccgcgtcgctcgctggctagctcgctggctcgctcgcccgtccggcgcacgctccgcctccgtcagttggctccgctgtcgggtgcgcggcgtggagcggcagccggtctggacgcgcggccggggctgggggctgggagcgcggcgcgcaagatctccccgcgcgagagcggcccctgccaccgggcgaggcctgcgccgcgatggcagagatgggcagtaaaggggtgacggcgggaaagatcgccagcaacgtgcagaagaagctcacccgcgcgcaggagaaggttctccagaagctggggaaggcagatgagaccaaggatgagcagtttgagcagtgcgtccagaatttcaacaagcagctgacggagggcacccggctgcagaaggatctccggacctacctggcctccgtcaaagccatgcacgaggcttccaagaagctgaatgagtgtctgcaggaggtgtatgagcccgattggcccggcagggatgaggcaaacaagatcgcagagaacaacgacctgctgtggatggattaccaccagaagctggtggaccaggcgctgctgaccatggacacgtacctgggccagttccccgacatcaagtcacgcattgccaagcgggggcgcaagctggtggactacgacagtgcccggcaccactacgagtcccttcaaactgccaaaaagaaggatgaagccaaaattgccaagcctgtctcgctgcttgagaaagccgccccccagtggtgccaaggcaaactgcaggctcatctcgtagctcaaactaacctgctccgaaatcaggccgaggaggagctcatcaaagcccagaaggtgtttgaggagatgaatgtggatctgcaggaggagctgccgtccctgtggaacagccgcgtaggtttctacgtcaacacgttccagagcatcgcgggcctggaggaaaacttccacaaggagatgagcaagctcaaccagaacctcaatgatgtgctggtcggcctggagaagcaacacgggagcaacaccttcacggtcaaggcccagcccagtgacaacgcgcctgcaaaagggaacaagagcccttcgcctccagatggctcccctgccgccacccccgagatcagagtcaaccacgagccagagccggccggcggggccacgcccggggccaccctccccaagtccccatctcagcccacagagagtccagccggcagcctgccttccggggagcccagcgctgccgagggcacctttgctgtgtcctggcccagccagacggccgagccggggcctgcccaaccagcagaggcctcggaggtggcgggtgggacccaacctgcggctggagcccaggagccaggggagacggcggcaagtgaagcagcctccagctctcttcctgctgtcgtggtggagaccttcccagcaactgtgaatggcaccgtggagggcggcagtggggccgggcgcttggacctgcccccaggtttcatgttcaaggtacaggcccagcacgactacacggccactgacacagacgagctgcagctcaaggctggtgatgtggtgctggtgatccccttccagaaccctgaagagcaggatgaaggctggctcatgggcgtgaaggagagcgactggaaccagcacaaggagctggagaagtgccgtggcgtcttccccgagaacttcactgagagggtcccatgacggcggggcccaggcagcctccgggcgtgtgaagaacacctcctcccgaaaaatgtgtggttcttttttttgttttgttttcgtttttcatcttttgaagagcaaagggaaatcaagaggagacccccaggcagaggggcgttctcccaaagattaggtcgttttccaaagagccgcgtcccggcaagtccggcggaattcaccagtgttcctgaagctgctgtgtcctctagttgagtttctggcgcccctgcctgtgcccgcatgtgtgcctggccgcagggcggggctgggggctgccgagccaccatgcttgcctgaagcttcggccgcgccacccgggcaagggtcctcttttcctggcagctgctgtgggtggggcccagacaccagcctagcctggctctgccccgcagacggtctgtgtgctgtttgaaaataaatcttagtgttcaaaacaaaatgaaacaaaaaaaaaatgataaaaactctcagaaaaa

SEQ ID NO: 333506 - DNA, 2326 bp, Homo sapiens
ccggcagctcctggccaccgctcgctgccctccttgttccgggatggctcctgccggttcagggcctgctctgctgttgcctgtggcattcatgggcctgggcccagggaatagagtcatgcggagaagttctccagaagctggggaaggcagatgagaccaaggatgagcagtttgagcagtgcgtccagaatttcaacaagcagctgacggagggcacccggctgcagaaggatctccggacctacctggcctccgtcaaagccatgcacgaggcttccaagaagctgaatgagtgtctgcaggaggtgtatgagcccgattggcccggcagggatgaggcaaacaagatcgcagagaacaacgacctgctgtggatggattaccaccagaagctggtggaccaggcgctgctgaccatggacacgtacctgggccagttccccgacatcaagtcacgcattgccaagcgggggcgcaagctggtggactacgacagtgcccggcaccactacgagtcccttcaaactgccaaaaagaaggatgaagccaaaattgccaagcctgtctcgctgcttgagaaagccgccccccagtggtgccaaggcaaactgcaggctcatctcgtagctcaaactaacctgctccgaaatcaggccgaggaggagctcatcaaagcccagaaggtgtttgaggagatgaatgtggatctgcaggaggagctgccgtccctgtggaacagccgcgtaggtttctacgtcaacacgttccagagcatcgcgggcctggaggaaaacttccacaaggagatgagcaagctcaaccagaacctcaatgatgtgctggtcggcctggagaagcaacacgggagcaacaccttcacggtcaaggcccagcccagtgacaacgcgcctgcaaaagggaacaagagcccttcgcctccagatggctcccctgccgccacccccgagatcagagtcaaccacgagccagagccggccggcggggccacgcccggggccaccctccccaagtccccatctcagctccggaaaggcccaccagtccctccgcctcccaaacacaccccgtccaaggaagtcaagcaggagcagatcctcagcctgtttgaggacacgtttgtccctgagatcagcgtgaccaccccctcccagtttgaggccccggggcctttctcggagcaggccagtctgctggacctggactttgaccccctcccgcccgtgacgagccctgtgaaggcacccacgccctctggtcagtcaattccatgggacctctgggagcccacagagagtccagccggcagcctgccttccggggagcccagcgctgccgagggcacctttgctgtgtcctggcccagccagacggccgagccggggcctgcccaaccagcagaggcctcggaggtggcgggtgggacccaacctgcggctggagcccaggagccaggggagacggcggcaagtgaagcagcctccagctctcttcctgctgtcgtggtggagaccttcccagcaactgtgaatggcaccgtggagggcggcagtggggccgggcgcttggacctgcccccaggtttcatgttcaaggtacaggcccagcacgactacacggccactgacacagacgagctgcagctcaaggctggtgatgtggtgctggtgatccccttccagaaccctgaagagcaggatgaaggctggctcatgggcgtgaaggagagcgactggaaccagcacaaggagctggagaagtgccgtggcgtcttccccgagaacttcactgagagggtcccatgacggcggggcccaggcagcctccgggcgtgtgaagaacacctcctcccgaaaaatgtgtggttcttttttttgttttgttttcgtttttcatcttttgaagagcaaagggaaatcaagaggagacccccaggcagaggggcgttctcccaaagattaggtcgttttccaaagagccgcgtcccggcaagtccggcggaattcaccagtgttcctgaagctgctgtgtcctctagttgagtttctggcgcccctgcctgtgcccgcatgtgtgcctggccgcagggcggggctgggggctgccgagccaccatgcttgcctgaagcttcggccgcgccacccgggcaagggtcctcttttcctggcagctgctgtgggtggggcccagacaccagcctagcctggctctgccccgcagacggtctgtgtgctgtttgaaaataaatcttagtgttcaaaacaaaatgaaacaaaaaaaaaatgataaaaactctcagaaaaa

SEQ ID NO: 333507 - DNA, 1456 bp, Homo sapiens
gtcactctcgccggcagtgtcctcccgcagtgagccagcacagccccttccctgggcgggctgggcaccgggcagggtctgtgactcacctgctgcccgcagtcccttccccagcactctgtggccgtgtgatggggcctgagcaccactgcctggccgaggaggagctcatcaaagcccagaaggtgtttgaggagatgaatgtggatctgcaggaggagctgccgtccctgtggaacagccgcgtaggtttctacgtcaacacgttccagagcatcgcgggcctggaggaaaacttccacaaggagatgagcaagctcaaccagaacctcaatgatgtgctggtcggcctggagaagcaacacgggagcaacaccttcacggtcaaggcccagcccagtgacaacgcgcctgcaaaagggaacaagagcccttcgcctccagatggctcccctgccgccacccccgagatcagagtcaaccacgagccagagccggccggcggggccacgcccggggccaccctccccaagtccccatctcagccagcagaggcctcggaggtggcgggtgggacccaacctgcggctggagcccaggagccaggggagacggcggcaagtgaagcagcctccagctctcttcctgctgtcgtggtggagaccttcccagcaactgtgaatggcaccgtggagggcggcagtggggccgggcgcttggacctgcccccaggtttcatgttcaaggtacaggcccagcacgactacacggccactgacacagacgagctgcagctcaaggctggtgatgtggtgctggtgatccccttccagaaccctgaagagcaggatgaaggctggctcatgggcgtgaaggagagcgactggaaccagcacaaggagctggagaagtgccgtggcgtcttccccgagaacttcactgagagggtcccatgacggcggggcccaggcagcctccgggcgtgtgaagaacacctcctcccgaaaaatgtgtggttcttttttttgttttgttttcgtttttcatcttttgaagagcaaagggaaatcaagaggagacccccaggcagaggggcgttctcccaaagattaggtcgttttccaaagagccgcgtcccggcaagtccggcggaattcaccagtgttcctgaagctgctgtgtcctctagttgagtttctggcgcccctgcctgtgcccgcatgtgtgcctggccgcagggcggggctgggggctgccgagccaccatgcttgcctgaagcttcggccgcgccacccgggcaagggtcctcttttcctggcagctgctgtgggtggggcccagacaccagcctagcctggctctgccccgcagacggtctgtgtgctgtttgaaaataaatcttagtgttcaaaacaaaatgaaacaaaaaaaaaatgataaaaactctcagaaaaa

SEQ ID NO: 333508 - DNA, 1585 bp, Homo sapiens
gtcactctcgccggcagtgtcctcccgcagtgagccagcacagccccttccctgggcgggctgggcaccgggcagggtctgtgactcacctgctgcccgcagtcccttccccagcactctgtggccgtgtgatggggcctgagcaccactgcctggccgaggaggagctcatcaaagcccagaaggtgtttgaggagatgaatgtggatctgcaggaggagctgccgtccctgtggaacagccgcgtaggtttctacgtcaacacgttccagagcatcgcgggcctggaggaaaacttccacaaggagatgagcaagctcaaccagaacctcaatgatgtgctggtcggcctggagaagcaacacgggagcaacaccttcacggtcaaggcccagcccagtgacaacgcgcctgcaaaagggaacaagagcccttcgcctccagatggctcccctgccgccacccccgagatcagagtcaaccacgagccagagccggccggcggggccacgcccggggccaccctccccaagtccccatctcagctccggaaaggcccaccagtccctccgcctcccaaacacaccccgtccaaggaagtcaagcaggagcagatcctcagcctgtttgaggacacgtttgtccctgagatcagcgtgaccaccccctcccagccagcagaggcctcggaggtggcgggtgggacccaacctgcggctggagcccaggagccaggggagacggcggcaagtgaagcagcctccagctctcttcctgctgtcgtggtggagaccttcccagcaactgtgaatggcaccgtggagggcggcagtggggccgggcgcttggacctgcccccaggtttcatgttcaaggtacaggcccagcacgactacacggccactgacacagacgagctgcagctcaaggctggtgatgtggtgctggtgatccccttccagaaccctgaagagcaggatgaaggctggctcatgggcgtgaaggagagcgactggaaccagcacaaggagctggagaagtgccgtggcgtcttccccgagaacttcactgagagggtcccatgacggcggggcccaggcagcctccgggcgtgtgaagaacacctcctcccgaaaaatgtgtggttcttttttttgttttgttttcgtttttcatcttttgaagagcaaagggaaatcaagaggagacccccaggcagaggggcgttctcccaaagattaggtcgttttccaaagagccgcgtcccggcaagtccggcggaattcaccagtgttcctgaagctgctgtgtcctctagttgagtttctggcgcccctgcctgtgcccgcatgtgtgcctggccgcagggcggggctgggggctgccgagccaccatgcttgcctgaagcttcggccgcgccacccgggcaagggtcctcttttcctggcagctgctgtgggtggggcccagacaccagcctagcctggctctgccccgcagacggtctgtgtgctgtttgaaaataaatcttagtgttcaaaacaaaatgaaacaaaaaaaaaatgataaaaactctcagaaaaa

SEQ ID NO: 333509 - DNA, 2210 bp, Homo sapiens
gtggctaagggggcaggtcctgggcttctggactgtccttgtctccaccccgcctgcccccagcgggccctccaggtgtctgcagggccctaggtgctggctggccaggtgggggtgttctcatagccggggatcctgcagctccccgttttctgctgccgccctgctctgctgctgactaggatagcagggctaaggacatggtgggagcctgtcccaaacagcacttcccccggcctggacatggtgccagtgccttctgtgtattcgttcactgagtccccacaacacccctgtgaagcaggcgctgtcatcacctgatgcatgaggaagcccagcgtcatgggtgtgtgacctgcctgaggtcccccacctggtgggcaggggtgtggcctctgccccatcctggtgccacgctggcttcctctgggatacactcgtctgagctgggctccctgtgggcagccctgtgccctgggaggtggagagaggggcctgcgggaagggagaggtgggcagggggaggctggggcccggctgtctctcaacgactgtttgcttccccagtcttctcaccaggccagtgggagccagcccctcccacagttggccagtgggcagcctggggcctcttctcttcttcgctctccttcctcctctcccctcacttctctatctcttctctctccacacagcgtttctggaccgcctgcctcagtggtccctctcgggggtggcctggggtcttggtgtctatgttggggggctgggagggcagtgactcttcatttgctgcgtcctgctcagtggcctgggtgggactgtggcctgaggtgtgactaaccgtggctttgtctctgtctgtctcccccaaaccccgtgctctgctgtgccttcccgcgcggcccctcacccgccgccgacccacagctccggaaaggcccaccagtccctccgcctcccaaacacaccccgtccaaggaagtcaagcaggagcagatcctcagcctgtttgaggacacgtttgtccctgagatcagcgtgaccaccccctcccagtttgaggccccggggcctttctcggagcaggccagtctgctggacctggactttgaccccctcccgcccgtgacgagccctgtgaaggcacccacgccctctggtcagtcaattccatgggacctctgggagcccacagagagtccagccggcagcctgccttccggggagcccagcgctgccgagggcacctttgctgtgtcctggcccagccagacggccgagccggggcctgcccaaccagcagaggcctcggaggtggcgggtgggacccaacctgcggctggagcccaggagccaggggagacggcggcaagtgaagcagcctccagctctcttcctgctgtcgtggtggagaccttcccagcaactgtgaatggcaccgtggagggcggcagtggggccgggcgcttggacctgcccccaggtttcatgttcaaggtacaggcccagcacgactacacggccactgacacagacgagctgcagctcaaggctggtgatgtggtgctggtgatccccttccagaaccctgaagagcaggatgaaggctggctcatgggcgtgaaggagagcgactggaaccagcacaaggagctggagaagtgccgtggcgtcttccccgagaacttcactgagagggtcccatgacggcggggcccaggcagcctccgggcgtgtgaagaacacctcctcccgaaaaatgtgtggttcttttttttgttttgttttcgtttttcatcttttgaagagcaaagggaaatcaagaggagacccccaggcagaggggcgttctcccaaagattaggtcgttttccaaagagccgcgtcccggcaagtccggcggaattcaccagtgttcctgaagctgctgtgtcctctagttgagtttctggcgcccctgcctgtgcccgcatgtgtgcctggccgcagggcggggctgggggctgccgagccaccatgcttgcctgaagcttcggccgcgccacccgggcaagggtcctcttttcctggcagctgctgtgggtggggcccagacaccagcctagcctggctctgccccgcagacggtctgtgtgctgtttgaaaataaatcttagtgttcaaaacaaaatgaaacaaaaaaaaaatgataaaaactctcagaaaaa

SEQ ID NO: 333510 - DNA, 965 bp, Homo sapiens
gctcttgttcccttttgcaggcgcgttgtcaccctccccaagtccccatctcagccagcagaggcctcggaggtggcgggtgggacccaacctgcggctggagcccaggagccaggggagacggcggcaagtgaagcagcctccagctctcttcctgctgtcgtggtggagaccttcccagcaactgtgaatggcaccgtggagggcggcagtggggccgggcgcttggacctgcccccaggtttcatgttcaaggtacaggcccagcacgactacacggccactgacacagacgagctgcagctcaaggctggtgatgtggtgctggtgatccccttccagaaccctgaagagcaggatgaaggctggctcatgggcgtgaaggagagcgactggaaccagcacaaggagctggagaagtgccgtggcgtcttccccgagaacttcactgagagggtcccatgacggcggggcccaggcagcctccgggcgtgtgaagaacacctcctcccgaaaaatgtgtggttcttttttttgttttgttttcgtttttcatcttttgaagagcaaagggaaatcaagaggagacccccaggcagaggggcgttctcccaaagattaggtcgttttccaaagagccgcgtcccggcaagtccggcggaattcaccagtgttcctgaagctgctgtgtcctctagttgagtttctggcgcccctgcctgtgcccgcatgtgtgcctggccgcagggcggggctgggggctgccgagccaccatgcttgcctgaagcttcggccgcgccacccgggcaagggtcctcttttcctggcagctgctgtgggtggggcccagacaccagcctagcctggctctgccccgcagacggtctgtgtgctgtttgaaaataaatcttagtgttcaaaacaaaatgaaacaaaaaaaaaatgataaaaactctcagaaaaa

SEQ ID NO: 333511 - DNA, 1531 bp, Homo sapiens
ggcggtgcagctggagcgtcaggggagtcccgctcgccgcagccccagcgccgcgcgcgcccctccctcctcgcggacctggcggtgccggcgcccggagtggccctttaaaaggcagcttattgtccggagggggcgggcggggggcgccgaccgcggcctgaggcccggcccctcccctctccctccctctgtccccgcgtcgctcgctggctagctcgctggctcgctcgcccgtccggcgcacgctccgcctccgtcagttggctccgctgtcgggtgcgcggcgtggagcggcagccggtctggacgcgcggccggggctgggggctgggagcgcggcgcgcaagatctccccgcgcgagagcggcccctgccaccgggcgaggcctgcgccgcgatggcagagatgggcagtaaaggggtgacggcgggaaagatcgccagcaacgtgcagaagaagctcacccgcgcgcaggagaaggttctccagaagctggggaaggcagatgagaccaaggatgagcagtttgagcagtgcgtccagaatttcaacaagcagctgacggagggcacccggctgcagaaggatctccggacctacctggcctccgtcaaagccatgcacgaggcttccaagaagctgaatgagtgtctgcaggaggtgtatgagcccgattggcccggcagggatgaggcaaacaagatcgcagagaacaacgacctgctgtggatggattaccaccagaagctggtggaccaggcgctgctgaccatggacacgtacctgggccagttccccgacatcaagtcacgcattgccaagcgggggcgcaagctggtggactacgacagtgcccggcaccactacgagtcccttcaaactgccaaaaagaaggatgaagccaaaattgccaaggccgaggaggagctcatcaaagcccagaaggtgtttgaggagatgaatgtggatctgcaggaggagctgccgtccctgtggaacagccgcgtaggtttctacgtcaacacgttccagagcatcgcgggcctggaggaaaacttccacaaggagatgagcaagctcaaccagaacctcaatgatgtgctggtcggcctggagaagcaacacgggagcaacaccttcacggtcaaggcccagcccagtgacaacgcgcctgcaaaagggaacaagagcccttcgcctccagatggctcccctgccgccacccccgagatcagagtcaaccacgagccagagccggccggcggggccacgcccggggccaccctccccaagtccccatctcagctccggaaaggcccaccagtccctccgcctcccaaacacaccccgtccaagccgcgccacccgggcaagggtcctcttttcctggcagctgctgtgggtggggcccagacaccagcctagcctggctctgccccgcagacggtctgtgtgctgtttgaaaataaatcttagtgttcaaaacaaaatgaaacaaaaaaaaaatgataaaaactctcagaaaaa

SEQ ID NO: 333512 - DNA, 982 bp, Homo sapiens
ggcggtgcagctggagcgtcaggggagtcccgctcgccgcagccccagcgccgcgcgcgcccctccctcctcgcggacctggcggtgccggcgcccggagtggccctttaaaaggcagcttattgtccggagggggcgggcggggggcgccgaccgcggcctgaggcccggcccctcccctctccctccctctgtccccgcgtcgctcgctggctagctcgctggctcgctcgcccgtccggcgcacgctccgcctccgtcagttggctccgctgtcgggtgcgcggcgtggagcggcagccggtctggacgcgcggccggggctgggggctgggagcgcggcgcgcaagatctccccgcgcgagagcggcccctgccaccgggcgaggcctgcgccgcgatggcagagatgggcagtaaaggggtgacggcgggaaagatcgccagcaacgtgcagaagaagctcacccgcgcgcaggagaaggttctccagaagctggggaaggcagatgagaccaaggatgagcagtttgagcagtgcgtccagaatttcaacaagcagctgacggagggcacccggctgcagaaggatctccggacctacctggcctccgtcaaagccatgcacgaggcttccaagaagctgaatgagtgtctgcaggaggtgtatgagcccgattggcccggcagggatgaggcaaacaagatcgcagagaacaacgacctgctgtggatggattaccaccagaagctggtggaccaggcgctgctgaccatggacacgtacctgggccagttccccgacatcaagccgcgccacccgggcaagggtcctcttttcctggcagctgctgtgggtggggcccagacaccagcctagcctggctctgccccgcagacggtctgtgtgctgtttgaaaataaatcttagtgttcaaaacaaaatgaaacaaaaaaaaaatgataaaaactctcagaaaaa

SEQ ID NO: 333513 - DNA, 246 bp, Homo sapiens
cgccctcactgctgcgctcagtcaattccatgggacctctgggaggtaagctgcacgtctgctctttgtccagcccctgggggagccactcttccgtatgtgtccaggcccacatgctcctagcctgttcacaggtgcatgcaccccacacaccccccacacgcaggacacacaggcacgtgctcacgcacagggagctggtgaagccacccgcctccagccattctgctgcttctccctctggca

SEQ ID NO: 333514 - DNA, 424 bp, Homo sapiens
gcacaattaccatttgcatgagtcctcccaaatttgctgacgctgggtatcagcaaagggtgcaggggtaggtcagtgtagaaggtcatgtagttcatgcttttggtttggaattatgacccctatccaagcaactgttcatgttctagagaggacgaggaggaaacgattgggtcagatatgaaatacagtccatgttctggtgtgcatgtgaaaggctttgtagaggtggcccttcctgtcatatatcatatctgagtatgtcccacgtggtgtcccctgccccggctctggtcttggggtagtttttcaccactggcttctaattctcatactgttgctgctctaaggggcttaacttgcagcaactatctggattaatgattctcaaatggggggaccaagtgataagaaccattattgt

SEQ ID NO: 333515 - DNA, 2386 bp, Homo sapiens
gagcccgagggggcggggaggcgcgggcgggtgtgcgcgcgccgggcgtgggtgtgggtgggggtaaccggcgcgggcgccgagatagcgccgggcagagggacccggctaccctggacagcgcatcgccgcccgcccgggtcgccgcgccacagccgctgcggatcatggaacatctaaaggcctttgatgatgaaatcaatgcttttttggacaatatgtttggaccgcgagattctcgagtcagagggtggttcatgttggactcttaccttcctaccttttttcttactgtcatgtatctgctctcaatatggctgggtaacaagtatatgaagaacagacctgctctttctctcaggggtatcctcaccttgtataatcttggaatcacacttctctccgcgtacatgctggcagagctcattctctccacttgggaaggaggctacaacttacagtgtcaagatcttaccagcgcaggggaagctgacatccgggtagccaaggtgctttggtggtactatttctccaaatcagtagagttcctggacacaattttcttcgttttgcggaaaaaaacgagtcagattacttttcttcatgtatatcatcatgcttctatgtttaacatctggtggtgtgtcttgaactggataccttgtggacaaagtttctttggaccaacactgaacagttttatccacattcttatgtactcctactatggactttctgtgtttccatctatgcacaagtatctttggtggaagaaatatctcacacaggctcagctggtgcagttcgtgctcaccatcacgcacaccatgagcgccgtcgtgaaaccgtgtggcttccccttcggttgtctcatcttccagtcatcttatatgctaacgttagtcatcctcttcttaaatttttatgttcagacataccgaaaaaagccaatgaagaaagatatgcaagagccacctgcagggaaagaagtgaagaatggtttttccaaagcctacttcactgcagcaaatggagtgatgaacaagaaagcacaataaaaatgagtaacagaaaaagcacatatactagcctaacagattggcttgttttaaagcaaagactgaattgaaggttacatgttttaggataaactaatttcttttgagttcataaatcatttgtacccagaatgtattaatatattgctattaggttaatctgttaactgaatgctttgatcagcattgaggtgatgctcacctccgaggacctcagaactggtgcagcttctctctccctccctcccacagactgaacctttcgccagaagctgtccttataacgccttatacgcatacacagccaggaaacgtggagcattgtttctcacagagagtctccaaataaaaagggttttgttcagattaaaatgtttacaacaaaatgttaattatattctaaatacagggtatgttctaatctatattaagcaataatgccagtgcataatcattccatttgttcctttagcaatcaaccccagaaaatattaaaatgggatcatacacagaagatagaaaaatctagcaaaacttctctttctgtaagccagagtcttgtctatcagattcccacaaccactcctgattctaaatttagtgatatggtaatgaaattggtatttattttaaatattagttattctaaggagaaaaaaatgcttctgcaagattttcataattcaggggctgtggataggattgttcctctgtttccctaatcattcatctgttcatgtctccctcttgtgccagtcagcctaggttatacagatgccatgctccacaccacgagcagtgtacaaatctggctgcccgtttactttctgagcaagcactggagtccactccgacctttttctttgaacatgcatgctgctggaatatgtataaatcagaactagcagaagtagcagagtgatgggagcaaaataggcactgaattcgtcaactcttttttgtgagcctacttgtgaatattacctcagatacctgttgtcactcttcacaggttatttaagtttttgaagctgggaggaaaaagatggagtagcttggaaagattccagcactgagccgtgggccggtcatgagccacgataaaaaatgccagtttggcaaactcagcactcctgttccctgctcaggtatatgcgatctctactgagaagcaagcacaaaagtagacaaaagtattaatgagtatttcctttctccataagtgcaggactgttactcactactaaactctaccaagaatggaaacaaagaatattttctgaagatttttttgaagattaatttataccctataaaataaaacttgt

SEQ ID NO: 333516 - DNA, 2744 bp, Homo sapiens
gagcccgagggggcggggaggcgcgggcgggtgtgcgcgcgccgggcgtgggtgtgggtgggggtaaccggcgcgggcgccgagatagcgccgggcagagggacccggctaccctggacagcgcatcgccgcccgcccgggtcgccgcgccacagccgctgcggatcatggaacatctaaaggcctttgatgatgaaatcaatgcttttttggacaatatgtttggaccgcgagattctcgagtcagagggtggttcatgttggactcttaccttcctaccttttttcttactgtcatgtatctgctctcaatatggctgggtaacaagtatatgaagaacagacctgctctttctctcaggggtatcctcaccttgtataatcttggaatcacacttctctccgcgtacatgctggcagagctcattctctccacttgggaaggaggctacaacttacagtgtcaagatcttaccagcgcaggggaagctgacatccgggtagccaaggtgctttggtggtactatttctccaaatcagtagagttcctggacacaattttcttcgttttgcggaaaaaaacgagtcagattacttttcttcatgtatatcatcatgcttctatgtttaacatctggtggtgtgtcttgaactggataccttgtggacaaagtttctttggaccaacactgaacagttttatccacattcttatgtactcctactatggactttctgtgtttccatctatgcacaagtatctttggtggaagaaatatctcacacaggctcagctggtgcagttcgtgctcaccatcacgcacaccatgagcgccgtcgtgaaaccgtgtggcttccccttcggttgtctcatcttccagtcatcttatatgctaacgttagtcatcctcttcttaaatttttatgttcagacataccgaaaaaagccaatgaagaaagatatgcaagagccacctgcagggaaagaagtgaagaatggtttttccaaagcctacttcactgcagcaaatggagtgatgaacaagaaagcacaataaaaatgagtaacagaaaaagcacatatactagcctaacagattggcttgttttaaagcaaagactgaattgaaggttacatgttttaggataaactaatttcttttgagttcataaatcatttgtacccagaatgtattaatatattgctattaggttaatctgttaactgaatgctttgatcagcattgaggtgatgctcacctccgaggacctcagaactggtgcagcttctctctccctccctcccacagactgaacctttcgccagaagctgtccttataacgccttatacgcatacacagccaggaaacgtggagcattgtttctcacagagagtctccaaataaaaagggttttgttcagattaaaatgtttacaacaaaatgttaattatattctaaatacagggtatgttctaatctatattaagcaataatgccagtgcataatcattccatttgttcctttagcaatcaaccccagaaaatattaaaatgggatcatacacagaagatagaaaaatctagcaaaacttctctttctgtaagccagagtcttgtctatcagattcccacaaccactcctgattctaaatttagtgatatggtaatgaaattggtatttattttaaatattagttattctaaggagaaaaaaatgcttctgcaagattttcataattcaggggctgtggataggattgttcctctgtttccctaatcattcatctgttcatgtctccctcttgtgccagtcagcctaggttatacagatgccatgctccacaccacgagcagtgtacaaatctggctgcccgtttactttctgagcaagcactggagtccactccgacctttttctttgaacatgcatgctgctggaatatgtataaatcagaactagcagaagtagcagagtgatgggagcaaaataggcactgaattcgtcaactcttttttgtgagcctacttgtgaatattacctcagatacctgttgtcactcttcacaggttatttaagtttttgaagctgggaggaaaaagatggagtagcttggaaagattccagcactgagccgtgggccggtcatgagccacgataaaaaatgccagtttggcaaactcagcactcctgttccctgctcaggtatatgcgatctctactgagaagcaagcacaaaagtagacaaaagtattaatgagtatttcctttctccataagtgcaggactgttactcactactaaactctaccaagaatggaaacaaagaatattttctgaagatttttttgaagattaatttataccctataaaataaaacttgttagcttcgatgaagtcacttcatcttctctcctaccttatttttttaaataagtttttaggtcctgacactgacatcaaatacatgcacaccagaaaggcatttccaccaccgtccccactcattagcgtccagagtgcctttctctctcggctttttttcccccctgagctctagttttaaactttctcctgttaaaaaaattgtacttttatttcatgtaaactgcccctctgaggatttgggcatattttttggaaggtgcctaatgcttaggatagtctctagggtgatgcactgcacctgcttccttcccttcagtgcggccgacccatttctgttgaacagatgtctcctgt

SEQ ID NO: 333517 - DNA, 227 bp, Homo sapiens
tgctatttatcggctcttccagaaccttctccttcttggttatggaagttggtccccatgacgatgatgcaatgagggctttgctttaagtctgactgaatcgggggacaaagtcaaacttgaggttaacaatgccactgggttaagaaggtggtggtgccgatgaatagcgaggtgccgatggatagcgaggtgccgatgaatagcgaggtgccgatgaatagcga

SEQ ID NO: 333518 - DNA, 407 bp, Homo sapiens
ctgagggcgagcgggtagtggaagagaaaccataatgaagcagagatctttaaaacaatccaaatagaacacactagaagacaagggcaggtgtgataggcataaaagaaaagcccatcgcatgcaataaccaaaaggaaaaaaaatgaaataggggaacctgaaatatttcaccatcatgggccaaactgaaacactgtggggaagcactgaagacagacattttagaaaagtttagagagaatgtgttctcaaaaggggaagaataacatcaaattatagcctatgtcggggctgggggagttagtaatagaggataggcagcaccaaaatctcaaaggagattttacaggtgggataggatttttttgtttcgttttgaaatgaagatgccaaaacatgcagat

SEQ ID NO: 333519 - DNA, 475 bp, Homo sapiens
gccatgccatttgaggatgcaaaaggagggcggtattcaggagagtgtgtcagagcccaccagatacattggagtttatccacctaaactactaattactacatgggcatgaatgctggcatattgagaagtacctattcttacatgagctcccctggcatatttatagaaccaataggagcagtcttctaaatgtacttcacccagagaagaaagtcaaagatcatgcatttttattcctaacccattaaataactctaatgctgaagatggtattaagtgtctaaatatctaaagaaaatataaataccttttatagccatttggttttctaataggcaatagtatatttcaagctcagaaatctaagaataagcctttggtcttaactgtattcaactttttaccttgagatttcaatatatgtaaaaaaaataaaatactgatctggaataaaatccaaaaaggtatattt

SEQ ID NO: 333520 - DNA, 747 bp, Homo sapiens
tctgtaaaatcggatggaccgccaatcggagaatgagagctgcccagcctggtcttacattctttcaattaattcataaacagggggatatgcagggagccgaaggcccatgggacgtgaccaactcagcattccactggaggctatatgatcaaacagcaaactgtttatcatgaatacaggatgtgagcaaactcacgactgtgcctgccgccagaaggtttgctgagggcaatcgcttcctgacgccaagctctttgaagttatctactggaacatctagagaatgcagtcttgcaagcctactctggaccaaccaactgacctcttcttccaccccccttctcactatcgcttttctctaataaatacagagggccgtgtaaagctcagggccttgtccactagaggcaaggtgcccccggaccccttcttccaaatatactcttttgtctcttgtcttttattcctgcattcacccccctttgttcagtccaccagggatcatggcaggttacatagtggcgccccgaacagccacagaatcgggtgctcgatagatcctcatatataactataatttgagccccaatgtaaagtccataaatttttgtcaatttgagcatttttgctgttgttgaagttaagttagtacctatgttgtaaaggcacaaaaccaaatcagtgcctttttatccttttgttacataatttttttggtataaaaattaatatatgaattttgaa

SEQ ID NO: 333521 - DNA, 134 bp, Homo sapiens
tgtccaagtcagacaactgaagatgtagcgtgtaaatttcaacagcacagtttgcaaaaagtgcatgtgtccttcatgcctacctcttaggtaggacgcaattcttccttctgagatttgtattccttagttct

SEQ ID NO: 333522 - DNA, 434 bp, Homo sapiens
acacaggccgttaggttcttcctgaaggttataaagccccacagcattcataatgtgctttttggaccccacaagagccccctccatgcagatggcaccagtgcagctgacaggctcagtcccctgacaccccctccacaccgcagctctggagccagcagatgctgctttgagaacggccacatctgttcctgtccctgtgtggccaccttgatttctacatgacttttttatttttggccaatgaagtatgcatcaatccatactcaggtgttttgtgaacagggctggggacctcttggtgccatgcttagtgcccccctgccccccgccacagaacaagacttttcctagttgagcaccttctgtctcttcaagggcttccatcgtgcttcatacatctacccgcttactccttcaaaaaatatttaata

SEQ ID NO: 333523 - DNA, 1608 bp, Homo sapiens
ggtagtttgagtcatttccacatcttgcgagtccttccgaacgagtctcctttccttggggctcgcaaccacccaatgatcgattcaggagaaaagaagcctgggcggagagcagagcccgacctttctaaaagagctgcaggaagggacttcttggctactgatggcaaagctctacgaggcagtgaccttcaaggatgtggctgtgatcttcactgaggaggagctggggctgctggaccctgcccagaggaagctgtaccgagatgtgatgcttgagaacttcaggaacctgctctcagtgggaggcaagatccaaactgagatggagacttttccagaagcaggaacacatgaagaattttcctgcaagcaaatttgggaacaaattgcaagtgacttaaccaggtctcaagataccaccataagtaactctcagttatttgaacaagatgacaacccctcccagattaaagcaagactatctacagttcacacaagagaaaaacctttccagggtgaaaattgtaaacagttcttcagtgatgtttccttctttgatcttcctcagcagttatattcaggagagaagtctcatacctgtgatgagtgtggaaaaagcttctgttacatctcagcccttcatattcatcagagggtccacatgggagtgaaatgctataagtgtgatgtgtgtggtaaggaatttagtcagagctcacgtctgcaaactcatcaaagagtccacactggagagaaaccattcaaatgtgagcagtgtgggaaaggcttcagatgtagatcagcacttaaagttcattgcaaattacacatgagagagaaaccttataattgtgagaaatgtgggaaggctttcatgcacaatttccagcttcagaaacatcacagaattcatactggggagaagccattcaaatgtgaaatatgtggtaagagcttctgtcttaggtcaagtcttaataggcattgcatggtccacacagcagagaaactgtacaaatctgaaaagtatggaagaggtttcattgataggctagatttgcataagcatcagatgattcatatgggacagaaaccatataattgtaaagaatgtgggaagagcttcaaatggtcctcatatcttttggtccatcaacgagtccacactggagaaaagccatacaaatgtgaggagtgtgggaagggctacattagtaagtcaggtcttgacttccaccatagaacccacacgggagagagatcttataactgtgataactgcgggaagagctttagacatgcttctagtattttgaatcataagaaactccactgccaaagaaagccattgaaatgtgaagactgtggaaagaggcttgtatgccggtcatactgtaaagaccaacaaagagaccacagtggagaaaacccatccaaatgtgaggactgtgggaagcgctacaagaggcgcttgaatctggatataattttatcattatttttaaatgacatataagttatacatatttatggagtgtgaaatttgatacatgtatataatgtgtgctgattaaatcagtttaatttcacctgaaaaaaaaaatg

SEQ ID NO: 333524 - DNA, 1701 bp, Homo sapiens
ggtagtttgagtcatttccacatcttgcgagtccttccgaacgagtctcctttccttggggctcgcaaccacccaatgatcgattcaggagaaaagaagcctgggcggagagcagagcccgacctttctaaaagagctgcaggaagggacttcttggctactgatggcaaagctctacgaggcagtgaccttcaaggatgtggctgtgatcttcactgaggaggagctggggctgctggaccctgcccagaggaagctgtaccgagatgtgatgcttgagaacttcaggaacctgctctcagtggggcatcaaccattccatggagatactttccacttcctaagggaagaaaagttttgggtgatggggacaacaagccaaagagaagggaatttgggaggcaagatccaaactgagatggagacttttccagaagcaggaacacatgaagaattttcctgcaagcaaatttgggaacaaattgcaagtgacttaaccaggtctcaagataccaccataagtaactctcagttatttgaacaagatgacaacccctcccagattaaagcaagactatctacagttcacacaagagaaaaacctttccagggtgaaaattgtaaacagttcttcagtgatgtttccttctttgatcttcctcagcagttatattcaggagagaagtctcatacctgtgatgagtgtggaaaaagcttctgttacatctcagcccttcatattcatcagagggtccacatgggagtgaaatgctataagtgtgatgtgtgtggtaaggaatttagtcagagctcacgtctgcaaactcatcaaagagtccacactggagagaaaccattcaaatgtgagcagtgtgggaaaggcttcagatgtagatcagcacttaaagttcattgcaaattacacatgagagagaaaccttataattgtgagaaatgtgggaaggctttcatgcacaatttccagcttcagaaacatcacagaattcatactggggagaagccattcaaatgtgaaatatgtggtaagagcttctgtcttaggtcaagtcttaataggcattgcatggtccacacagcagagaaactgtacaaatctgaaaagtatggaagaggtttcattgataggctagatttgcataagcatcagatgattcatatgggacagaaaccatataattgtaaagaatgtgggaagagcttcaaatggtcctcatatcttttggtccatcaacgagtccacactggagaaaagccatacaaatgtgaggagtgtgggaagggctacattagtaagtcaggtcttgacttccaccatagaacccacacgggagagagatcttataactgtgataactgcgggaagagctttagacatgcttctagtattttgaatcataagaaactccactgccaaagaaagccattgaaatgtgaagactgtggaaagaggcttgtatgccggtcatactgtaaagaccaacaaagagaccacagtggagaaaacccatccaaatgtgaggactgtgggaagcgctacaagaggcgcttgaatctggatataattttatcattatttttaaatgacatataagttatacatatttatggagtgtgaaatttgatacatgtatataatgtgtgctgattaaatcagtttaatttcacctgaaaaaaaaaatg

SEQ ID NO: 333525 - DNA, 1640 bp, Homo sapiens
ggtagtttgagtcatttccacatcttgcgagtccttccgaacgagtctcctttccttggggctcgcaaccacccaatgatcgattcaggagaaaagaagcctgggcggagagcagaggaggcagtgaccttcaaggatgtggctgtgatcttcactgaggaggagctggggctgctggaccctgcccagaggaagctgtaccgagatgtgatgcttgagaacttcaggaacctgctctcagtggggcatcaaccattccatggagatactttccacttcctaagggaagaaaagttttgggtgatggggacaacaagccaaagagaagggaatttgggaggcaagatccaaactgagatggagacttttccagaagcaggaacacatgaagaattttcctgcaagcaaatttgggaacaaattgcaagtgacttaaccaggtctcaagataccaccataagtaactctcagttatttgaacaagatgacaacccctcccagattaaagcaagactatctacagttcacacaagagaaaaacctttccagggtgaaaattgtaaacagttcttcagtgatgtttccttctttgatcttcctcagcagttatattcaggagagaagtctcatacctgtgatgagtgtggaaaaagcttctgttacatctcagcccttcatattcatcagagggtccacatgggagtgaaatgctataagtgtgatgtgtgtggtaaggaatttagtcagagctcacgtctgcaaactcatcaaagagtccacactggagagaaaccattcaaatgtgagcagtgtgggaaaggcttcagatgtagatcagcacttaaagttcattgcaaattacacatgagagagaaaccttataattgtgagaaatgtgggaaggctttcatgcacaatttccagcttcagaaacatcacagaattcatactggggagaagccattcaaatgtgaaatatgtggtaagagcttctgtcttaggtcaagtcttaataggcattgcatggtccacacagcagagaaactgtacaaatctgaaaagtatggaagaggtttcattgataggctagatttgcataagcatcagatgattcatatgggacagaaaccatataattgtaaagaatgtgggaagagcttcaaatggtcctcatatcttttggtccatcaacgagtccacactggagaaaagccatacaaatgtgaggagtgtgggaagggctacattagtaagtcaggtcttgacttccaccatagaacccacacgggagagagatcttataactgtgataactgcgggaagagctttagacatgcttctagtattttgaatcataagaaactccactgccaaagaaagccattgaaatgtgaagactgtggaaagaggcttgtatgccggtcatactgtaaagaccaacaaagagaccacagtggagaaaacccatccaaatgtgaggactgtgggaagcgctacaagaggcgcttgaatctggatataattttatcattatttttaaatgacatataagttatacatatttatggagtgtgaaatttgatacatgtatataatgtgtgctgattaaatcagtttaatttcacctgaaaaaaaaaatg

SEQ ID NO: 333526 - DNA, 114 bp, Homo sapiens
agaggaattgcgatggtttaaaataaatcttctgcaaaaaagtacttaaaatttgccttgaatataggtaaaagtaaaaatgaaggtaaaggcaaacaagacaagtcaaaagaa

SEQ ID NO: 333527 - DNA, 567 bp, Homo sapiens
aggggacaaagaagcagagaaggatgatcagaaggggacccccagcccttggaggagagacggcagcctcaggccgccacaaaggattttgtggagtcgccccaggcctgacggcgttaattatccctggctttcatcttgatgctcttgcaggggaggctcaagatgccttgtggctcgacccctgcacggagcccccagcccagcctccccgtgggttgaaaccttgatctgggcctgactgtggctgctctggggacatgccctcgtcctttgctgaagctgaggctccagagggggagtcactgccacgaaggttgcccagaactttccttgctgcaaaaagccccaagacttctccctgccacacacacagcttttgccatcgcgttctaaaagctgacagctttctctccaacactgttctccctgagtagggtaaagctacacttggcttccccagtttcctgtttcctgcctagaaacaaatttttgtcagtctgcttttcaaatgggatatatgattcacataccataaaattcaccactttatataaaaaaaaagtt

SEQ ID NO: 333528 - DNA, 2878 bp, Homo sapiens
tttgccaatttgacttctgtaggggccatggcacctgcaaggtgtttctcagcaagattgaggaccgtgtttcagggcgtggggcattgggctttgtccacatgggctggcctgaagcccagccggctactgccacagcgggcttctcccaggctgctctcggtcggccgtgcggacctcgccaagcatcaggaactcccggggaagaagctgctctctgagaaaaagctgaaaaggtactttgtggactatcggagagtgcttgtctgtggaggaaacggaggcgctggggcaagctgcttccacagtgagccccgcaaggagtttggaggccctgatggaggggacggaggcaacggtggacacgtcattctgagagttgaccagcaagtcaagtccctgtcgtcggtcctgtcgcggtaccagggtttcagtggagaagatggagggagtaaaaactgcttcgggcgcagtggcgccgtcctctacatccgggtccccgtgggcacgctggtgaaggagggaggcagagttgtggccgacctgtcttgcgtgggagatgagtacattgccgcgctgggcggggcaggagggaaaggcaaccgcttcttcctggccaacaacaaccgtgcccctgtgacctgtacccctggacagccaggacagcagcgagttctccacctggagctcaagacggtggcccacgccggaatggtgggattccccaacgccgggaagtcctcactgctccgggccatttcaaacgccagacccgccgtggcttcctacccgttcaccaccctgaagccccacgtcgggatcgtccactacgaaggccacctacaaatagcagtggccgacatccccggcatcatacgaggcgcccaccagaacaggggtctggggtccgccttcctcaggcacatcgagcgctgccgctttctcttgttcgtggtggatctttctcagcctgagccgtggactcaagttgacgatttaaaatatgaactggagatgtatgaaaagggcctgtctgcgaggccccacgcaatcgtcgcaaacaagattgacctccctgaagcccaagccaatctgtcccagctccgggatcacttgggacaggaggtcatcgtgctgtcggcgttgaccggcgagaacctggagcagctgctgttgcacctgaaggtgctgtatgacgcctacgcggaggccgagctgggccagggccgccagccgctcaggtggtagccacgccagagcggggtcgcctctgggcctctgtctgagcaaacctggatgtgaattcggtggttttgaatgcataaagtgccttgtggacacgggggagttgtggtgcttctgggtctctgggccccgcctgctggcctgggatgccctcatgttgggaagcattccgtgccccccaccccgcctgccctccctgattaacacccctaataaggggttggggtgcccataacggggtggccctgccgctgactcgggtctccgccatgcacgcgtggactctcggatgagctcagcagaaccgcacagccagagccccaggtcagaagtgcagaccagggttctcagcacagtgcccgtcgtgcttccatggcttgctacggagagagacctctggatccacactggggctgcgtctggcccgttgtccagcagccctgcggtaccgcaagcccaggcaccagtgtctcggggggcctcactgctgcgcaaggggtggggccgaggatgcaagtccaggcagagcggcgcaggcagctgtgagcttttctccatcagccgtctgagaagagcagtgaggccagctgcttcctgtccttcagaacacttctctgtgctcagtgggagccaggaagcctcaggcttcacgactgaatgcacccaatatccgacctggctgcgtgtttctggctgggctgccgtgtgcacagcaagttaactagaggggctgtgggccatggaactgtcagcgttattctcagaaggcggccgtggcatgggcagggtatagtgaggagtggaaggagacgtgtgcctggtaatatggggcggaatttccactcagctccatttgctggggatttaaagagaacccttgtgctgcgccaggcagttaccgagccgaagggagatgatgggccttcgcccctcagtgggatggcagctgagggggccctgcatttgaccctcgagactgcagcagcgcctttcctgtctgtggtttaagtctttgcagtcaagtactgatgcatccaagccaggcctatgcctggtgtctccctgactgcagaggagccccagggcaaggacagctcagctgctggcagcctgcctggcccatagacatcccccaagtagtctcaggcctctgacatgtccctgaggggcccctaagaaagaaagtggaggggacactccagaggctgtcgtgggaggatcatgtgagcctgggaggtcaaggctgcagtgagccgtgattgcaccactgcactccagcctgagtgacagagcgagaccctgtctcaaaaaacaaacaaacaaacaaacaaaaacagaacattctgggcacggtggctcatgcctgtagtcccagcactttgggaggccgaggctggtggatcacaaggtcaggagattgagaccatcctggctaacacagtgaaaccccgtctctactaaaaatacaaaaaaattagccaggcgtggtggcggtcacctgtagtcccagctactcgggaggctgaagcaggagaatggcgtgaacctgggaggcggagcttgcagtgagccgagatcacaccactgcactccagcctgagcgacagagcaagactccatctcaaaaaaaaaa

SEQ ID NO: 333529 - DNA, 628 bp, Homo sapiens
cgggagagatacagtgcagtgagcatatacaatatgtatattagagtataccgggggatccctgattgattaaagtatagtctatgactaatagtgagtttctaagatggccttaaaagtattattaccgtactggttcaaaaccttaaattcgcggtgaacacaggtccgtagaccttgatagttcggaaaagcaatggaaatagcatcaacatacgtcgctcaatgatccgtatactatggatgatccagattgacgctcgtcaaggggaggctcaagatgccttgtggctcgacccctgcacggagcccccagcccagcctccccgtgggttgaaaccttgatctgggcctgactgtggctgctctggggacatgccctcgtcctttgctgaagctgaggctccagagggggagtcactgccacgaaggttgcccagaagccatcgcgttctaaaagctgacagctttctctccaacactgttctccctgagtagggtaaagctacacttggcttccccagtttcctgtttcctgcctagaaacaaatttttgtcagtctgcttttcaaatgggatatatgattcacataccataaaattcaccactttatataaaaaaaaagtt

SEQ ID NO: 333530 - DNA, 2817 bp, Homo sapiens
tttgccaatttgacttctgtaggggccatggcacctgcaaggtgtttctcagcaagattgaggaccgtgtttcagggcgtggggcattgggctttgtccacatgggctggcctgaagcccagccggctactgccacagcgggcttctcccaggctgctctcggtcggccgtgcggacctcgccaagcatcaggaactcccggggaagaagctgctctctgagaaaaagctgaaaaggtactttgtggactatcggagagtgcttgtctgtggaggaaacggaggcgctggggcaagctgcttccacagtgagccccgcaaggagtttggaggccctgatggaggggacggaggcaacggtggacacgtcattctgagaggtccccgtgggcacgctggtgaaggagggaggcagagttgtggccgacctgtcttgcgtgggagatgagtacattgccgcgctgggcggggcaggagggaaaggcaaccgcttcttcctggccaacaacaaccgtgcccctgtgacctgtacccctggacagccaggacagcagcgagttctccacctggagctcaagacggtggcccacgccggaatggtgggattccccaacgccgggaagtcctcactgctccgggccatttcaaacgccagacccgccgtggcttcctacccgttcaccaccctgaagccccacgtcgggatcgtccactacgaaggccacctacaaatagcagtggccgacatccccggcatcatacgaggcgcccaccagaacaggggtctggggtccgccttcctcaggcacatcgagcgctgccgctttctcttgttcgtggtggatctttctcagcctgagccgtggactcaagttgacgatttaaaatatgaactggagatgtatgaaaagggcctgtctgcgaggccccacgcaatcgtcgcaaacaagattgacctccctgaagcccaagccaatctgtcccagctccgggatcacttgggacaggaggtcatcgtgctgtcggcgttgaccggcgagaacctggagcagctgctgttgcacctgaaggtgctgtatgacgcctacgcggaggccgagctgggccagggccgccagccgctcaggtggtagccacgccagagcggggtcgcctctgggcctctgtctgagcaaacctggatgtgaattcggtggttttgaatgcataaagtgccttgtggacacgggggagttgtggtgcttctgggtctctgggccccgcctgctggcctgggatgccctcatgttgggaagcattccgtgccccccaccccgcctgccctccgtatttcctgcacctgtcagcctgcgccgactgatgagccagttgctcatttgtgctgattaacacccctaataaggggttggggtgcccataacggggtggccctgccgctgactcgggtctccgccatgcacgcgtggactctcggatgagctcagcagaaccgcacagccagagccccaggtcagaagtgcagaccagggttctcagcacagtgcccgtcgtgcttccatggcttgctacggagagagacctctggatccacactggggctgcgtctggcccgttgtccagcagccctgcggtaccgcaagcccaggcaccagtgtctcggggggcctcactgctgcgcaaggggtggggccgaggatgcaagtccaggcagagcggcgcaggcagctgtgagcttttctccatcagccgtctgagaagagcagtgaggccagctgcttcctgtccttcagaacacttctctgtgctcagtgggagccaggaagcctcaggcttcacgactgaatgcacccaatatccgacctggctgcgtgtttctggctgggctgccgtgtgcacagcaagttaactagaggggctgtgggccatggaactgtcagcgttattctcagaaggcggccgtggcatgggcagggtatagtgaggagtggaaggagacgtgtgcctggtaatatggggcggaatttccactcagctccatttgctggggatttaaagagaacccttgtgctgcgccaggcagttaccgagccgaagggagatgatgggccttcgcccctcagtgggatggcagctgagggggccctgcatttgaccctcgagactgcagcagcgcctttcctgtctgtggtttaagtctttgcagtcaagtactgatgcatccaagccaggcctatgcctggtgtctccctgactgcagaggagccccagggcaaggacagctcagctgctggcagcctgcctggcccatagacatcccccaagtagtctcaggcctctgacatgtccctgaggggcccctaagaaagaaagtggaggggacactccagaggctgtcgtgggaggatcatgtgagcctgggaggtcaaggctgcagtgagccgtgattgcaccactgcactccagcctgagtgacagagcgagaccctgtctcaaaaaacaaacaaacaaacaaacaaaaacagaacattctgggcacggtggctcatgcctgtagtcccagcactttgggaggccgaggctggtggatcacaaggtcaggagattgagaccatcctggctaacacagtgaaaccccgtctctactaaaaatacaaaaaaattagccaggcgtggtggcggtcacctgtagtcccagctactcgggaggctgaagcaggagaatggcgtgaacctgggaggcggagcttgcagtgagccgagatcacaccactgcactccagcctgagcgacagagcaagactccatctcaaaaaaaaaa

SEQ ID NO: 333531 - DNA, 2944 bp, Homo sapiens
gagtttcctgtcagggaagctgacatgtcggtcgcgtgaaagcacgaggcctgtgtggtgggttcggtgggtgccgctggctgctggttatattcacactcagcatagacgcatagcgagctgggagtgaagccttcacaacaaaagcatagaatacagctactgtaaaaaataagaaatttaaaaattttcagaaatgatagcactttttgaaggaaaataaggatttcatttttaaaaaatcactttgctggttttgtaacttctgctgcaccctcactccatgcttccatacctatttttaaggttcttaaactggacccagacacatcagcaataggccatggttgtcgtaacacaaagggactgagattcttgttcttgctttagttgaccagcaagtcaagtccctgtcgtcggtcctgtcgcggtaccagggtttcagtggagaagatggagggagtaaaaactgcttcgggcgcagtggcgccgtcctctacatccgggtccccgtgggcacgctggtgaaggagggaggcagagttgtggccgacctgtcttgcgtgggagatgagtacattgccgcgctgggcggggcaggagggaaaggcaaccgcttcttcctggccaacaacaaccgtgcccctgtgacctgtacccctggacagccaggacagcagcgagttctccacctggagctcaagacggtggcccacgccggaatggtgggattccccaacgccgggaagtcctcactgctccgggccatttcaaacgccagacccgccgtggcttcctacccgttcaccaccctgaagccccacgtcgggatcgtccactacgaaggccacctacaaatagcagtggccgacatccccggcatcatacgaggcgcccaccagaacaggggtctggggtccgccttcctcaggcacatcgagcgctgccgctttctcttgttcgtggtggatctttctcagcctgagccgtggactcaagttgacgatttaaaatatgaactggagatgtatgaaaagggcctgtctgcgaggccccacgcaatcgtcgcaaacaagattgacctccctgaagcccaagccaatctgtcccagctccgggatcacttgggacaggaggtcatcgtgctgtcggcgttgaccggcgagaacctggagcagctgctgttgcacctgaaggtgctgtatgacgcctacgcggaggccgagctgggccagggccgccagccgctcaggtggtagccacgccagagcggggtcgcctctgggcctctgtctgagcaaacctggatgtgaattcggtggttttgaatgcataaagtgccttgtggacacgggggagttgtggtgcttctgggtctctgggccccgcctgctggcctgggatgccctcatgttgggaagcattccgtgccccccaccccgcctgccctccgtatttcctgcacctgtcagcctgcgccgactgatgagccagttgctcatttgtgctgattaacacccctaataaggggttggggtgcccataacggggtggccctgccgctgactcgggtctccgccatgcacgcgtggactctcggatgagctcagcagaaccgcacagccagagccccaggtcagaagtgcagaccagggttctcagcacagtgcccgtcgtgcttccatggcttgctacggagagagacctctggatccacactggggctgcgtctggcccgttgtccagcagccctgcggtaccgcaagcccaggcaccagtgtctcggggggcctcactgctgcgcaaggggtggggccgaggatgcaagtccaggcagagcggcgcaggcagctgtgagcttttctccatcagccgtctgagaagagcagtgaggccagctgcttcctgtccttcagaacacttctctgtgctcagtgggagccaggaagcctcaggcttcacgactgaatgcacccaatatccgacctggctgcgtgtttctggctgggctgccgtgtgcacagcaagttaactagaggggctgtgggccatggaactgtcagcgttattctcagaaggcggccgtggcatgggcagggtatagtgaggagtggaaggagacgtgtgcctggtaatatggggcggaatttccactcagctccatttgctggggatttaaagagaacccttgtgctgcgccaggcagttaccgagccgaagggagatgatgggccttcgcccctcagtgggatggcagctgagggggccctgcatttgaccctcgagactgcagcagcgcctttcctgtctgtggtttaagtctttgcagtcaagtactgatgcatccaagccaggcctatgcctggtgtctccctgactgcagaggagccccagggcaaggacagctcagctgctggcagcctgcctggcccatagacatcccccaagtagtctcaggcctctgacatgtccctgaggggcccctaagaaagaaagtggaggggacactccagaggctgtcgtgggaggatcatgtgagcctgggaggtcaaggctgcagtgagccgtgattgcaccactgcactccagcctgagtgacagagcgagaccctgtctcaaaaaacaaacaaacaaacaaacaaaaacagaacattctgggcacggtggctcatgcctgtagtcccagcactttgggaggccgaggctggtggatcacaaggtcaggagattgagaccatcctggctaacacagtgaaaccccgtctctactaaaaatacaaaaaaattagccaggcgtggtggcggtcacctgtagtcccagctactcgggaggctgaagcaggagaatggcgtgaacctgggaggcggagcttgcagtgagccgagatcacaccactgcactccagcctgagcgacagagcaagactccatctcaaaaaaaaaa

SEQ ID NO: 333532 - DNA, 2803 bp, Homo sapiens
tttgccaatttgacttctgtaggggccatggcacctgcaaggtgtttctcagcaagattgaggaccgtgtttcagggcgtggggcattgggctttgtccacatgggctggcctgaagcccagccggctactgccacagcgggcttctcccaggctgctctcggtcggccgtgcggacctcgccaagcatcaggaactcccggggaagaagctgctctctgagaaaaagctgaaaaggtactttgtggactatcggagagtgcttgtctgtggaggaaacggaggcgctggggcaagctgcttccacagtgagccccgcaaggagtttggaggccctgatggaggggacggaggcaacggtggacacgtcattctgagagttgaccagcaagtcaagtccctgtcgtcggtcctgtcgcggtaccagggtttcagtggagaagatggagggagtaaaaactgcttcgggcgcagtggcgccgtcctctacatccgggtccccgtgggcacgctggtgaaggagggaggcagagttgtggccgacctgtcttgcgtgggagatgagtacattgccgcgctgggcggggcaggagggaaaggcaaccgcttcttcctggccaacaacaaccgtgcccctgtgacctgtacccctggacagccaggacagcagcgagttctccacctggagctcaagacggtggcccacgccggaatggtgggattccccaacgccgggaagtcctcactgctccgggccatttcaaacgccagacccgccgtggcttcctacccgttcaccaccctgaagccccacgtcgggatcgtccactacgaaggccacctacaaatagcagtggccgacatccccggcatcatacgaggcgcccaccagaacaggggtctggggtccgccttcctcaggcacatcgagcgctgccgctttctcttgttcgtggtggatctttctcagcctgagccgtggactcaagttgacgatttaaaatatgaactggagatgtatgaaaagggcctgtctgcgaggccccacgcaatcgtcgcaaacaagattgacctccctgaagcccaagccaatctgtcccagctccgggatcacttgggacaggaggtcatcgtgctgtcggcgttgaccggcgagaacctggagcagctgctgttgcacctgaaggtgctgtatgacgcctacgcggaggccgagctgggccagggccgccagccgctcaggtggtagccacgccagagcggggtcgcctctgggcctctgtctgagcaaacctggatgtgaattcggtggttttgaatgcataaagtgccttgtggacacgggggagttgtggtgcttctgggtctctgggccccgcctgctggcctgggatgccctcatgttgggaagcattccgtgccccccaccccgcctgccctccgtatttcctgcacctgtcagcctgcgccgactgatgagccagttgctcatttgtgctgattaacacccctaataaggggttggggtgcccataacggggtggccctgccgctgactcgggtctccgccatgcacgcgtggactctcggatgagctcagcagaaccgcacagccagagccccaggtcagaagtgcagaccagggttctcagcacagtgcccgtcgtgcttccatggcttgctacggagagagacctctggatccacactggggctgcgtctggcccgttgtccagcagccctgcggtaccgcaagcccaggcaccagtgtctcggggggcctcactgctgcgcaaggggtggggccgaggatgcaagtccaggcagagcggcgcaggcagctgtgagcttttctccatcagccgtctgagaagagcagtgaggccagctgcttcctgtccttcagaacacttctctgtgctcagtgggagccaggaagcctcaggcttcacgactgaatgcacccaatatccgacctggctgcgtgtttctggctgggctgccgtgtgcacagcaagttaactagaggggctgtgggccatggaactgtcagcgttattctcagaaggcggccgtggcatgggcagggtatagtgaggagtggaaggagacgtgtgcctggtaatatggggcggaatttccactcagctccatttgctggggatttaaagagaacccttgtgctgcgccaggcagttaccgagccgaagggagatgatgggccttcgcccctcagtgggatggcagctgagggggccctgcatttgaccctcgagactgcagcagcgcctttcctgtctgtggtttaagtctttgcagtcaagtactgatgcatccaagccaggcctatgcctggtgtctccctgactgcagaggagccccagggcaaggacagctcagctgctggcagcctgcctggcccatagacatcccccaagtagtctcaggcctctgacatgtccctgaggggcccctaagaaagaaagtggaggggacactccagaggctgtcgtgggaggatcatgtgagcctgggaggtcaaggctgcagtgagccgtgattgcaccactgcactccagcctgagtgacagagcgagaccctgtctcaaaaaacaaacaaacaaacaaacaaaaacagaacattctgggcacggtggctcatgcctgtagtcccagcactttgggaggccgaggctggtggatcacacagcgttagccaccgcactcgacccaaatgacactgtcttaaatgatttaatgtcttaaatcgggaaaggagagtaagaggaagcaccccatggtca

SEQ ID NO: 333533 - DNA, 2808 bp, Homo sapiens
tttgccaatttgacttctgtaggggccatggcacctgcaaggtgtttctcagcaagattgaggaccgtgtttcagggcgtggggcattgggctttgtccacatgggctggcctgaagcccagccggctactgccacagcgggcttctcccaggctgctctcggtcggccgtgcggacctcgccaagcatcaggaactcccggggaagaagctgctctctgagaaaaagctgaaaaggtactttgtggactatcggagagtgcttgtctgtggaggaaacggaggcgctggggcaagctgcttccacagtgagccccgcaaggagtttggaggccctgatggaggggacggaggcaacggtggacacgtcattctgagagttgaccagcaagtcaagtccctgtcgtcggtcctgtcgcggtaccagggtttcagtggagaagatggagggagtaaaaactgcttcgggcgcagtggcgccgtcctctacatccgggtccccgtgggcacgctggtgaaggagggaggcagagttgtggccgacctgtcttgcgtgggagatgagtacattgccgcgctgggcggggcaggagggaaaggcaaccgcttcttcctggccaacaacaaccgtgcccctgtgacctgtacccctggacagccaggacagcagcgagttctccacctggagctcaagacggtggcccacgccggaatggtgggattccccaacgccgggaagtcctcactgctccgggccatttcaaacgccagacccgccgtggcttcctacccgttcaccaccctgaagccccacgtcgggatcgtccactacgaaggccacctacaaatagcagtggccgacatccccggcatcatacgaggcgcccaccagaacaggggtctggggtccgccttcctcaggcacatcgagcgctgccgctttctcttgttcgtggtggatctttctcagcctgagccgtggactcaagttgacgatttaaaatatgaactggagatgtatgaaaagggcctgtctgcgaggccccacgcaatcgtcgcaaacaagattgacctccctgaagcccaagccaatctgtcccagctccgggatcacttgggacaggaggtcatcgtgctgtcggcgttgaccggcgagaacctggagcagctgctgttgcacctgaaggtgctgtatgacgcctacgcggaggccgagctgggccagggccgccagccgctcaggtggtagccacgccagagcggggtcgcctctgggcctctgtctgagcaaacctggatgtgaattcggtggttttgaatgcataaagtgccttgtggacacgggggagttgtggtgcttctgggtctctgggccccgcctgctggcctgggatgccctcatgttgggaagcattccgtgccccccaccccgcctgccctccgtatttcctgcacctgtcagcctgcgccgactgatgagccagttgctcatttgtgctgattaacacccctaataaggggttggggtgcccataacggggtggccctgccgctgactcgggtctccgccatgcacgcgtggactctcggatgagctcagcagaaccgcacagccagagccccaggtcagaagtgcagaccagggttctcagcacagtgcccgtcgtgcttccatggcttgctacggagagagacctctggatccacactggggctgcgtctggcccgttgtccagcagccctgcggtaccgcaagcccaggcaccagtgtctcggggggcctcactgctgcgcaaggggtggggccgaggatgcaagtccaggcagagcggcgcaggcagctgtgagcttttctccatcagccgtctgagaagagcagtgaggccagctgcttcctgtccttcagaacacttctctgtgctcagtgggagccaggaagcctcaggcttcacgactgaatgcacccaatatccgacctggctgcgtgtttctggctgggctgccgtgtgcacagcaagttaactagaggggctgtgggccatggaactgtcagcgttattctcagaaggcggccgtggcatgggcagggtatagtgaggagtggaaggagacgtgtgcctggtaatatggggcggaatttccactcagctccatttgctggggatttaaagagaacccttgtgctgcgccaggcagttaccgagccgaagggagatgatgggccttcgcccctcagtgggatggcagctgagggggccctgcatttgaccctcgagactgcagcagcgcctttcctgtctgtggtttaagtctttgcagtcaagtactgatgcatccaagccaggcctatgcctggtgtctccctgactgcagaggagccccagggcaaggacagctcagctgctggcagcctgcctggcccatagacatcccccaagtagtctcaggcctctgatctgagcaaacctgggtgtgaattcggtggttttgaatgcataaagtgccttgtggacacgggggagttgtggtgctccagagggggagtcactgccacgaaggttgcccagaactttccttgctgcaaaaagccccaagacttctccctgccacacacacagcttttgccatcgcgttctaaaagctgacagctttctctccaacactgttctccctgagtagggtaaagctacacttggcttccccagtttcctgtttcctgcctagaaacaaatttttgtcagtctgcttttcaaatgggatatatgattcacataccataaaattcaccactttatataaaaaaaaagtt

SEQ ID NO: 333534 - DNA, 1981 bp, Homo sapiens
gctcagctgtgggggcgtgctgttccccaggtccccgtgggcacgctggtgaaggagggaggcagagttgtggccgacctgtcttgcgtgggagatgagtacattgccgcgctgggcggggcaggagggaaaggcaaccgcttcttcctggccaacaacaaccgtgcccctgtgacctgtacccctggacagccaggacagcagcgagttctccacctggagctcaagacggtggcccacgccggaatggtgggattccccaacgccgggaagtcctcactgctccgggccatttcaaacgccagagcggggtcgcctctgggcctctgtctgagcaaacctggatgtgaattcggtggttttgaatgcataaagtgccttgtggacacgggggagttgtggtgcttctgggtctctgggccccgcctgctggcctgggatgccctcatgttgggaagcattccgtgccccccaccccgcctgccctccgtatttcctgcacctgtcagcctgcgccgactgatgagccagttgctcatttgtgctgattaacacccctaataaggggttggggtgcccataacggggtggccctgccgctgactcgggtctccgccatgcacgcgtggactctcggatgagctcagcagaaccgcacagccagagccccaggtcagaagtgcagaccagggttctcagcacagtgcccgtcgtgcttccatggcttgctacggagagagacctctggatccacactggggctgcgtctggcccgttgtccagcagccctgcggtaccgcaagcccaggcaccagtgtctcggggggcctcactgctgcgcaaggggtggggccgaggatgcaagtccaggcagagcggcgcaggcagctgtgagcttttctccatcagccgtctgagaagagcagtgaggccagctgcttcctgtccttcagaacacttctctgtgctcagtgggagccaggaagcctcaggcttcacgactgaatgcacccaatatccgacctggctgcgtgtttctggctgggctgccgtgtgcacagcaagttaactagaggggctgtgggccatggaactgtcagcgttattctcagaaggcggccgtggcatgggcagggtatagtgaggagtggaaggagacgtgtgcctggtaatatggggcggaatttccactcagctccatttgctggggatttaaagagaacccttgtgctgcgccaggcagttaccgagccgaagggagatgatgggccttcgcccctcagtgggatggcagctgagggggccctgcatttgaccctcgagactgcagcagcgcctttcctgtctgtggtttaagtctttgcagtcaagtactgatgcatccaagccaggcctatgcctggtgtctccctgactgcagaggagccccagggcaaggacagctcagctgctggcagcctgcctggcccatagacatcccccaagtagtctcaggcctctgacatgtccctgaggggcccctaagaaagaaagtggaggggacactccagaggctgtcgtgggaggatcatgtgagcctgggaggtcaaggctgcagtgagccgtgattgcaccactgcactccagcctgagtgacagagcgagaccctgtctcaaaaaacaaacaaacaaacaaacaaaaacagaacattctgggcacggtggctcatgcctgtagtcccagcactttgggaggccgaggctggtggatcacaaggtcaggagattgagaccatcctggctaacacagtgaaaccccgtctctactaaaaatacaaaaaaattagccaggcgtggtggcggtcacctgtagtcccagctactcgggaggctgaagcaggagaatggcgtgaacctgggaggcggagcttgcagtgagccgagatcacaccactgcactccagcctgagcgacagagcaagactccatctcaaaaaaaaaa

SEQ ID NO: 333535 - DNA, 789 bp, Homo sapiens
tttgccaatttgacttctgtaggggccatggcacctgcaaggtgtttctcagcaagattgaggaccgtgtttcagggcgtggggcattgggctttgtccacatgggctggcctgaagcccagccggctactgccacagcgggcttctcccaggctgctctcggtcggccgtgcggacctcgccaagcatcaggaactcccggggaagaagctgctctctgagaaaaagctgaaaaggtactttgtggactatcggagagtgcttgtctgtggaggaaacggaggcgctggggcaagctgcttccacagtgagccccgcaaggagtttggaggccctgatggaggggacggaggcaacggtggacacgtcattctgagaggcaggtgccctggggcagtgcagcggggttgaggaggggccccgagactgcatgtgcatttgaactaaaaacctgatgtatgggcaggcacagtggcttatgcctgtgatcccagcacttggagaggctgaggcaggaggatcacttgagcccataagttcaagaccagcctggacaatatagcaagaccatgtcttttttgtttgtttgtttttttgtttttttttttttgcctcaaggtttgtggatctacaaaaaatttttgaaaaaattagccagacatggtagcgtgcacctgtggtcccagctactcaggaggattgctggatcccagaagttcaaggctgcagtgaatcgtgatcacaccactgcatattccagcatgggtgacagagcaataccctatctct

SEQ ID NO: 333536 - DNA, 663 bp, Homo sapiens
tttgccaatttgacttctgtaggggccatggcacctgcaaggtgtttctcagcaagattgaggaccgtgtttcagggcgtggggcattgggctttgtccacatgggctggcctgaagcccagccggctactgccacagcgggcttctcccaggctgctctcggtcggccgtgcggacctcgccaagcatcaggaactcccggggaagaagctgctctctgagaaaaagctggtgagactcctggagttagagcagcttgcctgtctcctcctcagaaggcacagggtgtggtttcgggtcctcctctgggtctcatctctgttgatgttagttgatgatcttagtgatggggcacgtggagcttcttgaaaatgacagggtgaaacgcaggcctgcgtgctaaatcccacgctcagcaaatcccagcaggctgggagaggcgctgcgtgcttggaaagccgtgatacaggctgctcattttcccatgagcctgtgtattttacatgtatgttacatatatcctttcatatgtgtggctatttcttaatttaaaacaaatgcggaggctgggcacggtggctcatgcctgttatcccaacactttgggaggctaaggcaggcggatcacttgaggtcaggagttcgagaccagcctggccaaca

SEQ ID NO: 333537 - DNA, 322 bp, Homo sapiens
acagcacgcgctaacaaaggtgctgccgcgggccgtgccaccgtcttccctctttcccccaggtgggattccccaacgccgggaagtcctcactgctccgggccatttcaaacgccagacccgccgtggcttcctacccgttcaccaccctgaagccccacgtcgggatcgtccactacgaaggccacctacaaatagcaggtagaacttccagaattctcccaaaggttagatttaaatgatgtaattcagagaagtaatgatgtaactcttaaatttagctttctgtttagaatgtagcattgttagcgcgtcgtggtgg

SEQ ID NO: 333538 - DNA, 468 bp, Homo sapiens
aggggacaaagaagcagagaaggatgatcagaaggggacccccagcccttggaggagagacggcagcctcaggccgccacaaaggattttgtggagtcgccccaggcctgacggcgttaattatccctggctttcatcttgatgctcttgcaggggaggctcaagatgccttgtggctcgacccctgcacggagcccccagcccagcctccccgtgggttgaaaccttgatctgggcctgactgtggctgctctggggacatgccctcgtcctttgctgaagctgaggctccagagggggagtcactgccacgaaggttgcccagaactttccttgctgcaaaaagccccaagacttctccctgccacacacacagcttttgccatcgcgttctaaaagctgacagctttctctctccactcccgggagtggagagagaatgggggagaataagagaggatgagttca

SEQ ID NO: 333539 - DNA, 2933 bp, Homo sapiens
tttgccaatttgacttctgtaggggccatggcacctgcaaggtgtttctcagcaagattgaggaccgtgtttcagggcgtggggcattgggctttgtccacatgggctggcctgaagcccagccggctactgccacagcgggcttctcccaggctgctctcggtcggccgtgcggacctcgccaagcatcaggaactcccggggaagaagctgctctctgagaaaaagctgaaaaggtactttgtggactatcggagagtgcttgtctgtggaggaaacggaggcgctggggcaagctgcttccacagtgagccccgcaaggagtttggaggccctgatggaggggacggaggcaacggtggacacgtcattctgagagttgaccagcaagtcaagtccctgtcgtcggtcctgtcgcggtaccagggtttcagtggagaagatggagggagtaaaaactgcttcgggcgcagtggcgccgtcctctacatccgggtccccgtgggcacgctggtgaaggagggaggcagagttgtggccgacctgtcttgcgtgggagatgagtacattgccgcgctgggcggggcaggagggaaaggcaaccgcttcttcctggccaacaacaaccgtgcccctgtgacctgtacccctggacagccaggacagcagcgagttctccacctggagctcaagacggtggcccacgccggaatggtgggattccccaacgccgggaagtcctcactgctccgggccatttcaaacgccagacccgccgtggcttcctacccgttcaccaccctgaagccccacgtcgggatcgtccactacgaaggccacctacaaatagcagtggccgacatccccggcatcatacgaggcgcccaccagaacaggggtctggggtccgccttcctcaggcacatcgagcgctgccgctttctcttgttcgtggtggatctttctcagcctgagccgtggactcaagttgacgatttaaaatatgaactggagatgtatgaaaagggcctgtctgcgaggccccacgcaatcgtcgcaaacaagattgacctccctgaagcccaagccaatctgtcccagctccgggatcacttgggacaggaggtcatcgtgctgtcggcgttgaccggcgagaacctggagcagctgctgttgcacctgaaggtgctgtatgacgcctacgcggaggccgagctgggccagggccgccagccgctcaggtggtagccacgccagagcggggtcgcctctgggcctctgtctgagcaaacctggatgtgaattcggtggttttgaatgcataaagtgccttgtggacacgggggagttgtggtgcttctgggtctctgggccccgcctgctggcctgggatgccctcatgttgggaagcattccgtgccccccaccccgcctgccctccgtatttcctgcacctgtcagcctgcgccgactgatgagccagttgctcatttgtgctgattaacacccctaataaggggttggggtgcccataacggggtggccctgccgctgactcgggtctccgccatgcacgcgtggactctcggatgagctcagcagaaccgcacagccagagccccaggtcagaagtgcagaccagggttctcagcacagtgcccgtcgtgcttccatggcttgctacggagagagacctctggatccacactggggctgcgtctggcccgttgtccagcagccctgcggtaccgcaagcccaggcaccagtgtctcggggggcctcactgctgcgcaaggggtggggccgaggatgcaagtccaggcagagcggcgcaggcagctgtgagcttttctccatcagccgtctgagaagagcagtgaggccagctgcttcctgtccttcagaacacttctctgtgctcagtgggagccaggaagcctcaggcttcacgactgaatgcacccaatatccgacctggctgcgtgtttctggctgggctgccgtgtgcacagcaagttaactagaggggctgtgggccatggaactgtcagcgttattctcagaaggcggccgtggcatgggcagggtatagtgaggagtggaaggagacgtgtgcctggtaatatggggcggaatttccactcagctccatttgctggggatttaaagagaacccttgtgctgcgccaggcagttaccgagccgaagggagatgatgggccttcgcccctcagtgggatggcagctgagggggccctgcatttgaccctcgagactgcagcagcgcctttcctgtctgtggtttaagtctttgcagtcaagtactgatgcatccaagccaggcctatgcctggtgtctccctgactgcagaggagccccagggcaaggacagctcagctgctggcagcctgcctggcccatagacatcccccaagtagtctcaggcctctgacatgtccctgaggggcccctaagaaagaaagtggaggggacactccagaggctgtcgtgggaggatcatgtgagcctgggaggtcaaggctgcagtgagccgtgattgcaccactgcactccagcctgagtgacagagcgagaccctgtctcaaaaaacaaacaaacaaacaaacaaaaacagaacattctgggcacggtggctcatgcctgtagtcccagcactttgggaggccgaggctggtggatcacaaggtcaggagattgagaccatcctggctaacacagtgaaaccccgtctctactaaaaatacaaaaaaattagccaggcgtggtggcggtcacctgtagtcccagctactcgggaggctgaagcaggagaatggcgtgaacctgggaggcggagcttgcagtgagccgagatcacaccactgcactccagcctgagcgacagagcaagactccatctcaaaaaaaaaa

SEQ ID NO: 333540 - DNA, 2468 bp, Homo sapiens
gctcagctgtgggggcgtgctgttccccaggtccccgtgggcacgctggtgaaggagggaggcagagttgtggccgacctgtcttgcgtgggagatgagtacattgccgcgctgggcggggcaggagggaaaggcaaccgcttcttcctggccaacaacaaccgtgcccctgtgacctgtacccctggacagccaggacagcagcgagttctccacctggagctcaagacggtggcccacgccggaatggtgggattccccaacgccgggaagtcctcactgctccgggccatttcaaacgccagacccgccgtggcttcctacccgttcaccaccctgaagccccacgtcgggatcgtccactacgaaggccacctacaaatagcagtggccgacatccccggcatcatacgaggcgcccaccagaacaggggtctggggtccgccttcctcaggcacatcgagcgctgccgctttctcttgttcgtggtggatctttctcagcctgagccgtggactcaagttgacgatttaaaatatgaactggagatgtatgaaaagggcctgtctgcgaggccccacgcaatcgtcgcaaacaagattgacctccctgaagcccaagccaatctgtcccagctccgggatcacttgggacaggaggtcatcgtgctgtcggcgttgaccggcgagaacctggagcagctgctgttgcacctgaaggtgctgtatgacgcctacgcggaggccgagctgggccagggccgccagccgctcaggtggtagccacgccagagcggggtcgcctctgggcctctgtctgagcaaacctggatgtgaattcggtggttttgaatgcataaagtgccttgtggacacgggggagttgtggtgcttctgggtctctgggccccgcctgctggcctgggatgccctcatgttgggaagcattccgtgccccccaccccgcctgccctccgtatttcctgcacctgtcagcctgcgccgactgatgagccagttgctcatttgtgctgattaacacccctaataaggggttggggtgcccataacggggtggccctgccgctgactcgggtctccgccatgcacgcgtggactctcggatgagctcagcagaaccgcacagccagagccccaggtcagaagtgcagaccagggttctcagcacagtgcccgtcgtgcttccatggcttgctacggagagagacctctggatccacactggggctgcgtctggcccgttgtccagcagccctgcggtaccgcaagcccaggcaccagtgtctcggggggcctcactgctgcgcaaggggtggggccgaggatgcaagtccaggcagagcggcgcaggcagctgtgagcttttctccatcagccgtctgagaagagcagtgaggccagctgcttcctgtccttcagaacacttctctgtgctcagtgggagccaggaagcctcaggcttcacgactgaatgcacccaatatccgacctggctgcgtgtttctggctgggctgccgtgtgcacagcaagttaactagaggggctgtgggccatggaactgtcagcgttattctcagaaggcggccgtggcatgggcagggtatagtgaggagtggaaggagacgtgtgcctggtaatatggggcggaatttccactcagctccatttgctggggatttaaagagaacccttgtgctgcgccaggcagttaccgagccgaagggagatgatgggccttcgcccctcagtgggatggcagctgagggggccctgcatttgaccctcgagactgcagcagcgcctttcctgtctgtggtttaagtctttgcagtcaagtactgatgcatccaagccaggcctatgcctggtgtctccctgactgcagaggagccccagggcaaggacagctcagctgctggcagcctgcctggcccatagacatcccccaagtagtctcaggcctctgacatgtccctgaggggcccctaagaaagaaagtggaggggacactccagaggctgtcgtgggaggatcatgtgagcctgggaggtcaaggctgcagtgagccgtgattgcaccactgcactccagcctgagtgacagagcgagaccctgtctcaaaaaacaaacaaacaaacaaacaaaaacagaacattctgggcacggtggctcatgcctgtagtcccagcactttgggaggccgaggctggtggatcacaaggtcaggagattgagaccatcctggctaacacagtgaaaccccgtctctactaaaaatacaaaaaaattagccaggcgtggtggcggtcacctgtagtcccagctactcgggaggctgaagcaggagaatggcgtgaacctgggaggcggagcttgcagtgagccgagatcacaccactgcactccagcctgagcgacagagcaagactccatctcaaaaaaaaaa

SEQ ID NO: 333541 - DNA, 1249 bp, Homo sapiens
tttgccaatttgacttctgtaggggccatggcacctgcaaggtgtttctcagcaagattgaggaccgtgtttcagggcgtggggcattgggctttgtccacatgggctggcctgaagcccagccggctactgccacagcgggcttctcccaggctgctctcggtcggccgtgcggacctcgccaagcatcaggaactcccggggaagaagctgctctctgagaaaaagctgaaaaggtactttgtggactatcggagagtgcttgtctgtggaggaaacggaggcgctggggcaagctgcttccacagtgagccccgcaaggagtttggaggccctgatggaggggacggaggcaacggtggacacgtcattctgagagttgaccagcaagtcaagtccctgtcgtcggtcctgtcgcggtaccagggtttcagtggagaagatggagggagtaaaaactgcttcgggcgcagtggcgccgtcctctacatccgggtccccgtgggcacgctggtgaaggagggaggcagagttgtggccgacctgtcttgcgtgggagatgagtacattgccgcgctgggcggggcaggagggaaaggcaaccgcttcttcctggccaacaacaaccgtgcccctgtgacctgtacccctggacagccaggacagcagcgagttctccacctggagctcaagacggtggcccacgccggaatggtgggattccccaacgccgggaagtcctcactgctccgggccatttcaaacgccagacccgccgtggcttcctacccgttcaccaccctgaagccccacgtcgggatcgtccactacgaaggccacctacaaatagcagtggccgacatccccggcatcatacgaggcgcccaccagaacaggggtctggggtccgccttcctcaggcacatcgagcgctgccgctttctcttgttcgtggtggatctttctcagcctgagccgtggactcaagttgacgatttaaaatatgaactggagatgtatgaaaagggcctgtctgcgaggccccacgcaatcgtcgcaaacaagattgacctccctgaagcccaagccaatctgtcccagctccgggatcacttgggacaggaggtcatcgtgctgtcggcgttgaccggcgagaacctggagcagctgctgttgcacctgagggcagaaagtatatgtgtcaggtgtgaggaagaaaatagattttggaagttaggagaacgcgtca

SEQ ID NO: 333542 - DNA, 1058 bp, Homo sapiens
tttgccaatttgacttctgtaggggccatggcacctgcaaggtgtttctcagcaagattgaggaccgtgtttcagggcgtggggcattgggctttgtccacatgggctggcctgaagcccagccggctactgccacagcgggcttctcccaggctgctctcggtcggccgtgcggacctcgccaagcatcaggaactcccggggaagaagctgctctctgagaaaaagctgaaaaggtactttgtggactatcggagagtgcttgtctgtggaggaaacggaggcgctggggcaagctgcttccacagtgagccccgcaaggagtttggaggccctgatggaggggacggaggcaacggtggacacgtcattctgagagttgaccagcaagtcaagtccctgtcgtcggtcctgtcgcggtaccagggtttcagtggagaagatggagggagtaaaaactgcttcgggcgcagtggcgccgtcctctacatccgggtccccgtgggcacgctggtgaaggagggaggcagagttgtggccgacctgtcttgcgtgggagatgagtacattgccgcgctgggcggggcaggagggaaaggcaaccgcttcttcctggccaacaacaaccgtgcccctgtgacctgtacccctggacagccaggacagcagcgagttctccacctggagctcaagacggtggcccacgccggaatggtgggattccccaacgccgggaagtcctcactgctccgggccatttcaaacgccagacccgccgtggcttcctacccgttcaccaccctgaagccccacgtcgggatcgtccactacgaaggccacctacaaatagcaggttcccaccccatcccctaggaatctgtcagttacagttcagaaacctgcattgaaattccagccgaggacagtatttcttcccactctatttgtcccctctcatctgtggaagctcagcagcatcacaacacgtgacttaaaagctttccttgtgccgtttgagagaataaaactttttcccagaagacaatacacccattaaa

SEQ ID NO: 333543 - DNA, 793 bp, Homo sapiens
tttgccaatttgacttctgtaggggccatggcacctgcaaggtgtttctcagcaagattgaggaccgtgtttcagggcgtggggcattgggctttgtccacatgggctggcctgaagcccagccggctactgccacagcgggcttctcccaggctgctctcggtcggccgtgcggacctcgccaagcatcaggaactcccggggaagaagctgctctctgagaaaaagctgaaaaggtactttgtggactatcggagagtgcttgtctgtggaggaaacggaggcgctggggcaagctgcttccacagtgagccccgcaaggagtttggaggccctgatggaggggacggaggcaacggtggacacgtcattctgagagttgaccagcaagtcaagtccctgtcgtcggtcctgtcgcggtaccagggtttcagtggagaagatggagggagtaaaaactgcttcgggcgcagtggcgccgtcctctacatccgggtgagccgagactgccggacctggccctgtccccgttgttctggatcatccagctcctgggggccaccgtgtgacccacggggcccctgtggcttgatgcccacagctaggaaacagcacaatggaaacggaggctggcagacagcgggaaagcagccccacccctcaaagcaaacccagacgggcatttgtaccagggtctcacaccatgtgcatgtctagtgaaaaagtcatgaaacgattctcttttaaaaagagggagcccacggcacggacgcttcctccgtctctgacccca

SEQ ID NO: 333544 - DNA, 812 bp, Homo sapiens
ccaaaatatattttggagatagtttgatatgagaggtgaggaaaagtaagtagtcatgtgtggctctttgtttctggctttaataactccagtagttctggaagagacttagtgggaaacattttggataaactgagtttgtccaaatggggttgccaagtggagagttgagtaaatgaagctagagctcaggaaagatgtggaccagagttataagtcatatttatttatttatttattttgagacagagtcgtgctctgtcgcccaggctggagtgcagtggtgcgatcttggctcactgcaacctccgcctccggggtcaagtgattctcctacctcagcctccagagtagctggtattacaggcacgggccaccatgcccagctaatttttgtatttttagtagagacgggggtttcaccatgctggccaggctggtctcgaactcccgaccttaggtgatcctcctgcctcggcctcccaaagtgtttggattacaggtgtgagctactgagcccagcataagtcatatttaaaacaatgggaatgggtaggaacacctagagatagagtgtgggaaatagaatagggtccagtatacagctgtgccaaatttcacatgtacaggttagatagtggagtgggtcagttctgtgggaatgccctgaaagtttgaataatgataagcacgtccattttaacatcatgaggtagtggtgacgttgtaagaggagtttcagtgtagtgggttgtcatgggttaaaacgttcagattgtcatgggttaaaacgtgaattggatatgaggaag

SEQ ID NO: 333545 - DNA, 1018 bp, Homo sapiens
gtggatcctgagacccattgtcatgcagaaaggtgcttcctctcttggttctgtgacgacatactgtctcctaacacaaactacgaggtcacctggtacacatcttggagcccttgcccagagtgtgcaggggaggtggccgagttcctggccaggcacagcaacgtgaatctcaccatcttcaccgcccgcctctgctactcctggcctcagggccattccatagtgcccccctgcctcaccacctcctccccgctctcccaggctcttcttgtagaggctctccatccacctccccagtcctgttcccccagcctgggtgcccctaacttgactcttcccatctccccagcataaccaaatctttttttttttttttttttgagacggagtttcactctgtcgcccagactagagtgcaatggctggatctcagctcactgcaaactctgcttactgggttcaagtgattctcctgtctcagcttctgagtagctgggattacagatgcctgccaccacgcccagctaatttttttttttttttttttttttttttgtatttttagtagtgactgggtttcaccatgttggccaggctggtcttgaactcctgacctcaggtgatctgcccatctctgtctcccaaagtgctgggattacgggcgtgagccacccggctcggccgcacaaccaaatcttattaaactcaatctagtctggccctggtgactcacgcctttcggaggcagaggtgggagaatcgcttgagcccagaagtttgagaccagcctgggccacacgacaaagccccatttctacaaaaaaaaaatacaaaaaaaaagccagatgtggtggcatgcacctgtagtttaagctacttgggaggatgaagtgggaggactgcttgagccggggaggtggaggctggagtaaactgagatcgcgccacagaactccagtttgagcaacagatcaagaccctgcctgaaaataaatcaataaatacactcaaccta

SEQ ID NO: 333546 - DNA, 541 bp, Homo sapiens
gtggatcctgagacccattgtcatgcagaaaggtgcttcctctcttggttctgtgacgacatactgtctcctaacacaaactacgaggtcacctggtacacatcttggagcccttgcccagagtgtgcaggggaggtggccgagttcctggccaggcacagcaacgtgaatctcaccatcttcaccgcccgcctctgctacttctgggatacagattaccaggaggggctctgcagcctgagtcaggaaggggcctccgtgaagatcatgggctacaaagattttgtatcttgttggaaaaatttgagaccagcctgggccacacgacaaagccccatttctacaaaaaaaaaatacaaaaaaaaagccagatgtggtggcatgcacctgtagtttaagctacttgggaggatgaagtgggaggactgcttgagccggggaggtggaggctggagtaaactgagatcgcgccacagaactccagtttgagcaacagatcaagaccctgcctgaaaataaatcaataaatacactcaaccta

SEQ ID NO: 333547 - DNA, 201 bp, Homo sapiens
acatcttggagcccttgcccagagtgtgcaggggaggtggccgagttcctggccaggcacagcaacgtgaatctcaccatcttcaccgcccgcctctgctacttctgggatacagattaccaggaggggctctgcagcctgagtcaggaaggggcctccgtgaagatcatgggctacaaaggtgagacgtggggggctgag

SEQ ID NO: 333548 - DNA, 115 bp, Homo sapiens
atcggcaccgaaaatcaatgaactactactgctatcctaaaaacatgatgactcacaaacaatgctgagtgaaagatgtcatacaaagcagtacatgggtgccgatgaatagcga

SEQ ID NO: 333549 - DNA, 366 bp, Homo sapiens
cggggggcccgggggggcccccttcccccaaaaaaaaaaaaaaaaaaaaaaaaaaaaaaaaaaaaaaaaaaaaagattctaggttttttaagtcagaaagtctcaaaagtcagaggagtgaggagcagtggacttttatgccatgctttcagaaagcaagctctggtctatgaatgaagaagaaaaatgagtggtccaggaaacataacttctagattgttttgtgcaatacttttttccgccatattctggttcctgtatacagtatatctgttcagtatcttaaaaattacaactgttttcatgattttgattgaagatttttttaactcagcccacccacttatggaagtaaagcagaaaggg

SEQ ID NO: 333550 - DNA, 424 bp, Homo sapiens
tcccagctactttggaggctgaggcaggagaatggcgtgaacccgggaggcagaacttacagtgagccgagatcgtgccactccacttcagcctgggtgacagagcgagactccgtctcaaaaaaaaaaaaagattctaggttttttaagtcagaaagtctcaaaagtcagaggagtgaggagcagtggacttttatgccatgctttcagaaagcaagctctggtctatgaatgaagaagaaaaatgagtggtccaggaaacataacttctagattgttttgtgcaatacttttttccgccatattctggttcctgtatacagtatatctgttcagtatcttaaaaattacaactgttttcatgattttgattgaagatttttttaactcagcccacccacttatggaagtaaagcagaaaggg

SEQ ID NO: 333551 - DNA, 533 bp, Homo sapiens
cctgtccctactaaaagtacaaaaaattagccaggtgtggtggtgcgtgcctgtattcccagctactcaggaggctgaggcaggaaaatcgcttgaacctgggagatggatgttgcagtgagctgagatcgcaccactgcaatctagcttgggcaatggagtgagactgtctccaaaaaacaaacaaacaaacaaaaaaacaatagaaattacctgatctgaacaagaaagagaaaataaaaatagactgaaaacaaaattaaaaacagagcctgtggacctgtggaaatactacaaaagatctactatttctgtcctcagggttccaggaggagagaataaagagggccaggttgaaaaggtaatgggtaaaataatggctggatacttgccaactttggcaagaaaaatctatagattcaagaagctgagcaaacactacacagaatacacccatagaaatccatgccacaacacatcacaattaaacttctgaaaataaagagagaagaaatcttgacagcagccagaga

SEQ ID NO: 333552 - DNA, 238 bp, Homo sapiens
agtgggttaggggggcagtgctaaaagtggggaaccagtgtgaattaatctccaacctctatcctttccatcccaccagtctcctgccggggtcctcactgtcctgttcatccagtagtcagaggccagggaggccaccgaggcagactccacaatctttggagggcacaaggctctggagcatgaataaaagattcctggaatggctgggcccggtggctcacgcttgtaatcccag

SEQ ID NO: 333553 - DNA, 178 bp, Homo sapiens
tgcactgttccttcttggatgtgcccgccgtgctgtgcatcttgagaatggcccttcagcgcatcttcatggtttcttcccgcttccgttgttggccctacctcattttacactgtgttaccccttgggaatatcttgcttctgttccttgtctacgcaggtctctaaccctgcaagg

SEQ ID NO: 333554 - DNA, 404 bp, Homo sapiens
aattggactgaagcccgagctactgctgcctatagcttgctctctgtgacgcttttgccgctgagaatgtacctttctggtacagccggagccgagagctctagaaaagaatagtttctgtccatgaaggaacagttcaagaagagcaagcttactctgcccatggaagaccagactcctatctggctttgtttggaacatctaagctcaggaaattcaggtgggtagaaaataccatattggggatcttctcatcactactttcatattgggagacatgaggcaaggatccagctgggtcttatttaagaaagataccaggctggacacggtggctaacacctataatcccagcactttgggaggctaaggcagtgggattccttgaggccaggagttcggag

SEQ ID NO: 333555 - DNA, 114 bp, Homo sapiens
aggtgtgagacagcatgtggacttgtgtgggactcatatccagagtatgtgagggcagcaatgggaagtagaacgtatcgaagggtgaggaaagagccagaaggctgtgtttgt

SEQ ID NO: 333556 - DNA, 534 bp, Homo sapiens
ataatgtgtgtataaatcacctagcataagaaatgtattgtacctgctcaataaatcttactttccttcataaagcagaaaaataattttcaaccacaagtaaaacaaagtggttgttggtcatttagagtttttccttttttaccgctagggtagcatcagtgaagtgagtcaagagacttgggaatactgaggccgttttgcctacagaaaaggcaaaagtgcactcccaatatggaatttatttcttggcaagcagttctctgtctcctatactactcttgcttctatcagtgaaggttctcaccattatatgtcatatattgacaacaacaacaaaaacacagaagattaatgaccaacagtagaaatcaccagtttattgctttaattcaacagcataattttctctgaacagatttagccaacggaagcaaatggtatagtactaggcttaaatctctatgctgactgcatttccctacaatccattgttttatggctctaccctataaccagacagcacaatcacct

SEQ ID NO: 333557 - DNA, 368 bp, Homo sapiens
gatcacaggcacatgccactgcgcccggctaattttttgtatttttggtagagacaaggcttcaccatgttgaccaggctggtctcgaactcctgacctcaagtgatccacctgccttggccatccaaagtgctgggattacaggcgtgagccactgcaccccgccagaacataattttcaaagtctttctcttgaacattaagcttttcataattccgggggataaaaatatgaagtcatgatgacttaagtgcatgatgaaattttccccaaagaggtaattctcaggaggtccagtaccagatgtgagacttccatgtcgttaacagacttccaagtgaaattcccaattgtgcttatttattta

SEQ ID NO: 333558 - DNA, 173 bp, Homo sapiens
tgactcgggatatccatttgtaaaaactgacttctttcatggagtcatgaaggagccaaggagttctagaacatcacactaatttaaaaaaattctaccctacaattttcatgctgatatagctatttcctttccctcactgcctttgaccaacatttatttactgcaaaggc

SEQ ID NO: 333559 - DNA, 415 bp, Homo sapiens
tcaaaatgtggtccgcagacctgcaacattgacatcacccaggattttgttagaaatgcataatctcagactccaccctagacctactgaatccaactgcacttttaaatgatctcgaaatcatttggatacatgtttggcagacactgatctgtactgcacaacactccaaggggacacagttacttagtagggagttggtcctggtatccaggcaagaacagattggagaaaggtttccttggcaaaggagaaatgatggctaccttagatggctctgaggagctttcctgctcatcttcaagacagagtgcaagaaggaagtgaggcacagccttgagaaagacaagaacctcatgctctatgaaagaaacatttaagtagcccttaaatgagaacgtcgacgcatcaactt

SEQ ID NO: 333560 - DNA, 1500 bp, Homo sapiens
ggggaagggacgggagggaagggggaggggaaggggaacgcgggagagggaagggggcggagctagccggagccgcgagtccattttggggctgtgcttggcgcgtaccgtgcggtccctgtagttggaggacgggcggtcgcgcggcctttcccactagccggagtagcctctagttcgttagtcaaaacgtgaaaaaaaagacctgctttgccctgggaaatagtaaccctgccaaatacatcagcttgtaggagacagaggatgtgatggagctgcttgaagaagatctcacatgccctatttgttgtagtctgtttgatgatccacgggttttgccttgctcccacaacttctgcaaaaaatgcttagaaggtatcttagaagggagtgtgcggaattccttgtggagaccagctccattcaagtgtcctacatgccgtaaggaaacttcagctactggaattaatagcctgcaggttaattactccctgaagggtattgtggaaaagtataacaagatcaagatctctcccaaaatgccagtatgcaaaggacacttggggcagcctctcaacattttctgcctgactgatatgcagctgatttgtgggatctgtgctactcgtggggagcacaccaaacatgtcttctgttctattgaagatgcctatgctcaggaaagggatgcctttgagtccctcttccagagctttgagacctggcgtcggggagatgctctttctcgcttggataccttggaaactagtaagaggaaatccctacagttactgactaaagattcagataaagtgaaggaattttttgagaagttacaacacacactggatcaaaagaagaatgaaattctgtctgactttgagaccatgaaacttgctgttatgcaagcatatgacccagagatcaacaaactcaacaccatcttgcaggagcaacggatggcctttaacattgctgaggctttcaaagatgtgtcagaacccattgtatttctgcaacagatgcaggagtttagagagaaaatcaaagtaatcaaggaaactcctttacctccctctaatttgcctgcaagccctttaatgaagaactttgataccagtcagtgggaagacataaaactagtcgatgtggataaactttctttgcctcaagacactggcacattcattagcaagattccctggagcttttataagttatttttgctaatccttctgcttggccttgtcattgtctttggtcctaccatgttcctagaatggtcattatttgatgacctggcaacttggaaaggctgtctttcaaacttcagttcctatctgactaaaacagccgatttcatagaacaatcagttttttactgggaacaggtgacagatgggtttttcattttcaatgaaagattcaagaattttactttggtggtactgaacaatgtggcagaatttgtgtgcaaatataaactattataaaatctgt

SEQ ID NO: 333561 - DNA, 910 bp, Homo sapiens
agcggagacgccggaaggaacgcggtctcaccacccggctccctccgccaaggcgaggcgcggccggggaggcgggacacaggcgaagcgggacggggaggcggggccggagtagcctctagttcgttagtcaaaacgtgaaaaaaaagacctgctttgccctgggaaatagtaaccctgccaaatacatcagcttgtaggagacagaggtatgtttctataaaacctgataaccgaaaattggccaacggaacaaatgtcctcggcttactgattgacactttattaaaggaaggctttcatttggtcagcactagaacagtatcttctgaagacaaaactgaatgctatagctttgaaaggataaaaagccctgaagtgctcatcacgaatgaaacaccaaaaccagagactatcatcataccagagcaatctcagataaagaaatgaagttgtctatcctcttttaaagagaaattgccatttttcttgtttcattacgtatttagggcatacatgttagccaaatctacactcagcctaactcttggcttcatctgctgccatgccgtctctgggcaaccaggccccaactgtgcttaagccataatgcctgctgctctctagacaactccatgtacttggtgctttggtatatgttctaccttcaatacatctttccctttctcttcttcatgaatgcttatgagccgagattgcgccactgcacactagcttgggtgacagaggaagactgtctcaaaaaaaaaaaaattgatcaaactgatggataccctaagtaccctgacttgatcattacaccttctatgcatgcaacaaaatgccacgtgtaccccataaatatgtagaaatattatatgtaaataaatagttgggccttccgtatttt

SEQ ID NO: 333562 - DNA, 1206 bp, Homo sapiens
ggggaagggacgggagggaagggggaggggaaggggaacgcgggagagggaagggggcggagctagccggagccgcgagtccattttggggctgtgcttggcgcgtaccgtgcggtccctgtagttggaggacgggcggtcgcgcggcctttcccactagccggaggtcggagataagtacccgccgcccggctcctctcgggaaagcggggtggtcctcgaaccttcagcgagggtggggagttgcccaggtcagcagggatctgcgtgggttgggggggctggcgaaggccgtctgagctccagtccggcagcgcggcagaaaccagcggggcactgtcatgggcctggggaggagcggcctgcggagggcgccggggcagtgtgtctgtggtccagaaaacctgctccgtccggagccttcctggccccgctaccagcgtctccacatcccctagaaaagaaaagacgggtgtgggccttaggttacagcgcgccgccagcgtttggttgcatggcgccgggggagggcgccctaaccgagaagctgcttaatacaaagagctccaggctcctggcggttcaccaggtctaaacagccgggctttatttgtgggggcgattgaaaaaattgagggtcaagattggggtgctgtgcaaataaatgcgttaatactgttctttttcttctttctttgcagtagcctctagttcgttagtcaaaacgtgaaaaaaaagacctgctttgccctgggaaatagtaaccctgccaaatacatcagcttgtaggagacagaggtaaactacaataattttcctgtgttatctttttttttttaaacacccaatttcaataggccctagaaccttccaaaatggaactgtgtgtagaatacgtatgttcccatccactttcattggtggtctttgttctttgcatattttgttaaaacttagaaaaacagaattcacgtttagcaattatttatgtggtatttatcttaaatatagccaaacattcatattacaaaggaagaaaggggcttccacacttttttcctacttttttttcccttctcctatgcttagtgaattgtcaggctgctagggcttgtagaacagggcttgagttttctagagacctttatataataggcactttaaaagcagaatttcatttacataggcactccttctagtagaact

SEQ ID NO: 333563 - DNA, 423 bp, Homo sapiens
catgagacctatcctctacacagatttctaagtgtacagtacagtggtgttaactatagacatgagcagatctctgaaacttacttttatgtgtcttttataaactatttatcataccttctagaataacagcacctggccgggtgcagtggctcaggcctgtaatcgcagcactttgggaggctgaggtgggcggatcacctgaggtcaggagctcgagaccagcctggccaaaatggtaaaaccctgtctctactaaaaatacaaaaaattagctgggcatggtggcaagtgcctgtaataccagctacttgggaggctaaggcaggagaatcacttgaacccaggaggcggaggttccagtgagccaagatcacaccattgcactccagcctgggtgacaagagcaaaactctgtcccaa

SEQ ID NO: 333564 - DNA, 1117 bp, Homo sapiens
tgatttcctaagtgtggctgatggtagcctctagtttgaagtgagggaagaatgagtagtcaggaactggtcactttgaatgtgggagggaagatattcacgacaaggttttctacgataaagcagtttcctgcttctcgtttggcacgcatgttagatggcagagaccaagaattcaagatggttggtggccagatttttgtagacagagatggtgatttgtttagtttcatcttagattttttgagaactcaccagcttttattacccactgaattttcagactatcttaggcttcagagagaggctcttttctatgaacttcgttctctagttgatctcttaaacccatacctgctacagccaagacctgctcttgtggaggtacatttcctaagccggaacactcaagcttttttcagggtgtttggctcttgcagcaaaacaattgagatgctaacagggaggattacagtgtttacagaacaaccttcagcgccgacctggaatggtaactttttccctcctcagatgaccttacttccactgcctccacaaagaccttcttaccatgacctggttttccagtgtggttctgacagcactactgataaccaaactggagtcaggtattttgtactttgcagtatttctcttgtataccagtttgtgatgttttctctaaaaacttgaagttcctcaggcctgtaacttctcctggaaaagatgattattcaaaataatgttttggggtaaccagtggagttgggtagaatgaccaaataattattttccaaactgggatactttttagagtgaaaggggctattattaggtgggacaaaaggaataaatgaagactgcccagaaaaaactgagactatggacattcaaatcatgggagaaaataattttgtagattatgttccattgctaatgaatttgacttagaaaagaattgccttatttttaagagattgtttcagtggttcacataaaggctcgctcactggtttctcttgagttccttacacactatataagttgttctttcagttttatgattcaactactgtttttccttcagctgactttatttttaaacacccttaaagac

SEQ ID NO: 333565 - DNA, 1521 bp, Homo sapiens
ccaacccataggctaggtcgaggcctcgtgtgcttggcgcgtaccgtgcggtccctgtagttggaggacgggcggtcgcgcggcctttcccactagccggaggtcggagataagtacccgccgcccggctcctctcgggaaagcggggtggtcctcgaaccttcagcgagggtggggagttgcccagtagcctctagttcgttagtcaaaacgtgaaaaaaaagacctgctttgccctgggaaatagtaaccctgccaaatacatcagcttgtaggagacagaggatgtgatggagctgcttgaagaagatctcacatgccctatttgttgtagtctgtttgatgatccacgggttttgccttgctcccacaacttctgcaaaaaatgcttagaaggtatcttagaagggagtgtgcggaattccttgtggagaccagctccattcaagtgtcctacatgccgtaaggaaacttcagctactggaattaatagcctgcaggttaattactccctgaagggtattgtggaaaagtataacaagatcaagatctctcccaaaatgccagtatgcaaaggacacttggggcagcctctcaacattttctgcctgactgatatgcagctgatttgtgggatctgtgctactcgtggggagcacaccaaacatgtcttctgttctattgaagatgcctatgctcaggaaagggatgcctttgagtccctcttccagagctttgagacctggcgtcggggagatgctctttctcgcttggataccttggaaactagtaagaggaaatccctacagttactgactaaagattcagataaagtgaaggaattttttgagaagttacaacacacactggatcaaaagaagaatgaaattctgtctgactttgagaccatgaaacttgctgttatgcaagcatatgacccagagatcaacaaactcaacaccatcttgcaggagcaacggatggcctttaacattgctgaggctttcaaagatgtgtcagaacccattgtatttctgcaacagatgcaggagtttagagagaaaatcaaagtaatcaaggaaactcctttacctccctctaatttgcctgcaagccctttaatgaagaactttgataccagtcagtgggaagacataaaactagtcgatgtggataaactttctttgcctcaagacactggcacattcattagcaagattccctggagcttttataagttatttttgctaatccttctgcttggccttgtcattgtctttggtcctaccatgttcctagaatggtcattatttgatgacctggcaacttggaaaggctgtctttcaaacttcagttcctatctgactaaaacagccgatttcatagaacaatcagttttttactgggaacaggtgacagatgggtttttcattttcaatgaaagattcaagaattttactttggtggtactgaacaatgtggcagaatttgtgtgcaaatataaactattataaaatctgt

SEQ ID NO: 333566 - DNA, 1446 bp, Homo sapiens
agcggagacgccggaaggaacgcggtctcaccacccggctccctccgccaaggcgaggcgcggccggggaggcgggacacaggcgaagcgggacggggaggcggggccggagtagcctctagttcgttagtcaaaacgtgaaaaaaaagacctgctttgccctgggaaatagtaaccctgccaaatacatcagcttgtaggagacagaggatgtgatggagctgcttgaagaagatctcacatgccctatttgttgtagtctgtttgatgatccacgggttttgccttgctcccacaacttctgcaaaaaatgcttagaaggtatcttagaagggagtgtgcggaattccttgtggagaccagctccattcaagtgtcctacatgccgtaaggaaacttcagctactggaattaatagcctgcaggttaattactccctgaagggtattgtggaaaagtataacaagatcaagatctctcccaaaatgccagtatgcaaaggacacttggggcagcctctcaacattttctgcctgactgatatgcagctgatttgtgggatctgtgctactcgtggggagcacaccaaacatgtcttctgttctattgaagatgcctatgctcaggaaagggatgcctttgagtccctcttccagagctttgagacctggcgtcggggagatgctctttctcgcttggataccttggaaactagtaagaggaaatccctacagttactgactaaagattcagataaagtgaaggaattttttgagaagttacaacacacactggatcaaaagaagaatgaaattctgtctgactttgagaccatgaaacttgctgttatgcaagcatatgacccagagatcaacaaactcaacaccatcttgcaggagcaacggatggcctttaacattgctgaggctttcaaagatgtgtcagaacccattgtatttctgcaacagatgcaggagtttagagagaaaatcaaagtaatcaaggaaactcctttacctccctctaatttgcctgcaagccctttaatgaagaactttgataccagtcagtgggaagacataaaactagtcgatgtggataaactttctttgcctcaagacactggcacattcattagcaagattccctggagcttttataagttatttttgctaatccttctgcttggccttgtcattgtctttggtcctaccatgttcctagaatggtcattatttgatgacctggcaacttggaaaggctgtctttcaaacttcagttcctatctgactaaaacagccgatttcatagaacaatcagttttttactgggaacaggtgacagatgggtttttcattttcaatgaaagattcaagaattttactttggtggtactgaacaatgtggcagaatttgtgtgcaaatataaactattataaaatctgt

SEQ ID NO: 333567 - DNA, 2035 bp, Homo sapiens
ggggaagggacgggagggaagggggaggggaaggggaacgcgggagagggaagggggcggagctagccggagccgcgagtccattttggggctgtgcttggcgcgtaccgtgcggtccctgtagttggaggacgggcggtcgcgcggcctttcccactagccggaggtcggagataagtacccgccgcccggctcctctcgggaaagcggggtggtcctcgaaccttcagcgagggtggggagttgcccaggtcagcagggatctgcgtgggttgggggggctggcgaaggccgtctgagctccagtccggcagcgcggcagaaaccagcggggcactgtcatgggcctggggaggagcggcctgcggagggcgccggggcagtgtgtctgtggtccagaaaacctgctccgtccggagccttcctggccccgctaccagcgtctccacatcccctagaaaagaaaagacgggtgtgggccttaggttacagcgcgccgccagcgtttggttgcatggcgccgggggagggcgccctaaccgagaagctgcttaatacaaagagctccaggctcctggcggttcaccaggtctaaacagccgggctttatttgtgggggcgattgaaaaaattgagggtcaagattggggtgctgtgcaaataaatgcgttaatactgttctttttcttctttctttgcagtagcctctagttcgttagtcaaaacgtgaaaaaaaagacctgctttgccctgggaaatagtaaccctgccaaatacatcagcttgtaggagacagaggatgtgatggagctgcttgaagaagatctcacatgccctatttgttgtagtctgtttgatgatccacgggttttgccttgctcccacaacttctgcaaaaaatgcttagaaggtatcttagaagggagtgtgcggaattccttgtggagaccagctccattcaagtgtcctacatgccgtaaggaaacttcagctactggaattaatagcctgcaggttaattactccctgaagggtattgtggaaaagtataacaagatcaagatctctcccaaaatgccagtatgcaaaggacacttggggcagcctctcaacattttctgcctgactgatatgcagctgatttgtgggatctgtgctactcgtggggagcacaccaaacatgtcttctgttctattgaagatgcctatgctcaggaaagggatgcctttgagtccctcttccagagctttgagacctggcgtcggggagatgctctttctcgcttggataccttggaaactagtaagaggaaatccctacagttactgactaaagattcagataaagtgaaggaattttttgagaagttacaacacacactggatcaaaagaagaatgaaattctgtctgactttgagaccatgaaacttgctgttatgcaagcatatgacccagagatcaacaaactcaacaccatcttgcaggagcaacggatggcctttaacattgctgaggctttcaaagatgtgtcagaacccattgtatttctgcaacagatgcaggagtttagagagaaaatcaaagtaatcaaggaaactcctttacctccctctaatttgcctgcaagccctttaatgaagaactttgataccagtcagtgggaagacataaaactagtcgatgtggataaactttctttgcctcaagacactggcacattcattagcaagattccctggagcttttataagttatttttgctaatccttctgcttggccttgtcattgtctttggtcctaccatgttcctagaatggtcattatttgatgacctggcaacttggaaaggctgtctttcaaacttcagttcctatctgactaaaacagccgatttcatagaacaatcagttttttactgggaacaggtgacagatgggtttttcattttcaatgaaagattcaagaattttactttggtggtactgaacaatgtggcagaatttgtgtgcaaatataaactattataaaatctgt

SEQ ID NO: 333568 - DNA, 2701 bp, Homo sapiens
agcggacttctcccaagatcgtaaatttggaggagccattccttcatcatccatgttgcatccttcacaaccgttcaacggtttaagtgcttatagcctctagttcgttagtcaaaacgtgaaaaaaaagacctgctttgccctgggaaatagtaaccctgccaaatacatcagcttgtaggagacagagaataacagcacctggccgggtgcagtggctcaggcctgtaatcgcagcactttgggaggctgaggtgggcggatcacctgaggtcaggagctcgagaccagcctggccaaaatggatgtgatggagctgcttgaagaagatctcacatgccctatttgttgtagtctgtttgatgatccacgggttttgccttgctcccacaacttctgcaaaaaatgcttagaaggtatcttagaagggagtgtgcggaattccttgtggagaccagctccattcaagtgtcctacatgccgtaaggaaacttcagctactggaattaatagcctgcaggttaattactccctgaagggtattgtggaaaagtataacaagatcaagatctctcccaaaatgccagtatgcaaaggacacttggggcagcctctcaacattttctgcctgactgatatgcagctgatttgtgggatctgtgctactcgtggggagcacaccaaacatgtcttctgttctattgaagatgcctatgctcaggaaagggatgcctttgagtccctcttccagagctttgagacctggcgtcggggagatgctctttctcgcttggataccttggaaactagtaagaggaaatccctacagttactgactaaagattcagataaagtgaaggaattttttgagaagttacaacacacactggatcaaaagaagaatgaaattctgtctgactttgagaccatgaaacttgctgttatgcaagcatatgacccagagatcaacaaactcaacaccatcttgcaggagcaacggatggcctttaacattgctgaggctttcaaagatgtgtcagaacccattgtatttctgcaacagatgcaggagtttagagagaaaatcaaagtaatcaaggaaactcctttacctccctctaatttgcctgcaagccctttaatgaagaactttgataccagtcagtgggaagacataaaactagtcgatgtggataaactttctttgcctcaagacactggcacattcattagcaagattccctggagcttttataagttatttttgctaatccttctgcttggccttgtcattgtctttggtcctaccatgttcctagaatggtcattatttgatgacctggcaacttggaaaggctgtctttcaaacttcagttcctatctgactaaaacagccgatttcatagaacaatcagttttttactgggaacaggtgacagatgggtttttcattttcaatgaaagattcaagaattttactttggtggtactgaacaatgtggcagaatttgtgtgcaaatataaactattataaaatctgtttcaagtatgcagttttcttttgttagaaattgttagagaatagagagtggtaattcagatttggtcaacgattctagtcacatattttcctccaaaagtattccttccaaaaataatctatacatgttcaaattaggtagcataaagataaaagtgaaatttagtagtataggcctgaacctttttttgtttaaaagagtgcttttgaaataagcatccaccccaaatgttggttgtatttatgctgtgataaaaataggtgagagatcatatgatctaatattgtattgatggaagtataggtagtatagtagtgattgttcttcaagcatgcagtaaagatcacttttttttttttttttttttgagatggagtcttgctctgtcgcccaggctggagtgcagtggtgcaatcttggctcactgcagcctctacctcccaggttcaagtgattatcctgccttagcctcctgagtagctgggattacaggcgcgtgccaccacgcccagctaattttttgtatttttagttgagacagggtttcactgtcccttaagaccatcctgttagccaagatggtcttgatctcctgacctcgtgatccgcctgcctcggcctcccaaagtgctgggattacaggtgtgagccaccgtgcccagccaaagactgctcttaaagcacctttttgacagtgaacatggtctaaaaaagggaagatattgtagaagatttcacacacacacgcgtgtgtgggagacaactaaaggtattgaaggtactaattaattagatttccaaaattttctacagagagttaattatcaccaaaatgtgaatggtacatacaaaacctggcattttcttgtgataagtttacatttttaggagagtggagctttcaatctgcccttttctcctttgtttttgtagttttcaccaaagatgatcaactagaaatgttaagtggctatgcaagcaaaagcatagataggttaaaaaaaaggatcagctggctgggcagggtggctcatgtctataatctcagcattctaggacagtgatgtgggaggattatttgaggctaggagttccagttcgaaaccagcttcgtaaacatagcaagacccagtctctaccaaaaaaaaaaaaaaaaaaaa

SEQ ID NO: 333569 - DNA, 1499 bp, Homo sapiens
ggggaagggacgggagggaagggggaggggaaggggaacgcgggagagggaagggggcggagctagccggagccgcgagtccattttggggctgtgcttggcgcgtaccgtgcggtccctgtagttggaggacgggcggtcgcgcggcctttcccactagccggaggtcggagataagtacccgccgcccggctcctctcgggaaagcggggtggtcctcgaaccttcagcgagggtggggagttgcccaggtcagcagggatctgcgtgggttgggggggctggcgaaggccgtctgagctccagtccggcagcgcggcagaaaccagcggggcactgtcatgggcctggggaggagcggcctgcggagggcgccggggcagtgtgtctgtggtccagaaaacctgctccgtccggagccttcctggccccgctaccagcgtctccacatcccctagaaaagaaaagacgggtgtgggccttaggttacagcgcgccgccagcgtttggttgcatggcgccgggggagggcgccctaaccgagaagctgcttaatacaaagagctccaggctcctggcggttcaccaggtctaaacagccgggctttatttgtgggggcgattgaaaaaattgagggtcaagattggggtgctgtgcaaataaatgcgttaatactgttctttttcttctttctttgcagtagcctctagttcgttagtcaaaacgtgaaaaaaaagacctgctttgccctgggaaatagtaaccctgccaaatacatcagcttgtaggagacagaggtatgtttctataaaacctgataaccgaaaattggccaacggaacaaatgtcctcggcttactgattgacactttattaaaggaaggctttcatttggtcagcactagaacagtatcttctgaagacaaaactgaatgctatagctttgaaaggataaaaagccctgaagtgctcatcacgaatgaaacaccaaaaccagagactatcatcataccagagcaatctcagataaagaaatgaagttgtctatcctcttttaaagagaaattgccatttttcttgtttcattacgtatttagggcatacatgttagccaaatctacactcagcctaactcttggcttcatctgctgccatgccgtctctgggcaaccaggccccaactgtgcttaagccataatgcctgctgctctctagacaactccatgtacttggtgctttggtatatgttctaccttcaatacatctttccctttctcttcttcatgaatgcttatgagccgagattgcgccactgcacactagcttgggtgacagaggaagactgtctcaaaaaaaaaaaaattgatcaaactgatggataccctaagtaccctgacttgatcattacaccttctatgcatgcaacaaaatgccacgtgtaccccataaatatgtagaaatattatatgtaaataaatagttgggccttccgtatttt

SEQ ID NO: 333570 - DNA, 1330 bp, Homo sapiens
tgatttcctaagtgtggctgatggtagcctctagtttgaagtgagggaagaatgagtagtcaggaactggtcactttgaatgtgggagggaagatattcacgacaaggttttctacgataaagcagtttcctgcttctcgtttggcacgcatgttagatggcagagaccaagaattcaagatggttggtggccagatttttgtagacagagatggtgatttgtttagtttcatcttagattttttgagaactcaccagcttttattacccactgaattttcagactatcttaggcttcagagagaggctcttttctatgaacttcgttctctagttgatctcttaaacccatacctgctacagccaagacctgctcttgtggaggtacatttcctaagccggaacactcaagcttttttcagggtgtttggctcttgcagcaaaacaattgagatgctaacagggaggattacagtgtttacagaacaaccttcagcgccgacctggaatggtaactttttccctcctcagatgaccttacttccactgcctccacaaagaccttcttaccatgacctggttttccagtgtggttctgacagcactactgataaccaaactggagtcaggtatgtttctataaaacctgataaccgaaaattggccaacggaacaaatgtcctcggcttactgattgacactttattaaaggaaggctttcatttggtcagcactagaacagtatcttctgaagacaaaactgaatgctatagctttgaaaggataaaaagccctgaagtgctcatcacgaatgaaacaccaaaaccagagactatcatcataccagagcaatctcagataaagaaatgaagttgtctatcctcttttaaagagaaattgccatttttcttgtttcattacgtatttagggcatacatgttagccaaatctacactcagcctaactcttggcttcatctgctgccatgccgtctctgggcaaccaggccccaactgtgcttaagccataatgcctgctgctctctagacaactccatgtacttggtgctttggtatatgttctaccttcaatacatctttccctttctcttcttcatgaatgcttatgagccgagattgcgccactgcacactagcttgggtgacagaggaagactgtctcaaaaaaaaaaaaattgatcaaactgatggataccctaagtaccctgacttgatcattacaccttctatgcatgcaacaaaatgccacgtgtaccccataaatatgtagaaatattatatgtaaataaatagttgggccttccgtatttt

SEQ ID NO: 333571 - DNA, 964 bp, Homo sapiens
ggggaagggacgggagggaagggggaggggaaggggaacgcgggagagggaagggggcggagctagccggagccgcgagtccattttggggctgtgcttggcgcgtaccgtgcggtccctgtagttggaggacgggcggtcgcgcggcctttcccactagccggagtagcctctagttcgttagtcaaaacgtgaaaaaaaagacctgctttgccctgggaaatagtaaccctgccaaatacatcagcttgtaggagacagaggtatgtttctataaaacctgataaccgaaaattggccaacggaacaaatgtcctcggcttactgattgacactttattaaaggaaggctttcatttggtcagcactagaacagtatcttctgaagacaaaactgaatgctatagctttgaaaggataaaaagccctgaagtgctcatcacgaatgaaacaccaaaaccagagactatcatcataccagagcaatctcagataaagaaatgaagttgtctatcctcttttaaagagaaattgccatttttcttgtttcattacgtatttagggcatacatgttagccaaatctacactcagcctaactcttggcttcatctgctgccatgccgtctctgggcaaccaggccccaactgtgcttaagccataatgcctgctgctctctagacaactccatgtacttggtgctttggtatatgttctaccttcaatacatctttccctttctcttcttcatgaatgcttatgagccgagattgcgccactgcacactagcttgggtgacagaggaagactgtctcaaaaaaaaaaaaattgatcaaactgatggataccctaagtaccctgacttgatcattacaccttctatgcatgcaacaaaatgccacgtgtaccccataaatatgtagaaatattatatgtaaataaatagttgggccttccgtatttt

SEQ ID NO: 333572 - DNA, 1058 bp, Homo sapiens
ggggaagggacgggagggaagggggaggggaaggggaacgcgggagagggaagggggcggagctagccggagccgcgagtccattttggggctgtgcttggcgcgtaccgtgcggtccctgtagttggaggacgggcggtcgcgcggcctttcccactagccggaggtcggagataagtacccgccgcccggctcctctcgggaaagcggggtggtcctcgaaccttcagcgagggtggggagttgcccaggtcagcagggatctgcgtgggttgggggggctggcgaaggccgtctgagctccagtccggcagcgcggcagaaaccagcggggcactgtcatgggcctggggaggagcggcctgcggagggcgccggggcagtgtgtctgtggtccagaaaacctgctccgtccggagccttcctggccccgctaccagcgtctccacatcccctagaaaagaaaagacgggtgtgggccttaggttacagcgcgccgccagcgtttggttgcatggcgccgggggagggcgccctaaccgagaagctgcttaatacaaagagctccaggctcctggcggttcaccaggtctaaacagccgggctttatttgtgggggcgattgaaaaaattgagggtcaagattggggtgctgtgcaaataaatgcgttaatactgttctttttcttctttctttgcagtagcctctagttcgttagtcaaaacgtgaaaaaaaagacctgctttgccctgggaaatagtaaccctgccaaatacatcagcttgtaggagacagaggtatgtttctataaaacctgataaccgaaaattggccaacggaacaaatgtcctcggcttactgattgacactttattaaaggaaggctttcatttggtcagcactagaacagtatcttctgaagacaaaactgaatgctatagctttgaaaggataaaaagccctgaagtgctcatcacgaatgaaacaccaaaaccagagactatcatcataccagagcaatctcagataaagaaatgaagttgtctatcctctttta

SEQ ID NO: 333573 - DNA, 523 bp, Homo sapiens
ggggaagggacgggagggaagggggaggggaaggggaacgcgggagagggaagggggcggagctagccggagccgcgagtccattttggggctgtgcttggcgcgtaccgtgcggtccctgtagttggaggacgggcggtcgcgcggcctttcccactagccggagtagcctctagttcgttagtcaaaacgtgaaaaaaaagacctgctttgccctgggaaatagtaaccctgccaaatacatcagcttgtaggagacagaggtatgtttctataaaacctgataaccgaaaattggccaacggaacaaatgtcctcggcttactgattgacactttattaaaggaaggctttcatttggtcagcactagaacagtatcttctgaagacaaaactgaatgctatagctttgaaaggataaaaagccctgaagtgctcatcacgaatgaaacaccaaaaccagagactatcatcataccagagcaatctcagataaagaaatgaagttgtctatcctctttta

SEQ ID NO: 333574 - DNA, 2660 bp, Homo sapiens
ggggaagggacgggagggaagggggaggggaaggggaacgcgggagagggaagggggcggagctagccggagccgcgagtccattttggggctgtgcttggcgcgtaccgtgcggtccctgtagttggaggacgggcggtcgcgcggcctttcccactagccggagtagcctctagttcgttagtcaaaacgtgaaaaaaaagacctgctttgccctgggaaatagtaaccctgccaaatacatcagcttgtaggagacagaggatgtgatggagctgcttgaagaagatctcacatgccctatttgttgtagtctgtttgatgatccacgggttttgccttgctcccacaacttctgcaaaaaatgcttagaaggtatcttagaagggagtgtgcggaattccttgtggagaccagctccattcaagtgtcctacatgccgtaaggaaacttcagctactggaattaatagcctgcaggttaattactccctgaagggtattgtggaaaagtataacaagatcaagatctctcccaaaatgccagtatgcaaaggacacttggggcagcctctcaacattttctgcctgactgatatgcagctgatttgtgggatctgtgctactcgtggggagcacaccaaacatgtcttctgttctattgaagatgcctatgctcaggaaagggatgcctttgagtccctcttccagagctttgagacctggcgtcggggagatgctctttctcgcttggataccttggaaactagtaagaggaaatccctacagttactgactaaagattcagataaagtgaaggaattttttgagaagttacaacacacactggatcaaaagaagaatgaaattctgtctgactttgagaccatgaaacttgctgttatgcaagcatatgacccagagatcaacaaactcaacaccatcttgcaggagcaacggatggcctttaacattgctgaggctttcaaagatgtgtcagaacccattgtatttctgcaacagatgcaggagtttagagagaaaatcaaagtaatcaaggaaactcctttacctccctctaatttgcctgcaagccctttaatgaagaactttgataccagtcagtgggaagacataaaactagtcgatgtggataaactttctttgcctcaagacactggcacattcattagcaagattccctggagcttttataagttatttttgctaatccttctgcttggccttgtcattgtctttggtcctaccatgttcctagaatggtcattatttgatgacctggcaacttggaaaggctgtctttcaaacttcagttcctatctgactaaaacagccgatttcatagaacaatcagttttttactgggaacaggtgacagatgggtttttcattttcaatgaaagattcaagaattttactttggtggtactgaacaatgtggcagaatttgtgtgcaaatataaactattataaaatctgtttcaagtatgcagttttcttttgttagaaattgttagagaatagagagtggtaattcagatttggtcaacgattctagtcacatattttcctccaaaagtattccttccaaaaataatctatacatgttcaaattaggtagcataaagataaaagtgaaatttagtagtataggcctgaacctttttttgtttaaaagagtgcttttgaaataagcatccaccccaaatgttggttgtatttatgctgtgataaaaataggtgagagatcatatgatctaatattgtattgatggaagtataggtagtatagtagtgattgttcttcaagcatgcagtaaagatcacttttttttttttttttttttgagatggagtcttgctctgtcgcccaggctggagtgcagtggtgcaatcttggctcactgcagcctctacctcccaggttcaagtgattatcctgccttagcctcctgagtagctgggattacaggcgcgtgccaccacgcccagctaattttttgtatttttagttgagacagggtttcactgtcccttaagaccatcctgttagccaagatggtcttgatctcctgacctcgtgatccgcctgcctcggcctcccaaagtgctgggattacaggtgtgagccaccgtgcccagccaaagactgctcttaaagcacctttttgacagtgaacatggtctaaaaaagggaagatattgtagaagatttcacacacacacgcgtgtgtgggagacaactaaaggtattgaaggtactaattaattagatttccaaaattttctacagagagttaattatcaccaaaatgtgaatggtacatacaaaacctggcattttcttgtgataagtttacatttttaggagagtggagctttcaatctgcccttttctcctttgtttttgtagttttcaccaaagatgatcaactagaaatgttaagtggctatgcaagcaaaagcatagataggttaaaaaaaaggatcagctggctgggcagggtggctcatgtctataatctcagcattctaggacagtgatgtgggaggattatttgaggctaggagttccagttcgaaaccagcttcgtaaacatagcaagacccagtctctaccaaaaaaaaaaaaaaaaaaaa

SEQ ID NO: 333575 - DNA, 1428 bp, Homo sapiens
tgatttcctaagtgtggctgatggtagcctctagtttgaagtgagggaagaatgagtagtcaggaactggtcactttgaatgtgggagggaagatattcacgacaaggttttctacgataaagcagtttcctgcttctcgtttggcacgcatgttagatggcagagaccaagaattcaagatggttggtggccagatttttgtagacagagatggtgatttgtttagtttcatcttagattttttgagaactcaccagcttttattacccactgaattttcagactatcttaggcttcagagagaggctcttttctatgaacttcgttctctagttgatctcttaaacccatacctgctacagccaagacctgctcttgtggaggtacatttcctaagccggaacactcaagcttttttcagggtgtttggctcttgcagcaaaacaattgagatgctaacagggaggattacagtgtttacagaacaaccttcagcgccgacctggaatggtaactttttccctcctcagatgaccttacttccactgcctccacaaagaccttcttaccatgacctggttttccagtgtggttctgacagcactactgataaccaaactggagtcaggctggtatgcaatggcgtgatctcggctcaccacaacctccgcctctggggttcaagtgattctcctgcctcagcctcccgagtagctgggattacaggtatgtttctataaaacctgataaccgaaaattggccaacggaacaaatgtcctcggcttactgattgacactttattaaaggaaggctttcatttggtcagcactagaacagtatcttctgaagacaaaactgaatgctatagctttgaaaggataaaaagccctgaagtgctcatcacgaatgaaacaccaaaaccagagactatcatcataccagagcaatctcagataaagaaatgaagttgtctatcctcttttaaagagaaattgccatttttcttgtttcattacgtatttagggcatacatgttagccaaatctacactcagcctaactcttggcttcatctgctgccatgccgtctctgggcaaccaggccccaactgtgcttaagccataatgcctgctgctctctagacaactccatgtacttggtgctttggtatatgttctaccttcaatacatctttccctttctcttcttcatgaatgcttatgagccgagattgcgccactgcacactagcttgggtgacagaggaagactgtctcaaaaaaaaaaaaattgatcaaactgatggataccctaagtaccctgacttgatcattacaccttctatgcatgcaacaaaatgccacgtgtaccccataaatatgtagaaatattatatgtaaataaatagttgggccttccgtatttt

SEQ ID NO: 333576 - DNA, 1904 bp, Homo sapiens
cacgctgaagacattcctgtcttgtgaagcaagtctgtttgtattttaagtttgccaggactaatgaattaaaacatttggactccccacaacttgctgtttatcaatgcctctgacaggaggagggttttcttttgctcttgctttttctagaaagatgacaacatcctggctgttagagaggcaaggaaaggagagaggggttgtgaagggaagcggaagggaagggaagggaggtcccgtgggacgctggggtctggggcagagcaggtagcagcgtgctgccctgacagctgtctccgctcctcagattgtcagtggctgctatgcagcaggtgcagcctggtctctcactgagtctctactccacaaaggcaacgactggccaaggcagtggctggctctgggttacacaagtgcagacactcaactaagtgagctggaagacccaggagaaggcggaggctcaggtgcccacatgatcagcacagccagggtacctgctgacaagcctgtacgcatcgcctttagcctcaatgacgcctcagatgatacaccccctgaagactccattcctttggtctttccagaattagaccagcagctacagcccctgccgccttgtcatgactccgaggaatccatggaggtgttcaaacagcactgccaaatagcagaagaataccatgaggtcaaaaaggaaatcaccctgcttgagcaaaggaagaaggagctcattgccaagttagatcaggcagaaaaggagaaggtggatgctgctgagctggttcgggaattcgaggctctgacggaggagaatcggacgttgaggttggcccagtctcaatgtgtggaacaactggagaaacttcgaatacagtatcagaagaggcagggctcgtcctaactttaaatttttcagtgtgagcatacgaggctgatgactgccctgtgctggccaaaagatttttattttaaatgaatagtgagtcagatctattgcttctctgtattacccacatgacaactgtctataatgagtttactgcttgccagcttctagcttgagagaagggatattttaaatgagatcattaacgtgaaactattactagtatatgtttttggagatcagaattcttttccaaagatatatgtttttttcttttttaggaagatatgatcatgctgtacaacagggtagaaaatgataaaaatagactattgactgacccagctaagaatcgtgggctgagcagagttaaaccatgggacaaacccataacatgttcaccatagtttcacgtatgtgtatttttaaatttcatgcctttaatatttcaaatatgctcaaatttaaactgtcagaaacttctctgcatgtatttatatttgccagagtataaacttttatactctgatttttatccttcaatgattgattatactaagaataaatggtcacatatcctaaaagcttcttcatgaaattattagcagaaaccatgtttgtaaccaaagcacatttgccaatgctaactggctgttgtaataataaacagataaggctgcatttgcttcatgccatgtgacctcacagtaaacatctctgcctttgcctgtgtgtgttctgggggaggggggacatggaaaaatattgtttggacattacttgggtgagtgcccatgaaaacatcagtgaacttgtaactattgttttgttttggatttaaggagatgttttagatcagtaacagctaataggaatatgcgagtaaattcagaattgaaacaatttctccttgttctacctatcaccacattttctcaaattgaactctttgttatatgtccatttctattcatgtaacttctttttcattaaacatggatcaaaactgaca

SEQ ID NO: 333577 - DNA, 2102 bp, Homo sapiens
ctctccctccacacctccccgcaagctgagggagccggctccggcctcggccagcccaggaaggcgctcccacagcgcagtggtgggctgaagggctcctcaagtgccgccaaagtgggagcccaggcagaggaggcgccgagagcgagggagggctgtgaggactgccagcacgctgtcacctctcaatagcagcccaaacagattaagacatgggaggtgaaagacaacttgagtggttaaattactgtcatgcaaagcgactagatggttcagctgattgcacctttagaagttatgtggaacgaggcagcagatcttaagccccttgctctgtcacgcaggctggaatgcagtggtggaatcatggctcactacagccctgacctcctgggcccagagatggagtctcgctattttgcccaggttggtcttgaacacctggcttcaagcagtcctcctgcttttggcttcttgaagtgcttggattacagtatttcagttttatgctctgcaacaagtttggccatgttggaggacaatccaaaggtcagcaagttggctactggcgattggatgctcactctgaagccaaagtctattactgtgcccgtggaaatccccagctcccctctggctggaagacccaggagaaggcggaggctcaggtgcccacatgatcagcacagccagggtacctgctgacaagcctgtacgcatcgcctttagcctcaatgacgcctcagatgatacaccccctgaagactccattcctttggtctttccagaattagaccagcagctacagcccctgccgccttgtcatgactccgaggaatccatggaggtgttcaaacagcactgccaaatagcagaagaataccatgaggtcaaaaaggaaatcaccctgcttgagcaaaggaagaaggagctcattgccaagttagatcaggcagaaaaggagaaggtggatgctgctgagctggttcgggaattcgaggctctgacggaggagaatcggacgttgaggttggcccagtctcaatgtgtggaacaactggagaaacttcgaatacagtatcagaagaggcagggctcgtcctaactttaaatttttcagtgtgagcatacgaggctgatgactgccctgtgctggccaaaagatttttattttaaatgaatagtgagtcagatctattgcttctctgtattacccacatgacaactgtctataatgagtttactgcttgccagcttctagcttgagagaagggatattttaaatgagatcattaacgtgaaactattactagtatatgtttttggagatcagaattcttttccaaagatatatgtttttttcttttttaggaagatatgatcatgctgtacaacagggtagaaaatgataaaaatagactattgactgacccagctaagaatcgtgggctgagcagagttaaaccatgggacaaacccataacatgttcaccatagtttcacgtatgtgtatttttaaatttcatgcctttaatatttcaaatatgctcaaatttaaactgtcagaaacttctctgcatgtatttatatttgccagagtataaacttttatactctgatttttatccttcaatgattgattatactaagaataaatggtcacatatcctaaaagcttcttcatgaaattattagcagaaaccatgtttgtaaccaaagcacatttgccaatgctaactggctgttgtaataataaacagataaggctgcatttgcttcatgccatgtgacctcacagtaaacatctctgcctttgcctgtgtgtgttctgggggaggggggacatggaaaaatattgtttggacattacttgggtgagtgcccatgaaaacatcagtgaacttgtaactattgttttgttttggatttaaggagatgttttagatcagtaacagctaataggaatatgcgagtaaattcagaattgaaacaatttctccttgttctacctatcaccacattttctcaaattgaactctttgttatatgtccatttctattcatgtaacttctttttcattaaacatggatcaaaactgaca

SEQ ID NO: 333578 - DNA, 770 bp, Homo sapiens
ctctccctccacacctccccgcaagctgagggagccggctccggcctcggccagcccaggaaggcgctcccacagcgcagtggtgggctgaagggctcctcaagtgccgccaaagtgggagcccaggcagaggaggcgccgagagcgagggagggctgtgaggactgccagcacgctgtcacctctcaatagcagcccaaacagattaagacatgggaggtgaaagacaacttgagtggttaaattactgtcatgcaaagcgactagatggttcagctgattgcacctttagaagttatgtggaacgaggcagcagatcttaagccccttgctctgtcacgcaggctggaatgcagtggtggaatcatggctcactacagccctgacctcctgggcccagagatggagtctcgctattttgcccaggttggtcttgaacacctggcttcaagcagtcctcctgcttttggcttcttgaagtgcttggattacagtatttcagttttatgctctgcaacaagtttggccatgttggaggacaatccaaaggtcagcaagttggctactggcgattggatgctcactctgaagccaaagtctattactgtgcccgtggaaatccccagctcccctctggggtctcgctatgttgcccaggctggtctggaactcctgagctcaagagatcctccctcctccgcctctcaaagtgctgggattacaggcatgagccaccgtgcctggctgaaattgaattgattctatgacct

SEQ ID NO: 333579 - DNA, 1509 bp, Homo sapiens
gaaggcagccactgtttaaaagtaaacacaccacacatcaacttggggcagcttgtaagcagcttcgcaagccctgaaacttctggctggtagggatgccagctaaaccagatggcatcaaacagtgaaatacaggcctggctttcagacttgatgatacaccccctgaagactccattcctttggtctttccagaattagaccagcagctacagcccctgccgccttgtcatgactccgaggaatccatggaggtgttcaaacagcactgccaaatagcagaagaataccatgaggtcaaaaaggaaatcaccctgcttgagcaaaggaagaaggagctcattgccaagttagatcaggcagaaaaggagaaggtggatgctgctgagctggttcgggaattcgaggctctgacggaggagaatcggacgttgaggttggcccagtctcaatgtgtggaacaactggagaaacttcgaatacagtatcagaagaggcagggctcgtcctaactttaaatttttcagtgtgagcatacgaggctgatgactgccctgtgctggccaaaagatttttattttaaatgaatagtgagtcagatctattgcttctctgtattacccacatgacaactgtctataatgagtttactgcttgccagcttctagcttgagagaagggatattttaaatgagatcattaacgtgaaactattactagtatatgtttttggagatcagaattcttttccaaagatatatgtttttttcttttttaggaagatatgatcatgctgtacaacagggtagaaaatgataaaaatagactattgactgacccagctaagaatcgtgggctgagcagagttaaaccatgggacaaacccataacatgttcaccatagtttcacgtatgtgtatttttaaatttcatgcctttaatatttcaaatatgctcaaatttaaactgtcagaaacttctctgcatgtatttatatttgccagagtataaacttttatactctgatttttatccttcaatgattgattatactaagaataaatggtcacatatcctaaaagcttcttcatgaaattattagcagaaaccatgtttgtaaccaaagcacatttgccaatgctaactggctgttgtaataataaacagataaggctgcatttgcttcatgccatgtgacctcacagtaaacatctctgcctttgcctgtgtgtgttctgggggaggggggacatggaaaaatattgtttggacattacttgggtgagtgcccatgaaaacatcagtgaacttgtaactattgttttgttttggatttaaggagatgttttagatcagtaacagctaataggaatatgcgagtaaattcagaattgaaacaatttctccttgttctacctatcaccacattttctcaaattgaactctttgttatatgtccatttctattcatgtaacttctttttcattaaacatggatcaaaactgaca

SEQ ID NO: 333580 - DNA, 1520 bp, Homo sapiens
ttgtgcacctgtttggtttctggaaagtgctccctcatgttaaatttatgtagttaagttgtaaaacaggaaatcttccttgaccctttgcaggatttgtgaaaggggtggcttgtttactgagcccgcagcactcaatcccttacgggatggggaacatgcagatgatacaccccctgaagactccattcctttggtctttccagaattagaccagcagctacagcccctgccgccttgtcatgactccgaggaatccatggaggtgttcaaacagcactgccaaatagcagaagaataccatgaggtcaaaaaggaaatcaccctgcttgagcaaaggaagaaggagctcattgccaagttagatcaggcagaaaaggagaaggtggatgctgctgagctggttcgggaattcgaggctctgacggaggagaatcggacgttgaggttggcccagtctcaatgtgtggaacaactggagaaacttcgaatacagtatcagaagaggcagggctcgtcctaactttaaatttttcagtgtgagcatacgaggctgatgactgccctgtgctggccaaaagatttttattttaaatgaatagtgagtcagatctattgcttctctgtattacccacatgacaactgtctataatgagtttactgcttgccagcttctagcttgagagaagggatattttaaatgagatcattaacgtgaaactattactagtatatgtttttggagatcagaattcttttccaaagatatatgtttttttcttttttaggaagatatgatcatgctgtacaacagggtagaaaatgataaaaatagactattgactgacccagctaagaatcgtgggctgagcagagttaaaccatgggacaaacccataacatgttcaccatagtttcacgtatgtgtatttttaaatttcatgcctttaatatttcaaatatgctcaaatttaaactgtcagaaacttctctgcatgtatttatatttgccagagtataaacttttatactctgatttttatccttcaatgattgattatactaagaataaatggtcacatatcctaaaagcttcttcatgaaattattagcagaaaccatgtttgtaaccaaagcacatttgccaatgctaactggctgttgtaataataaacagataaggctgcatttgcttcatgccatgtgacctcacagtaaacatctctgcctttgcctgtgtgtgttctgggggaggggggacatggaaaaatattgtttggacattacttgggtgagtgcccatgaaaacatcagtgaacttgtaactattgttttgttttggatttaaggagatgttttagatcagtaacagctaataggaatatgcgagtaaattcagaattgaaacaatttctccttgttctacctatcaccacattttctcaaattgaactctttgttatatgtccatttctattcatgtaacttctttttcattaaacatggatcaaaactgaca

SEQ ID NO: 333581 - DNA, 1248 bp, Homo sapiens
cacgctgaagacattcctgtcttgtgaagcaagtctgtttgtattttaagtttgccaggactaatgaattaaaacatttggactccccacaacttgctgtttatcaatgcctctgacaggaggagggttttcttttgctcttgctttttctagaaagatgacaacatcctggctgttagagaggcaaggaaaggagagaggggttgtgaagggaagcggaagggaagggaagggaggtcccgtgggacgctggggtctggggcagagcaggtagcagcgtgctgccctgacagctgtctccgctcctcagattgtcagtggctgctatgcagcaggtgcagcctggtctctcactgagtctctactccacaaaggcaacgactggccaaggcagtggctggctctgggttacacaagtgcagacactcaactaagtgagctggaagacccaggagaaggcggaggctcaggtgcccacatgatcagcacagccagggtacctgctgacaagcctgtacgcatcgcctttagcctcaatgacgcctcagatgatacaccccctgaagactccattcctttggtctttccagaattagaccagcagctacagcccctgccgccttgtcatgactccgaggaatccatggaggtgttcaaacagcactgccaaatagcagaagaataccatgaggtcaaaaaggaaatcaccctgcttgagcaaaggaagaaggagctcattgccaagttagatcaggcagaaaaggagaaggtggatgctgctgagctggttcgggaattcgaggctctgacggaggagaatcggacgttgaggttggcccagtctcaatgtgtggaacaactggagaaacttcgaatacagtatcagaagaggcagggctcgtcctaactttaaatttttcagtgtgagcatacgaggctgatgactgccctgtgctggccaaaagatttttattttaaatgaatagtgagtcagatctattgcttctctgtattacttgggtgagtgcccatgaaaacatcagtgaacttgtaactattgttttgttttggatttaaggagatgttttagatcagtaacagctaataggaatatgcgagtaaattcagaattgaaacaatttctccttgttctacctatcaccacattttctcaaattgaactctttgttatatgtccatttctattcatgtaacttctttttcattaaacatggatcaaaactgaca

SEQ ID NO: 333582 - DNA, 1993 bp, Homo sapiens
ctctccctccacacctccccgcaagctgagggagccggctccggcctcggccagcccaggaaggcgctcccacagcgcagtggtgggctgaagggctcctcaagtgccgccaaagtgggagcccaggcagaggaggcgccgagagcgagggagggctgtgaggactgccagcacgctgtcacctctcaatagcagcccaaacagattaagacatgggaggtgaaagacaacttgagtggttaaattactgtcatgcaaagcgactagatggttcagctgattgcacctttagaagttatgtggaacgaggcagcagatcttaagccccttgctctgtcacgcaggctggaatgcagtggtggaatcatggctcactacagccctgacctcctgggcccagagatggagtctcgctattttgcccaggttggtcttgaacacctggcttcaagcagtcctcctgcttttggcttcttgaagtgcttggattacagtatttcagttttatgctctgcaacaagtttggccatgttggaggacaatccaaaggtcagcaagttggctactggcgattggatgctcactctgaagccaaagtctattactgtgcccgtggaaatccccagctcccctctggatgatacaccccctgaagactccattcctttggtctttccagaattagaccagcagctacagcccctgccgccttgtcatgactccgaggaatccatggaggtgttcaaacagcactgccaaatagcagaagaataccatgaggtcaaaaaggaaatcaccctgcttgagcaaaggaagaaggagctcattgccaagttagatcaggcagaaaaggagaaggtggatgctgctgagctggttcgggaattcgaggctctgacggaggagaatcggacgttgaggttggcccagtctcaatgtgtggaacaactggagaaacttcgaatacagtatcagaagaggcagggctcgtcctaactttaaatttttcagtgtgagcatacgaggctgatgactgccctgtgctggccaaaagatttttattttaaatgaatagtgagtcagatctattgcttctctgtattacccacatgacaactgtctataatgagtttactgcttgccagcttctagcttgagagaagggatattttaaatgagatcattaacgtgaaactattactagtatatgtttttggagatcagaattcttttccaaagatatatgtttttttcttttttaggaagatatgatcatgctgtacaacagggtagaaaatgataaaaatagactattgactgacccagctaagaatcgtgggctgagcagagttaaaccatgggacaaacccataacatgttcaccatagtttcacgtatgtgtatttttaaatttcatgcctttaatatttcaaatatgctcaaatttaaactgtcagaaacttctctgcatgtatttatatttgccagagtataaacttttatactctgatttttatccttcaatgattgattatactaagaataaatggtcacatatcctaaaagcttcttcatgaaattattagcagaaaccatgtttgtaaccaaagcacatttgccaatgctaactggctgttgtaataataaacagataaggctgcatttgcttcatgccatgtgacctcacagtaaacatctctgcctttgcctgtgtgtgttctgggggaggggggacatggaaaaatattgtttggacattacttgggtgagtgcccatgaaaacatcagtgaacttgtaactattgttttgttttggatttaaggagatgttttagatcagtaacagctaataggaatatgcgagtaaattcagaattgaaacaatttctccttgttctacctatcaccacattttctcaaattgaactctttgttatatgtccatttctattcatgtaacttctttttcattaaacatggatcaaaactgaca

SEQ ID NO: 333583 - DNA, 2231 bp, Homo sapiens
ctctccctccacacctccccgcaagctgagggagccggctccggcctcggccagcccaggaaggcgctcccacagcgcagtggtgggctgaagggctcctcaagtgccgccaaagtgggagcccaggcagaggaggcgccgagagcgagggagggctgtgaggactgccagcacgctgtcacctctcaatagcagcccaaacagattaagacatgggaggtgaaagacaacttgagtggttaaattactgtcatgcaaagcgactagatggttcagctgattgcacctttagaagttatgtggaacgaggcagcagatcttaagccccttgctctgtcacgcaggctggaatgcagtggtggaatcatggctcactacagccctgacctcctgggcccagagatggagtctcgctattttgcccaggttggtcttgaacacctggcttcaagcagtcctcctgcttttggcttcttgaagtgcttggattacagtatttcagttttatgctctgcaacaagtttggccatgttggaggacaatccaaaggtcagcaagttggctactggcgattggatgctcactctgaagccaaagtctattactgtgcccgtggaaatccccagctcccctctggattgtcagtggctgctatgcagcaggtgcagcctggtctctcactgagtctctactccacaaaggcaacgactggccaaggcagtggctggctctgggttacacaagtgcagacactcaactaagtgagctggaagacccaggagaaggcggaggctcaggtgcccacatgatcagcacagccagggtacctgctgacaagcctgtacgcatcgcctttagcctcaatgacgcctcagatgatacaccccctgaagactccattcctttggtctttccagaattagaccagcagctacagcccctgccgccttgtcatgactccgaggaatccatggaggtgttcaaacagcactgccaaatagcagaagaataccatgaggtcaaaaaggaaatcaccctgcttgagcaaaggaagaaggagctcattgccaagttagatcaggcagaaaaggagaaggtggatgctgctgagctggttcgggaattcgaggctctgacggaggagaatcggacgttgaggttggcccagtctcaatgtgtggaacaactggagaaacttcgaatacagtatcagaagaggcagggctcgtcctaactttaaatttttcagtgtgagcatacgaggctgatgactgccctgtgctggccaaaagatttttattttaaatgaatagtgagtcagatctattgcttctctgtattacccacatgacaactgtctataatgagtttactgcttgccagcttctagcttgagagaagggatattttaaatgagatcattaacgtgaaactattactagtatatgtttttggagatcagaattcttttccaaagatatatgtttttttcttttttaggaagatatgatcatgctgtacaacagggtagaaaatgataaaaatagactattgactgacccagctaagaatcgtgggctgagcagagttaaaccatgggacaaacccataacatgttcaccatagtttcacgtatgtgtatttttaaatttcatgcctttaatatttcaaatatgctcaaatttaaactgtcagaaacttctctgcatgtatttatatttgccagagtataaacttttatactctgatttttatccttcaatgattgattatactaagaataaatggtcacatatcctaaaagcttcttcatgaaattattagcagaaaccatgtttgtaaccaaagcacatttgccaatgctaactggctgttgtaataataaacagataaggctgcatttgcttcatgccatgtgacctcacagtaaacatctctgcctttgcctgtgtgtgttctgggggaggggggacatggaaaaatattgtttggacattacttgggtgagtgcccatgaaaacatcagtgaacttgtaactattgttttgttttggatttaaggagatgttttagatcagtaacagctaataggaatatgcgagtaaattcagaattgaaacaatttctccttgttctacctatcaccacattttctcaaattgaactctttgttatatgtccatttctattcatgtaacttctttttcattaaacatggatcaaaactgaca

SEQ ID NO: 333584 - DNA, 1572 bp, Homo sapiens
cacgctgaagacattcctgtcttgtgaagcaagtctgtttgtattttaagtttgccaggactaatgaattaaaacatttggactccccacaacttgctgtttatcaatgcctctgacaggaggagggttttcttttgctcttgctttttctagaaagatgacaacatcctggctgttagagaggcaaggaaaggagagaggggttgtgaagggaagcggaagggaagggaagggaggtcccgtgggacgctggggtctggggcagagcaggtagcagcgtgctgccctgacagctgtctccgctcctcagattgtcagtggctgctatgcagcaggtgcagcctggtctctcactgagtctctactccacaaaggcaacgactggccaaggcagtggctggctctgggttacacaagtgcagacactcaactaagtgagctggaagacccaggagaaggcggaggctcaggtgcccacatgatcagcacagccagggtacctgctgacaagcctgtacgcatcgcctttagcctcaatgacgcctcagatgatacaccccctgaagactccattcctttggtctttccagaattagaccagcagctacagcccctgccgccttgtcatgactccgaggaatccatggaggtgttcaaacagcactgccaaatagcagaagaataccatgaggtcaaaaaggaaatcaccctgcttgagcaaaggaagaaggagctcattgccaagttagatcaggcagaaaaggagaaggtggatgctgctgagctggttcgggaattcgaggctctgacggaggagaatcggacgttgaggttggcccagtctcaatgtgtggaacaactggagaaacttcgaatacagtatcagaagaggcagggctcgtcctaactttaaatttttcagtgtgagcatacgaggctgatgactgccctgtgctggccaaaagatttttattttaaatgaatagtgagtcagatctattgcttctctgtattacccacatgacaactgtctataatgagtttactgcttgccagcttctagcttgagagaagggatattttaaatgagatcattaacgtgaaactattactagtatatgtttttggagatcagaattcttttccaaagatatatgtttttttcttttttaggaagatatgatcatgctgtacaacagggtagaaaatgataaaaatagactattgactgacccagctaagaatcgtgggctgagcagagttaaaccatgggacaaacccataacatgttcaccatagtttcacgtatgtgtatttttaaatttcatgcctttaatatttcaaatatgctcaaatttaaactgtcagaaacttctctgcatgtatttatatttgccagagtataaacttttatactctgatttttatccttcaatgattgattatactaagaataaatggtcacatatcctaaaagcttcttcatgaaattattagcagaaaccatgtttgtaaccaaagcacatttgccaatgctaactggctgttgtaataataaacagataaggctgc

SEQ ID NO: 333585 - DNA, 1555 bp, Homo sapiens
gatcagcagcaacttaaccaaagctctgttacagcctgtagccaagagaaggaacctgtggttcgtttccccagacggtgtgatgaaaagctggaagacccaggagaaggcggaggctcaggtgcccacatgatcagcacagccagggtacctgctgacaagcctgtacgcatcgcctttagcctcaatgacgcctcagatgatacaccccctgaagactccattcctttggtctttccagaattagaccagcagctacagcccctgccgccttgtcatgactccgaggaatccatggaggtgttcaaacagcactgccaaatagcagaagaataccatgaggtcaaaaaggaaatcaccctgcttgagcaaaggaagaaggagctcattgccaagttagatcaggcagaaaaggagaaggtggatgctgctgagctggttcgggaattcgaggctctgacggaggagaatcggacgttgaggttggcccagtctcaatgtgtggaacaactggagaaacttcgaatacagtatcagaagaggcagggctcgtcctaactttaaatttttcagtgtgagcatacgaggctgatgactgccctgtgctggccaaaagatttttattttaaatgaatagtgagtcagatctattgcttctctgtattacccacatgacaactgtctataatgagtttactgcttgccagcttctagcttgagagaagggatattttaaatgagatcattaacgtgaaactattactagtatatgtttttggagatcagaattcttttccaaagatatatgtttttttcttttttaggaagatatgatcatgctgtacaacagggtagaaaatgataaaaatagactattgactgacccagctaagaatcgtgggctgagcagagttaaaccatgggacaaacccataacatgttcaccatagtttcacgtatgtgtatttttaaatttcatgcctttaatatttcaaatatgctcaaatttaaactgtcagaaacttctctgcatgtatttatatttgccagagtataaacttttatactctgatttttatccttcaatgattgattatactaagaataaatggtcacatatcctaaaagcttcttcatgaaattattagcagaaaccatgtttgtaaccaaagcacatttgccaatgctaactggctgttgtaataataaacagataaggctgcatttgcttcatgccatgtgacctcacagtaaacatctctgcctttgcctgtgtgtgttctgggggaggggggacatggaaaaatattgtttggacattacttgggtgagtgcccatgaaaacatcagtgaacttgtaactattgttttgttttggatttaaggagatgttttagatcagtaacagctaataggaatatgcgagtaaattcagaattgaaacaatttctccttgttctacctatcaccacattttctcaaattgaactctttgttatatgtccatttctattcatgtaacttctttttcattaaacatggatcaaaactgaca

SEQ ID NO: 333586 - DNA, 1641 bp, Homo sapiens
ctctccctccacacctccccgcaagctgagggagccggctccggcctcggccagcccaggaaggcgctcccacagcgcagtggtgggctgaagggctcctcaagtgccgccaaagtgggagcccaggcagaggaggcgccgagagcgagggagggctgtgaggactgccagcacgctgtcacctctcaatagcagcccaaacagattaagacatgggaggtgaaagacaacttgagtggttaaattactgtcatgcaaagcgactagatggttcagctgattgcacctttagaagttatgtggaacgaggcagcagatcttaagccccttgctctgtcacgcaggctggaatgcagtggtggaatcatggctcactacagccctgacctcctgggcccagagatggagtctcgctattttgcccaggttggtcttgaacacctggcttcaagcagtcctcctgcttttggcttcttgaagtgcttggattacagtatttcagttttatgctctgcaacaagtttggccatgttggaggacaatccaaaggtcagcaagttggctactggcgattggatgctcactctgaagccaaagtctattactgtgcccgtggaaatccccagctcccctctgggttgacattcgtaaccttcctggatcctatcagagaaaccttgttcatcatttcatttccaaaagatttttattttaaatgaatagtgagtcagatctattgcttctctgtattacccacatgacaactgtctataatgagtttactgcttgccagcttctagcttgagagaagggatattttaaatgagatcattaacgtgaaactattactagtatatgtttttggagatcagaattcttttccaaagatatatgtttttttcttttttaggaagatatgatcatgctgtacaacagggtagaaaatgataaaaatagactattgactgacccagctaagaatcgtgggctgagcagagttaaaccatgggacaaacccataacatgttcaccatagtttcacgtatgtgtatttttaaatttcatgcctttaatatttcaaatatgctcaaatttaaactgtcagaaacttctctgcatgtatttatatttgccagagtataaacttttatactctgatttttatccttcaatgattgattatactaagaataaatggtcacatatcctaaaagcttcttcatgaaattattagcagaaaccatgtttgtaaccaaagcacatttgccaatgctaactggctgttgtaataataaacagataaggctgcatttgcttcatgccatgtgacctcacagtaaacatctctgcctttgcctgtgtgtgttctgggggaggggggacatggaaaaatattgtttggacattacttgggtgagtgcccatgaaaacatcagtgaacttgtaactattgttttgttttggatttaaggagatgttttagatcagtaacagctaataggaatatgcgagtaaattcagaattgaaacaatttctccttgttctacctatcaccacattttctcaaattgaactctttgttatatgtccatttctattcatgtaacttctttttcattaaacatggatcaaaactgaca

SEQ ID NO: 333587 - DNA, 673 bp, Homo sapiens
tctagctgagagcgtcggtgtgggcccgaaatcccccgaatcccgtggaccctgcgaggccggggctccaggcgtcgggcacctctggacagtgtcgcggggcttgcggcgccgaagccgcgtgtctccgaacggacggtagatggcagcagaccgcataatttgggtcacagcgaactgtctaagggaggatttataaccctccaagactacaggagaaaaagacctttagtatgggtgggtttgggaaatttttcccttgagaatagtccccgagtgccgtgggtgctggcggagaactctagctacgaagcccagcggtccctccaggcgcccaggccgggcctgaacctagggcatctacctggggccacagagccgcctcttccgcgccacaagtggcagcgtcgtccctctcctagcttaggactgagataataaatatatccccacttccaaaacgccccagaccctgtaactccggggcaaccagaggcccgaggctgaatgtcctgcatctggtcttaagaaagagaaaagcaatcacatgttcgtgcaaaccagactaaaaatcacaatttctcctgccctccacagccaacatcacttatctcttggctggaagcttccccagaagctcccttaccccatttttaagtcctgcctcaagctg

SEQ ID NO: 333588 - DNA, 409 bp, Homo sapiens
aatgcgtcacactagctaatttagtagctttaggtggacacgcagacataccctacagaaatattgggttcatactccattctggtggagtcacatgtttagaagttcacatgtggtctctgttggcggcccgtcatggcaaatggtgagtgccatgtggctggggaagagatgctgctgtgttcaaggagccggcatgtgtgttgccactggagtttcgtacttgagagatgagtttgctgtttttttagaaatcagctccacaatcagagatagttttaatgcccttgaattattttgtgatttagctcgtactatttatcacatcttttggatttgaagttttaaaaaatgggcagtttgatcaagtatggtgtagatagaataaaccaaaggttccctgtgaaag

SEQ ID NO: 333589 - DNA, 820 bp, Homo sapiens
  misc_feature (774)..(774): n is a, c, g, or t
ttgcgttgttccacacaccttccatataagataataaaatcaactaggaacaagagcattgaccaagttattatcttcaactctctcaaagggtgaagagagaaaagcaacactgagtcaactggctggtttttcatccctttctcttcttcagttgtgggctggagagagatgtaattccaggacattggccagccttttgttatgtggatacgctttacacaactacagtttatccatcagaatgaaatacagacaaaagctgaggaaatcagtcttcttaatagatagaaagtgatcctttctgcctccaaataaaactgaattataacattcttcgtatttctctgggtacacatctggtttaaaaattagaagttaaattttaaaagtaggcagaagtttgtatttagagaaagacattttaactgtaatagtgatcattattttaatgcttataaagtccaatcaaagataaatgtcaaaccataactgaatatattgtgtgctgtgtgagagatgaaatacatagagaaaatccactttaaatggtaaaaaaaaagaaaaaatatattatggcttttttctagggaatattctgtaaagagaatggcaaagctgtgcattgaagagccaacttcaaaaaggtgaataaatagtggaatattaaaaggaaggaatgcgggctcattggactcataggagaagctctggaagcgattggccttaaagaggggaaatagctgatgcttggtaactgactgagctcactgnggcgcgtagatgcaatccagccgcgcccagaaccaaaagtgcataa

SEQ ID NO: 333590 - DNA, 668 bp, Homo sapiens
ttgcgttgttccacacaccttccatataagataataaaatcaactaggaacaagagcattgaccaagttattatcttcaactctctcaaagggtgaagagagaaaagcaacactgagtcaactggctggtttttcatccctttctcttcttcagttgtgggctggagagagatgtaattccaggacattggccagccttttgttatgtggatacgctttacacaactacagtttatccatcagaatgaaatacagacaaaagctgaggaaatcagtcttcttaatagatagaaagtgatcctttctgcctccaaataaaactgaattataacattcttcgtatttctctgggtacacatctggtttaaaaattagaagttaaattttaaaagtaggcagaagtttgtatttagagaaagacattttaactgtaatagtgatcattattttaatgcttataaagtccaatcaaagataaatgtcaaaccataactgaatatattgtgtgctgtgtgagagatgaaatacatagagaaaatccactttaaatggtaaaaaaaaagaaaaaatatattatggcttttttctagggaatattctgtaaagagaatggcaaagctgtgcattgaagagccaacttcaaaaaggtgaataaatagtggaatatt

SEQ ID NO: 333591 - DNA, 3367 bp, Homo sapiens
cagcagcctcctctttcctgactgtcacatttcttttccagctctgaccgggagtcagctcctcggggataccatcccccgacctcaccttctacctaccgcagcctgctagcctttccgggagaaaaggcatccttacctctggttgaaggtctcggggcctccccctctgcatccggaccctctccccatcccagcctcccatgccaaggcccgccttgtcagtcacttccttttgtcatcggcttggcaaacgggagagaaaacagagcttcatgggaaacagcggcaacagttggtcccatacacctttccccaagttggagctaggcctggggccccagcccatggcgccccgggagctccctacctgctccatctgcctggagaggttgcgcgaccccatctcgctggactgtggccacgacttctgcatacggtgcttcagcacacaccgtctcccgggctgtgagccgccctgctgtcctgagtgccggaagatatgcaagcagaagaggggcctccggagcctgggcgagaagatgaagctcctgccgcagcggccgctgccccctgcactgcaggtctggggactgggcctaatcagtcagacccaagaggagggggtggctttggccctattctagaacatcaggacacagagctccaggctgaacacattccagggtcaggagctggtcctggatgctcaggggcccctctcttctcctggcccaggagacgtgtcctgtgagggcggagccgctgctgctggttcgcatcaatgcctctgggggcctcatccttaggatgggggccatcaaccgctgcctgaagcaccctctggccagggacaccccagtctgcctcctcgctgtcctgggggagcagcactcagggaagtccttcctcctcaaccatttgcttcagggcttgccgggcctggagtctggtgagggcggccggccaagaggaggagaggcatccctgcagggctgcaggtggggcgccaatggcctcgccaggggcatatggatgtggagccaccccttcttgctggggaaagaagggaagaaggtggcggtgttcctggtggacacaggggatgccatgagccctgagctgagcagggaaacaaggatcaagctctgtgctctcaccacgatgctgagctcctaccagatcctcagcacctcccaggagctgaaggatacagacctggactatctggagatgtttgtccacgtggccgaggtgatgggcaagcattatgggatggtgccaatccagcatctggacctcttagttcgtgactcatcccaccccaacaaggcagggcaggggcatgtaggcaacatcttccagagattgtctggcagataccccaaggtgcaggagctgctgcaagggaagcgagcccgttgctgcctcttgcctgccccagggaggcggcggatgaaccaaggccatgcaagccctggtggtgacacagatgatgacttccgccaccttctgggggcctacgtctcagatgtgctgagtgcggccccccagcacgctaagagccgctgccaggggtactggaacgaggggcgcgccgtggccaggggggacagacgcctactcacggggcagcagctagctcaggaaatcaagaacctctcaggatggatggggaggacagggcccggtttcacctctccggatgagatggctgctcagctgcacgacctgaggaaggtggaagctgccaagagggagttcgaggagtatgtgaggcagcaggacgtagccaccaagcgcatattctctgcgctgcgggtcctgccagacaccatgcggaacctcctctccacccagaaagatgccattctggcccgccatggtgtggccttactctgcaaggggagagatcagaccttggaggcactggaagctgagctgcaggccacggccaaggccttcatggactcctacacgatgcgcttctgtggccacctagctgctgtggggggtgctgtgggggccgggctcatgggcctggcagggggcgtggtgggtgctggcatggcagcagctgcactggctgcagaggctgggatggtggctgctggagctgccgtgggggccacaggggccgctgtggttgggggtggcgtgggtgctgggttggctgccacagtgggctgcatggagaaggaggaggatgagaggcttctggaaggggaccgagagccccttctccaggaagagtaacagccccaggaggtattgaaggacaggagagatgtcaggtggggatgaagaagaggggcaggtcgggggagggtgatgccagggattccaaggcaccgccatgtactgcactgccctggtcgaatgctcggtgtctgggtggcagctgagctgggactcaaggtggctcttggaacctgggaggcagcatctgggggcagtggatagaacacccggcctgtttctggttgcagatggttgccgatctgcccttgtcacagataggctacatcccagggtttctggctgcaagtgagactccaccctccccacctggctcatttccccgatgaccctggattgtaggaaagttaagcaggcaccatcctggaagtctacccctaggtggtcgagagacctgttctttcacagatgtgagaagccccaggatgattgaccatggtgttcaggagcggggagcactgatgaggtgctggggatgacaggaaggaaggaacactgggcagaaccagagagatgggacatggtagactgtggcccagaccccagagcagagaaacttgttcccatgacccttcccaaatctgctccagcaggactaaggtggctttcccactcctggcccacagccccagagagcctgtctgtgcatcctgaaccactctttgctgggcctccgcaagggcctctcttgggtctgtgtcctttttcaagcctgtttagatgggggagtgcccatgccctctgtgaagtgcccaaatgcgaaagaataacaccttttcttgcattctgagctaagccagacagcctttatactagattctatcaaaatcttgcaaaggaaaacaaaatgaacaacttctacccttaaacacatcctttctcccctgggcttgtaagaagatgcagcttgatgcagctcctcaaacaccaggccccctgggaactgggggtgcgggagttctccctctgggggacagaaaatctgactactaggaagacttctaggctatgaaactgacttctaggctatgaaacttacagggtatgggtgggcacattatcctttattttatgaaaaataaaatgtgtgtatgtgaaaaaaaaaaac

SEQ ID NO: 333592 - DNA, 3213 bp, Homo sapiens
cagcagcctcctctttcctgactgtcacatttcttttccagctctgaccgggagtcagctcctcggggataccatcccccgacctcaccttctacctaccgcagcctgctagcctttccgggagaaaaggcatccttacctctggttgaaggtctcggggcctccccctctgcatccggaccctctccccatcccagcctcccatgccaaggcccgccttgtcagtcacttccttttgtcatcggcttggcaaacgggagagaaaacagagcttcatgggaaacagcggcaacagttggtcccatacacctttccccaagttggagctaggcctggggccccagcccatggcgccccgggagctccctacctgctccatctgcctggagaggttgcgcgaccccatctcgctggactgtggccacgacttctgcatacggtgcttcagcacacaccgtctcccgggctgtgagccgccctgctgtcctgagtgccggaagatatgcaagcagaagaggggcctccggagcctgggcgagaagatgaagctcctgccgcagcggccgctgccccctgcactgcaggagacgtgtcctgtgagggcggagccgctgctgctggttcgcatcaatgcctctgggggcctcatccttaggatgggggccatcaaccgctgcctgaagcaccctctggccagggacaccccagtctgcctcctcgctgtcctgggggagcagcactcagggaagtccttcctcctcaaccatttgcttcagggcttgccgggcctggagtctggtgagggcggccggccaagaggaggagaggcatccctgcagggctgcaggtggggcgccaatggcctcgccaggggcatatggatgtggagccaccccttcttgctggggaaagaagggaagaaggtggcggtgttcctggtggacacaggggatgccatgagccctgagctgagcagggaaacaaggatcaagctctgtgctctcaccacgatgctgagctcctaccagatcctcagcacctcccaggagctgaaggatacagacctggactatctggagatgtttgtccacgtggccgaggtgatgggcaagcattatgggatggtgccaatccagcatctggacctcttagttcgtgactcatcccaccccaacaaggcagggcaggggcatgtaggcaacatcttccagagattgtctggcagataccccaaggtgcaggagctgctgcaagggaagcgagcccgttgctgcctcttgcctgccccagggaggcggcggatgaaccaaggccatgcaagccctggtggtgacacagatgatgacttccgccaccttctgggggcctacgtctcagatgtgctgagtgcggccccccagcacgctaagagccgctgccaggggtactggaacgaggggcgcgccgtggccaggggggacagacgcctactcacggggcagcagctagctcaggaaatcaagaacctctcaggatggatggggaggacagggcccggtttcacctctccggatgagatggctgctcagctgcacgacctgaggaaggtggaagctgccaagagggagttcgaggagtatgtgaggcagcaggacgtagccaccaagcgcatattctctgcgctgcgggtcctgccagacaccatgcggaacctcctctccacccagaaagatgccattctggcccgccatggtgtggccttactctgcaaggggagagatcagaccttggaggcactggaagctgagctgcaggccacggccaaggccttcatggactcctacacgatgcgcttctgtggccacctagctgctgtggggggtgctgtgggggccgggctcatgggcctggcagggggcgtggtgggtgctggcatggcagcagctgcactggctgcagaggctgggatggtggctgctggagctgccgtgggggccacaggggccgctgtggttgggggtggcgtgggtgctgggttggctgccacagtgggctgcatggagaaggaggaggatgagaggcttctggaaggggaccgagagccccttctccaggaagagtaacagccccaggaggtattgaaggacaggagagatgtcaggtggggatgaagaagaggggcaggtcgggggagggtgatgccagggattccaaggcaccgccatgtactgcactgccctggtcgaatgctcggtgtctgggtggcagctgagctgggactcaaggtggctcttggaacctgggaggcagcatctgggggcagtggatagaacacccggcctgtttctggttgcagatggttgccgatctgcccttgtcacagataggctacatcccagggtttctggctgcaagtgagactccaccctccccacctggctcatttccccgatgaccctggattgtaggaaagttaagcaggcaccatcctggaagtctacccctaggtggtcgagagacctgttctttcacagatgtgagaagccccaggatgattgaccatggtgttcaggagcggggagcactgatgaggtgctggggatgacaggaaggaaggaacactgggcagaaccagagagatgggacatggtagactgtggcccagaccccagagcagagaaacttgttcccatgacccttcccaaatctgctccagcaggactaaggtggctttcccactcctggcccacagccccagagagcctgtctgtgcatcctgaaccactctttgctgggcctccgcaagggcctctcttgggtctgtgtcctttttcaagcctgtttagatgggggagtgcccatgccctctgtgaagtgcccaaatgcgaaagaataacaccttttcttgcattctgagctaagccagacagcctttatactagattctatcaaaatcttgcaaaggaaaacaaaatgaacaacttctacccttaaacacatcctttctcccctgggcttgtaagaagatgcagcttgatgcagctcctcaaacaccaggccccctgggaactgggggtgcgggagttctccctctgggggacagaaaatctgactactaggaagacttctaggctatgaaactgacttctaggctatgaaacttacagggtatgggtgggcacattatcctttattttatgaaaaataaaatgtgtgtatgtgaaaaaaaaaaac

SEQ ID NO: 333593 - DNA, 811 bp, Homo sapiens
  misc_feature (804)..(806): n is a, c, g, or t
  misc_feature (808)..(811): n is a, c, g, or t
gtgaattagccaatttgtaaatacctttttataagtgatagaaaagatgcatcttggacatggaattgttaaaccgcctctgagcagtatatgtcaggacttgttcattaggttggcagcagaggggcagaaggaagtatacagggagagatgtatgcagatgtgtccatatgtgtccatatttacattttgatgatagccattgatgtatgcatctcttttggctgtactataggaatacattaagtaattcaatggaaatataccttgctaatattataatggtatagctctgttaatgaattctcttagaaacattatacttaatgtattctgttgctgtatgtttcattttaattgagcattaagggaatgcagcatttaaatcagaactctgccaatgcttttatctagaggcgtgttgtcatttttgtcttctatgaaatttttgtcccaagaaaggtaggactacatttttttttaacagattaagttggtgtagtgtattcttgtttatcaaaatactaataaagctttgggattttgaattggtaaatattcatgatgtgtcaaaaatcatgatacatactgtacaatctcagtcccataagatgggatgttgtgcctacacacacacaggacctagaagaacatgtcaaactgtaaactgcttgtgattgtgaatgactttgttgtttgcttcttgtgattttcagtttcctataatgcacatattaacatattaactttttaaaataaaggttattttaaaagcctgtttaaaaaaaaaaatcactggaaaannnannnn

SEQ ID NO: 333594 - DNA, 473 bp, Homo sapiens
aatcaaatggagggacccaaatctgaaaagatggtaagaggaagtgatctgaattggaggaggaggatttagattagcttttgaggaaacttcctcatgcctgtgaggttcttcagggggcgactgaaggagatcagagctctcaaaggatggggcagaaaaattcaatttcagcttgaggaagaagcctatgatcagaatcagaggaagggattgggtttggacaaatcatatacactgttggcttgaaaacgttggtgtgtgcttcctgtcttgagctgtctgctaatggtacctactttttcggcatcagaacaagttgtactcctgcacaaagagatcagagaacttgttagcaatgggggagagtggctatcccattgcagaaacaagaatgcctgttagagctgaaagtagggccaggtgtctactccctgctttgctcctgagcaccttggtctatgacttgagcg

SEQ ID NO: 333595 - DNA, 467 bp, Homo sapiens
acagacttctccttagaaggactgtgccaaaacagtcctgaatgttcgtgttggccttaatgaaccaccccttagtgactcagtcaccattctccacaagccctacagccatcccggctccctctcttctagcaaataggttcggggtaaaaaagaagaaatttattaggtatgaattccctccttttcctgccacattcccttcagtatcttaggataatgtatacatttcaggcttattcaccagtttgtacttctgattacattttctcatttcatccactttcagattttccttcttattacctttcttccctcctaaacctctagcctctccccatctttccttactggcttctgtggcctacacactttttcattctgacaaccttcctctaacttcgcatctcctggtaactttattaccaaatcatgtatactcattgtgatcttccactttcctcctc

SEQ ID NO: 333596 - DNA, 402 bp, Homo sapiens
ggtgactatagtcaataagaacttaattatgcattttaaaataactaaaagagtataatttgattatctgtaatacaaaggagaaatgtgtgaggtgatggatacccccatttaccctgatgcgattattacacattgcatgcctgtatccaaatatctcacaaacctcataaatacatacacctactatgtacccaccaaaataaaacataattatattatataaagttgctaaataattagaactgtacccaaatataaataataaataattgatgaacaagataaaaagtgaaaacacacttgttttctacacgcaatgtatattcccttaataacttttggtgagtaaatagacatggcaatgtcttctttagcatcatggatagtgaaataatcttg

SEQ ID NO: 333597 - DNA, 286 bp, Homo sapiens
gaaatcagctcctatcaacaatgctgtctctccctatgcctgagacaaagggcctttatcagatggcacggtgaataggcagggccttctctcaaaactgccaagtctgtttatgtatctattatttcctttgaaaattgcctgaagtggagccttgtgaagaatttctcaagcattgcctcaaaccattgccaaggttgggttgtaatggaagtgcagaaagaacaaaggacaggcaccagaatgttcttttattgcttgcatgacaaagaggaaagaaaaagag

SEQ ID NO: 333598 - DNA, 526 bp, Homo sapiens
tgagccgagattgtgccactgcactccagcctaggcgacaaagtgagaccccaactcaaaaaaacaaaacaaaaaaatagaataaaagacgtgctgttagttatcagtagcacaggggcccggtgacaccgggcctgtatgccaggttgtaagtctaacagtcacaagaagctggaaggtgtcaatctgggcgatgactttatttatgttaaaataaattattctgactgccagccaggcacggtggctcacgcctctaatcccagtgctttgggaggctgaggcaggtggatcacctgaggtcaggagttcgagaccagcctggccagcatggtgaaactgtatgtctactaaaaataaaaaaaattagttgggcatggtgacaggtgcctataatcccagccatttgggagactgaggcaggtgaatcgcttgaactcaggaggcagaggttgcagtgagccaagagcgctccactgcattctagcctgggcgacagagtgagactccatctcaaaaaaagaca

SEQ ID NO: 333599 - DNA, 595 bp, Homo sapiens
tctactatccagcacagttctatgaattgagtaagccagacatttcaatgttcatagtttttaatgggaagctgaggcttgccccagatcaagcagcttgtaagtggtcaccccaaaacctatgcccaagcttaccacaggacttatcacactgctttgtgacaatttgagcaacctgaatttcctctacactgggagcaacttgaaggccagaactattacatgcggaggaggtaatgagcatccttagtgcccacaggggacagtaaatgttgaagtagaaggccctacagagctaggggttgaacaggggcccataaaatcacttaagggttgaaggatataacgtcaatgtccctcatggggctgaggaatctcaatgacatcaccctaattgggctggggacaaggacaacatcacacacagagctgagtgagataatgacattgctgcctacagagtgaggcaattataggtcattcatggagtcagaggaccaaatatatcacgcccacggggcagggagaacaatgacaacattacccacagaattgaagagtgacaatgacattcccacaggtgggggttgggggg

SEQ ID NO: 333600 - DNA, 363 bp, Homo sapiens
ccccagaccctgtggctctgaccttatttggaaggtctttgcttctgtaattaagtgaaggatcttgatatgagatcatcctggatttagggtgggcctaatacagtgacaagcatccagagaagaatacggggacacagagaaggccatgtgaagacacaagcagagaatggagcaatgcaactgcaagccaaggaaagtctaggactgccaggcagccaccaaaagctggaagaggcaaggaaggatccatgctagaggctctggggggaatggagccctgcaacatcttgatttcagacccctggcttcctgcactgtgcaagaatacagttaggggtactttattctgactactccata

SEQ ID NO: 333601 - DNA, 734 bp, Homo sapiens
ggccttcctgggcttgtagacatctcactccaggctcagccttcctcttcacgtggccttctctctgcatctgtgtcttctaaagatgccagttattagattctgggcccaccctaatccagtgtgtttgtatctcaatcatgaactaattgcatctataatgcccttatgtccaaataaagtcatatgctgaggttctatgtagggttaaaaaactcttccatgatacttgttaaagtacagtaaggaagagttcactgaggaccattgagataggcacagggatcacagcaataggatttgcagtgggagaaagagattgggctccactctgaacacagcccaggcaggggaggatttatagccaaagagcagggcggggtccatggatggaaaactgctaagaggaaacattagaggtaagggggattctggctaaacccacctaataggattcttgctcaaggcaggccagggtgaccagatattgctggggcatgatggagagtgaggaactccatcagacatagttgaggtggtcagatatcaaggtgtagggggcttttgttaaactgacacagcatggttctttgctaaaactggattttacaagaaagtgtacagaggggcctaggagatggttcggggacctggctaaagtttggtcaagcaaagaatctatgtcggtggacatgaatttgagagggacattacattaatccactacagggagc

SEQ ID NO: 333602 - DNA, 363 bp, Homo sapiens
gcacctgtctaaaggctggtgacgcagaagtgaatgaagcaaaattcttgcttttatggagtttggctaatagaggatgagagcagtcataacaaaccaacaaatcaataaataatttcagagggtaatagtgccgtgaagaaaaatcagctctctgtgaggagagtgactggcatagggggaaggccactttacaggaacctggcaggtagagcccctgagtgatgacatcaagctgagccctatgcgatggagccagtgagccatgcagcgatctattggagggcattttacctgcagagtccatcagagcaaaggtcaaggactcgaaagagcttggcttgttttaggaacagagagaaa

SEQ ID NO: 333603 - DNA, 1782 bp, Homo sapiens
tgccagtgataacctgagagctggcaagaaagttttaactgttacaagaactcagtttaacataaaatttaaacagtaggtcaaagcaaatattgcagtctcaatcttcagagagtcatttagtaatttgagagttgtcacaaagattctttgcttgaccaacccgtaggcaagcccttaaaccttctcctaggcctagctgtgtaaaatccaattttagcacaaaccctgtaaaaccagtttagcaagaactcttcctcattgtagaccattcccaggtgatgtctgatcaccctggcctgtcttcagcaagaatcctgttagggtttagccagagtcttccttactctggatgttattttttagtaatttcacatccactgagtgggatgaaagcaaacccaccttgctccttggctatacttgcccttgctgtttccctactgtctctccctcactgagtcgaacccagtctctctccccagctgcaacatcacattgccgtggtccctatatctattgagatgatcctgaataacgtctaccttaccatgctttaacaagtatcactgagtaattttttatttaacagttacggtgctgtgactccgataggatcagattcatcattggacccccagacctctcacccaggaccccaagtgtgcacctttgaagccattgtcttcactcctgactgatagatcggggatccaatggtgagtcagactaacgaaccattgctccggacaaacatctgttgaagctggtaaggaaagatttcgattctcaagattgtgaatatattctctggagttgggctagaggccagacttcttttgaaaggtacctcctgggcttgaaggtcttcttcctggctctctttcctgagtggggtttattccctgactccctggactaaaagtccttggaactctgtgaggctactctgttgtctctaatggatcctacttctcccatggcaatttctctggcatctgaatcccctctgtttgagcccctgctaactatattgctccaccactggttctgtccacctcctccttgttggacctttattggcctgtttggaatacttaagatctccccagactgcatcctgtaagctgtctttcttcccattgctactgctccttattcctcctcttaccacctttaatgttccttccagttcccttgagccctttgatatgactcccttcaaattcttacatcctccatccatctgtccacccactgctagactttttccttctcattctggactctttgtcactgggactgtaggccccccacccttcctggggatctctcaggggacttggggactcccaaaagtaatgacttgggttgaaaaggaaaaagaacaattggaaatagcctaagtattttatctacactcagatgggctttggagatatccagacagcccctagatgtctcttcagcctccatgagattacacatcatggcaaaataaaagtctttttttttttttgagatggagtctccctctgtcacataggctggagtgcagtggcacgatctcagctcactgcagcctctgccttccgggttcaagcagttctgcctcagcctcctgaatagctgggattacaggcacccaccaccacacccagctaatttttgtatctttagaaaagaggagtgacctcatccaatttatgttttcttaggtataatataagctggactcaaaagacctgggcccatatcctaactctaccatttattttagac

SEQ ID NO: 333604 - DNA, 388 bp, Homo sapiens
tcatcgatatagccgggtcgagtctagagaaccccccttatgttctgacccacccaagtggctacttcaatggttggttgataataactttcaacattctgtgaatgtaagctgtgcacaccctgaatggctagcagggcaaagcatcctgaatgtggatctgaaagattttgtctgtggtttgtatttttgttttaaaattttatatattacacacttataatcttaacagaattaaaaaaattaaaccagaatggttttccactaggaatttttgtaatcatacagttttaattgccattaaaaatgatcacaggcattttaatgaatgaaggcttttctcttttagagggactgttaaccttaggttaggtatttggtagtcaga

SEQ ID NO: 333605 - DNA, 4003 bp, Homo sapiens
atgtctggtcccaggtctggtgaggagaaatcccgtattttggagaacctacatctaatattactctactttcattagtccataatataatcccagaaataaatgcacaggcactccagttttaccctgctctggagagtttagacctcagctcaaatataatatcagaaatcaagacatcttcatttcctcgcatgcagcttaaatacctgaatttaagtaataacagaataaccaccttggaggctggttgcttcgataatttatcaagttccttattagtggtaaagttaaaccgtaaccgaatgagcatgattccacctaagatcttcaagctgcctcacctccaattcttggaacttaaaagaaacagaattaaaattgtggaaggtcttacattccaagggcttgactccttaagatctttgaaaatgcagcggaatggaattagcaaacttaaggatggagcattttttggcttgaataacatggaagaactagaactggaacacaacaaccttacacgagtaaacaaggggtggttgtatggcttgcgaatgttacagcagctctatgtgagccagaatgctattgaaagaatcagccctgatgcatgggagttctgccaaagactatccgaacttgatttgtcctataaccagctgacccgcctggatgaatctgcctttgtgggtctgagcttattggagagattgaatttaggagacaacagagtcactcatattgctgatggtgtatttagatttctttccaatcttcagacattagacttaagaaacaatgaaatttcatgggccatagaagatgctagtgaagcctttgctggactcacaagtctcactaaactaatcttacaaggaaaccagattaagtcaattacaaagaaagcattcattggtcttgaatcccttgagcatctagatttgaacaataatgctataatgtctatccaagaaaatgctttttctcagactcatttaaaagaactgattctgaacacaagcagtttgctctgtgactgccatttgaagtggctacttcaatggttggttgataataactttcaacattctgtgaatgtaagctgtgcacaccctgaatggctagcagggcaaagcatcctgaatgtggatctgaaagattttgtctgtgatgattttctcaagccacagataaggacacatcctgaaaccataattgctctaagaggcatgaatgtgactctgacgtgcactgcagtgagcagcagtgattcacccatgtccactgtgtggcgcaaagacagtgaaatcctgtatgacgtggatactgagaattttgttcgttattggcagcaagctggagaagctctggaatatactagtatcttacatcttttcaatgtgaatttcacagatgaaggaaaatatcagtgtattgttactaatcactttggttctaattattctcagaaagccaaactgactgtaaatgagatgccatcttttctgaaaacgccaatggatctgactattcgcactggtgccatggccagattagaatgtgctgcagagggacaccctgcacctcagatttcctggcagaaagatggtggtactgactttcctgcggctcgagaaagacgcatgcacgtcatgcccgaggatgacgtcttctttattgccaatgtgaaaatagaagatatgggaatctatagctgcatggcacaaaatacagcaggaggtctctcagcaaatgcttccctaacagtgttagagacaccctcatttattagacccctggaggataagacagtaacccgaggtgaaactgcggtgttacagtgcatagctggagggagtcctgcccctcgtctcaactggactaaagatgatgggcctttgctggtgacagaacgacatttctttgctgcagccaatcagcttctcatcattgtagatgccgggctagaagatgctgggaaatatacctgcattatgtctaacacccttgggacagaacgtggccacatttacctaaatgtcatttcatcccccaattgtgactcttcccagagtagcattgggcatgaagatgatggctggaccacagttggcattgtcatcattgttgtggtctgctgtgttgttggcacttctttgatctgggtcattgttatttaccacatgagaaggaaaaatgaagactatagtatcacaaacacagaggagctcaatctgcctgcagacattcccagctacttgtcttcccaaggaacgctgtctgagccacaggaaggctacagcaactctgaggcaggcagtcatcagcaacttatgcctcctgccaatggatatatacacaaaggcactgacggtggcactggtacccgggtgatttgctcagattgttatgacaatgccaacatctactccaggacccgagaatactgtccatacacctatattgctgaggaggacgttcttgatcagacactgtccagcctcatggtccaaatgcctaaagagacatatttagtacatcctccccaggatactactgccctagagagcctgataccgtcagccaacagagagccatctgcctttcccaccaaccatgagaggataagtgagaagaaacttccctccacacagatgagcggtgaaacattgcagcggcccgtgtggaacataaacagagaactaggcctgcctcatcctcctttttcccagcagccagtccatgagtcaccacaacttcatcaaaatgagggcctggcagggagagagccagactgttctgcttcttccatgtcctgccacaggttacaggatcatgcttttgattttagtaggactcggaacattcaagatggtagtgagggcacatgaaactcacttcaggatgaaatctgggcagagacttattaattaattttgcatttactacctcagagctcagaagaaactccgaagtcagcatttgctttactctttctttatgattgcatctgaccgcaccaaggtgggccatgcgttgtttggtcttatacctgatgaagaaatggcaacagctgacagaaatgggtacagctcatcaaaaatgtgcagcaccggcagagggaagatacggggcaaatgtgcttcctgatgcttccatggggatgtgccctggtgtgcatctgcttgtcaggaagagtcacattgctgcttaacatgctggattgccctagtcttcagaatggtcctgagaaaacatcactacttcgatgttctactttgctttccaaggagcaaaaataactttggagccttctgggaagtgtgcctgggattcttcagtggtttcaggcagatagttgagactggggctttgatattcaaggtctttggcaagaatcccaggcttgaccaactggtaccaggtcaaagatttttgtattcttgtgaatttttttttttgtccctattgcccagggatgtcattgtaaatatatgtgcatttataaataatttttgtattcattgaccatatgtgttggctgcaatgtaaatatttttgatatgccaaaattatatgtaatatccagttataatattgacaagtagcttctcagatcacagattttaaataactcaatttagtgagatctaaaaattttatttaaagtataaaaactgtggctcacacctgtaatcccagcattttgagaggctaaggtgggaggattgcttgaggccaggaatttgagaccaggctgggcaacatggtgagaccctgtgtctgcaaaaaaataaattaaaaaaataggtggacattgtggcatgctgctgtagtcctagctacttgggaggctgaggtgggagggtcacttgagcccgggaaatcaaggctgcagtgagctgtgtgaagccactgcatcccagcctgggtgacagagtgaggccctggctcaaaagtaaaataaataaataaaaagttttaaaaacttacttgttaa

SEQ ID NO: 333606 - DNA, 2701 bp, Homo sapiens
gtccgtcaggccgtgtgtcccaggccgtcgaccccgctgtcgcgctgcgtctgctccttgcatgcctttagatggtacagccttcagccggggcttcgggagacagtgcagccaccgagcatctctgctgagcttctccgccgatcctccttttctagcaggcagctcttctaggccacgtccaggtcgagggggaaaatggcgccggcgcccctaggcgtcccggaggagcagttgctggggtgtcgatctagagtgctttctcggttactcttcattgcccagaccgctctcctcctgttgcccgccgccggagcaggtctctgccccgcgccctgctcctgccgcattcctctcctggactgcagtcgcaggaaattgcccgcaccgagctggagggcgctgtcgggcttgctgccccccgacaccgctatcctggatttcagtcataatcggttgtctaactggaacatcagcttggaatcacaaacattacaggaagtgaaaatgaattacaatgaactaacagaaatcccgtattttggagaacctacatctaatattactctactttcattagtccataatataatcccagaaataaatgcacaggcactccagttttaccctgctctggagagtttagacctcagctcaaatataatatcagaaatcaagacatcttcatttcctcgcatgcagcttaaatacctgaatttaagtaataacagaataaccaccttggaggctggttgcttcgataatttatcaagttccttattagtggtaaagttaaaccgtaaccgaatgagcatgattccacctaagatcttcaagctgcctcacctccaattcttggaacttaaaagaaacagaattaaaattgtggaaggtcttacattccaagggcttgactccttaagatctttgaaaatgcagcggaatggaattagcaaacttaaggatggagcattttttggcttgaataacatggaagaactagaactggaacacaacaaccttacacgagtaaacaaggggtggttgtatggcttgcgaatgttacagcagctctatgtgagccagaatgctattgaaagaatcagccctgatgcatgggagttctgccaaagactatccgaacttgatttgtcctataaccagctgacccgcctggatgaatctgcctttgtgggtctgagcttattggagagattgaatttaggagacaacagagtcactcatattgctgatggtgtatttagatttctttccaatcttcagacattagacttaagaaacaatgaaatttcatgggccatagaagatgctagtgaagcctttgctggactcacaagtctcactaaactaatcttacaaggaaaccagattaagtcaattacaaagaaagcattcattggtcttgaatcccttgagcatctagatttgaacaataatgctataatgtctatccaagaaaatgctttttctcagactcatttaaaagaactttacggtgctgtgactccgataggatcagattcatcattggacccccagacctctcacccaggaccccaagtgtgcacctttgaagccattgtcttcactcctgactgatagatcggggatccaatggtgagtcagactaacgaaccattgctccggacaaacatctgttgaagctggtaaggaaagatttcgattctcaagattgtgaatatattctctggagttgggctagaggccagacttcttttgaaaggtacctcctgggcttgaaggtcttcttcctggctctctttcctgagtggggtttattccctgactccctggactaaaagtccttggaactctgtgaggctactctgttgtctctaatggatcctacttctcccatggcaatttctctggcatctgaatcccctctgtttgagcccctgctaactatattgctccaccactggttctgtccacctcctccttgttggacctttattggcctgtttggaatacttaagatctccccagactgcatcctgtaagctgtctttcttcccattgctactgctccttattcctcctcttaccacctttaatgttccttccagttcccttgagccctttgatatgactcccttcaaattcttacatcctccatccatctgtccacccactgctagactttttccttctcattctggactctttgtcactgggactgtaggccccccacccttcctggggatctctcaggggacttggggactcccaaaagtaatgacttgggttgaaaaggaaaaagaacaattggaaatagcctaagtattttatctacactcagatgggctttggagatatccagacagcccctagatgtctcttcagcctccatgagattacacatcatggcaaaataaaagtctttttttttttttgagatggagtctccctctgtcacataggctggagtgcagtggcacgatctcagctcactgcagcctctgccttccgggttcaagcagttctgcctcagcctcctgaatagctgggattacaggcacccaccaccacacccagctaatttttgtatctttagaaaagaggagtgacctcatccaatttatgttttcttaggtataatataagctggactcaaaagacctgggcccatatcctaactctaccatttattttagac

SEQ ID NO: 333607 - DNA, 1735 bp, Homo sapiens
gtccgtcaggccgtgtgtcccaggccgtcgaccccgctgtcgcgctgcgtctgctccttgcatgcctttagatggtacagccttcagccggggcttcgggagacagtgcagccaccgagcatctctgctgagcttctccgccgatcctccttttctagcaggcagctcttctaggccacgtccaggtcgagggggaaaatggcgccggcgcccctaggcgtcccggaggagcagttgctggggtgtcgatctagagtgctttctcggttactcttcattgcccagaccgctctcctcctgttgcccgccgccggagcaggtctctgccccgcgccctgctcctgccgcattcctctcctggactgcagtcgcaggaaattgcccgcaccgagctggagggcgctgtcgggcttgctgccccccgacaccgctatcctggatttcagtcataatcggttgtctaactggaacatcagcttggaatcacaaacattacaggaagtgaaaatgaattacaatgaactaacagaaatcccgtattttggagaacctacatctaatattactctactttcattagtccataatataatcccagaaataaatgcacaggcactccagttttaccctgctctggagagtttagacctcagctcaaatataatatcagaaatcaagacatcttcatttcctcgcatgcagcttaaatacctgaatttaagtaataacagaataaccaccttggaggctggttgcttcgataatttatcaagttccttattagtggtaaagttaaaccgtaaccgaatgagcatgattccacctaagatcttcaagctgcctcacctccaattcttggaacttaaaagaaacagaattaaaattgtggaaggtcttacattccaagggcttgactccttaagatctttgaaaatgcagcggaatggaattagcaaacttaaggatggagcattttttggcttgaataacatggaagaactagaactggaacacaacaaccttacacgagtaaacaaggggtggttgtatggcttgcgaatgttacagcagctctatgtgagccagaatgctattgaaagaatcagccctgatgcatgggagttctgccaaagactatccgaacttgatttgtcctataaccagctgacccgcctggatgaatctgcctttgtgggtctgagcttattggagagattgaatttaggagacaacagagtcactcatattgctgatggtgtatttagatttctttccaatcttcagacattagacttaagaaacaatgaaatttcatgggccatagaagatgctagtgaagcctttgctggactcacaagtctcactaaactaatcttacaaggaaaccagattaagtcaattacaaagaaagcattcattggtcttgaatcccttgagcatctagatttgaacaataatgctataatgtctatccaagaaaatgctttttctcagactcatttaaaagaactgtaagtaacttgtctttttaaaatcaccagttggatcattgttcctgcttgttgtgcttaaagtgtgatgggagtgacccaagttatttccaaaagcacacagttcaggcaggaaaaaagaaagtattaatactcagttatttaagcggctagaggtaattttaaaatagccaacattgaaaagcccagagtgtgtggcaccaagaccttctgttttgcctgtt

SEQ ID NO: 333608 - DNA, 596 bp, Homo sapiens
tttgggaggctgaagcaggcggatcacctgaggttgggagttcaaactagcctggccaacatggtgaaactcctgtctctactaaatatacaaaattagctgggcatggtggcacatgcctgtaatcccagctacttgggaggctgacgcagtagaattgtgtgaacccgggaggcggaggttgcggtgagccgagatgacgccattgcactccagcccgggcaacaagagcgaaactccatctcaaaaaaataaataaataaaataaaaaattttgtagcaacagaatcgctaaaataacaggtgacagtagacgatatatagtatgatctcagtaaataattggttaggtttgtgaagtagagggatttgaaagaccatgttctggtggtggtttttgtgtgtgtgtgtgtgtgtgtgtgtgtgtgtgtgatttcagtgtccctattcaggaatattgaacatctttatttctttgaggatttggctaaaaggatattaagttttaccagtcactactgataattcttgtctttcattctcagaaacattgcagcggcccgtgtggaacataaacagagaactaggcctgcctc

SEQ ID NO: 333609 - DNA, 4505 bp, Homo sapiens
gtccgtcaggccgtgtgtcccaggccgtcgaccccgctgtcgcgctgcgtctgctccttgcatgcctttagatggtacagccttcagccggggcttcgggagacagtgcagccaccgagcatctctgctgagcttctccgccgatcctccttttctagcaggcagctcttctaggccacgtccaggtcgagggggaaaatggcgccggcgcccctaggcgtcccggaggagcagttgctggggtgtcgatctagagtgctttctcggttactcttcattgcccagaccgctctcctcctgttgcccgccgccggagcaggtctctgccccgcgccctgctcctgccgcattcctctcctggactgcagtcgcaggaaattgcccgcaccgagctggagggcgctgtcgggcttgctgccccccgacaccgctatcctggatttcagtcataatcggttgtctaactggaacatcagcttggaatcacaaacattacaggaagtgaaaatgaattacaatgaactaacagaaatcccgtattttggagaacctacatctaatattactctactttcattagtccataatataatcccagaaataaatgcacaggcactccagttttaccctgctctggagagtttagacctcagctcaaatataatatcagaaatcaagacatcttcatttcctcgcatgcagcttaaatacctgaatttaagtaataacagaataaccaccttggaggctggttgcttcgataatttatcaagttccttattagtggtaaagttaaaccgtaaccgaatgagcatgattccacctaagatcttcaagctgcctcacctccaattcttggaacttaaaagaaacagaattaaaattgtggaaggtcttacattccaagggcttgactccttaagatctttgaaaatgcagcggaatggaattagcaaacttaaggatggagcattttttggcttgaataacatggaagaactagaactggaacacaacaaccttacacgagtaaacaaggggtggttgtatggcttgcgaatgttacagcagctctatgtgagccagaatgctattgaaagaatcagccctgatgcatgggagttctgccaaagactatccgaacttgatttgtcctataaccagctgacccgcctggatgaatctgcctttgtgggtctgagcttattggagagattgaatttaggagacaacagagtcactcatattgctgatggtgtatttagatttctttccaatcttcagacattagacttaagaaacaatgaaatttcatgggccatagaagatgctagtgaagcctttgctggactcacaagtctcactaaactaatcttacaaggaaaccagattaagtcaattacaaagaaagcattcattggtcttgaatcccttgagcatctagatttgaacaataatgctataatgtctatccaagaaaatgctttttctcagactcatttaaaagaactgattctgaacacaagcagtttgctctgtgactgccatttgaagtggctacttcaatggttggttgataataactttcaacattctgtgaatgtaagctgtgcacaccctgaatggctagcagggcaaagcatcctgaatgtggatctgaaagattttgtctgtgatgattttctcaagccacagataaggacacatcctgaaaccataattgctctaagaggcatgaatgtgactctgacgtgcactgcagtgagcagcagtgattcacccatgtccactgtgtggcgcaaagacagtgaaatcctgtatgacgtggatactgagaattttgttcgttattggcagcaagctggagaagctctggaatatactagtatcttacatcttttcaatgtgaatttcacagatgaaggaaaatatcagtgtattgttactaatcactttggttctaattattctcagaaagccaaactgactgtaaatgagatgccatcttttctgaaaacgccaatggatctgactattcgcactggtgccatggccagattagaatgtgctgcagagggacaccctgcacctcagatttcctggcagaaagatggtggtactgactttcctgcggctcgagaaagacgcatgcacgtcatgcccgaggatgacgtcttctttattgccaatgtgaaaatagaagatatgggaatctatagctgcatggcacaaaatacagcaggaggtctctcagcaaatgcttccctaacagtgttagagacaccctcatttattagacccctggaggataagacagtaacccgaggtgaaactgcggtgttacagtgcatagctggagggagtcctgcccctcgtctcaactggactaaagatgatgggcctttgctggtgacagaacgacatttctttgctgcagccaatcagcttctcatcattgtagatgccgggctagaagatgctgggaaatatacctgcattatgtctaacacccttgggacagaacgtggccacatttacctaaatgtcatttcatcccccaattgtgactcttcccagagtagcattgggcatgaagatgatggctggaccacagttggcattgtcatcattgttgtggtctgctgtgttgttggcacttctttgatctgggtcattgttatttaccacatgagaaggaaaaatgaagactatagtatcacaaacacagaggagctcaatctgcctgcagacattcccagctacttgtcttcccaaggaacgctgtctgagccacaggaaggctacagcaactctgaggcaggcagtcatcagcaacttatgcctcctgccaatggatatatacacaaaggcactgacggtggcactggtacccgggtgatttgctcagattgttatgacaatgccaacatctactccaggacccgagaatactgtccatacacctatattgctgaggaggacgttcttgatcagacactgtccagcctcatggtccaaatgcctaaagagacatatttagtacatcctccccaggatactactgccctagagagcctgataccgtcagccaacagagagccatctgcctttcccaccaaccatgagaggataagtgagaagaaacttccctccacacagatgagcggtgaaacattgcagcggcccgtgtggaacataaacagagaactaggcctgcctcatcctcctttttcccagcagccagtccatgagtcaccacaacttcatcaaaatgagggcctggcagggagagagccagactgttctgcttcttccatgtcctgccacaggttacaggatcatgcttttgattttagtaggactcggaacattcaagatggtagtgagggcacatgaaactcacttcaggatgaaatctgggcagagacttattaattaattttgcatttactacctcagagctcagaagaaactccgaagtcagcatttgctttactctttctttatgattgcatctgaccgcaccaaggtgggccatgcgttgtttggtcttatacctgatgaagaaatggcaacagctgacagaaatgggtacagctcatcaaaaatgtgcagcaccggcagagggaagatacggggcaaatgtgcttcctgatgcttccatggggatgtgccctggtgtgcatctgcttgtcaggaagagtcacattgctgcttaacatgctggattgccctagtcttcagaatggtcctgagaaaacatcactacttcgatgttctactttgctttccaaggagcaaaaataactttggagccttctgggaagtgtgcctgggattcttcagtggtttcaggcagatagttgagactggggctttgatattcaaggtctttggcaagaatcccaggcttgaccaactggtaccaggtcaaagatttttgtattcttgtgaatttttttttttgtccctattgcccagggatgtcattgtaaatatatgtgcatttataaataatttttgtattcattgaccatatgtgttggctgcaatgtaaatatttttgatatgccaaaattatatgtaatatccagttataatattgacaagtagcttctcagatcacagattttaaataactcaatttagtgagatctaaaaattttatttaaagtataaaaactgtggctcacacctgtaatcccagcattttgagaggctaaggtgggaggattgcttgaggccaggaatttgagaccaggctgggcaacatggtgagaccctgtgtctgcaaaaaaataaattaaaaaaataggtggacattgtggcatgctgctgtagtcctagctacttgggaggctgaggtgggagggtcacttgagcccgggaaatcaaggctgcagtgagctgtgtgaagccactgcatcccagcctgggtgacagagtgaggccctggctcaaaagtaaaataaataaataaaaagttttaaaaacttacttgttaa

SEQ ID NO: 333610 - DNA, 3713 bp, Homo sapiens
tgccagtgataacctgagagctggcaagaaagttttaactgttacaagaactcagtttaacataaaatttaaacagtaggtcaaagcaaatattgcagtctcaatcttcagagagtcatttagtaatttgagagttgtcacaaagattctttgcttgaccaacccgtaggcaagcccttaaaccttctcctaggcctagctgtgtaaaatccaattttagcacaaaccctgtaaaaccagtttagcaagaactcttcctcattgtagaccattcccaggtgatgtctgatcaccctggcctgtcttcagcaagaatcctgttagggtttagccagagtcttccttactctggatgttattttttagtaatttcacatccactgagtgggatgaaagcaaacccaccttgctccttggctatacttgcccttgctgtttccctactgtctctccctcactgagtcgaacccagtctctctccccagctgcaacatcacattgccgtggtccctatatctattgagatgatcctgaataacgtctaccttaccatgctttaacaagtatcactgagtaattttttatttaacagttacggtgctgtgactccgataggatcagattcatcattggacccccagacctctcacccaggaccccaagtgtgcacctttgaagccattgtcttcactcctgactgatagatcggggatccaatggattctgaacacaagcagtttgctctgtgactgccatttgaagtggctacttcaatggttggttgataataactttcaacattctgtgaatgtaagctgtgcacaccctgaatggctagcagggcaaagcatcctgaatgtggatctgaaagattttgtctgtgatgattttctcaagccacagataaggacacatcctgaaaccataattgctctaagaggcatgaatgtgactctgacgtgcactgcagtgagcagcagtgattcacccatgtccactgtgtggcgcaaagacagtgaaatcctgtatgacgtggatactgagaattttgttcgttattggcagcaagctggagaagctctggaatatactagtatcttacatcttttcaatgtgaatttcacagatgaaggaaaatatcagtgtattgttactaatcactttggttctaattattctcagaaagccaaactgactgtaaatgagatgccatcttttctgaaaacgccaatggatctgactattcgcactggtgccatggccagattagaatgtgctgcagagggacaccctgcacctcagatttcctggcagaaagatggtggtactgactttcctgcggctcgagaaagacgcatgcacgtcatgcccgaggatgacgtcttctttattgccaatgtgaaaatagaagatatgggaatctatagctgcatggcacaaaatacagcaggaggtctctcagcaaatgcttccctaacagtgttagagacaccctcatttattagacccctggaggataagacagtaacccgaggtgaaactgcggtgttacagtgcatagctggagggagtcctgcccctcgtctcaactggactaaagatgatgggcctttgctggtgacagaacgacatttctttgctgcagccaatcagcttctcatcattgtagatgccgggctagaagatgctgggaaatatacctgcattatgtctaacacccttgggacagaacgtggccacatttacctaaatgtcatttcatcccccaattgtgactcttcccagagtagcattgggcatgaagatgatggctggaccacagttggcattgtcatcattgttgtggtctgctgtgttgttggcacttctttgatctgggtcattgttatttaccacatgagaaggaaaaatgaagactatagtatcacaaacacagaggagctcaatctgcctgcagacattcccagctacttgtcttcccaaggaacgctgtctgagccacaggaaggctacagcaactctgaggcaggcagtcatcagcaacttatgcctcctgccaatggatatatacacaaaggcactgacggtggcactggtacccgggtgatttgctcagattgttatgacaatgccaacatctactccaggacccgagaatactgtccatacacctatattgctgaggaggacgttcttgatcagacactgtccagcctcatggtccaaatgcctaaagagacatatttagtacatcctccccaggatactactgccctagagagcctgataccgtcagccaacagagagccatctgcctttcccaccaaccatgagaggataagtgagaagaaacttccctccacacagatgagcggtgaaacattgcagcggcccgtgtggaacataaacagagaactaggcctgcctcatcctcctttttcccagcagccagtccatgagtcaccacaacttcatcaaaatgagggcctggcagggagagagccagactgttctgcttcttccatgtcctgccacaggttacaggatcatgcttttgattttagtaggactcggaacattcaagatggtagtgagggcacatgaaactcacttcaggatgaaatctgggcagagacttattaattaattttgcatttactacctcagagctcagaagaaactccgaagtcagcatttgctttactctttctttatgattgcatctgaccgcaccaaggtgggccatgcgttgtttggtcttatacctgatgaagaaatggcaacagctgacagaaatgggtacagctcatcaaaaatgtgcagcaccggcagagggaagatacggggcaaatgtgcttcctgatgcttccatggggatgtgccctggtgtgcatctgcttgtcaggaagagtcacattgctgcttaacatgctggattgccctagtcttcagaatggtcctgagaaaacatcactacttcgatgttctactttgctttccaaggagcaaaaataactttggagccttctgggaagtgtgcctgggattcttcagtggtttcaggcagatagttgagactggggctttgatattcaaggtctttggcaagaatcccaggcttgaccaactggtaccaggtcaaagatttttgtattcttgtgaatttttttttttgtccctattgcccagggatgtcattgtaaatatatgtgcatttataaataatttttgtattcattgaccatatgtgttggctgcaatgtaaatatttttgatatgccaaaattatatgtaatatccagttataatattgacaagtagcttctcagatcacagattttaaataactcaatttagtgagatctaaaaattttatttaaagtataaaaactgtggctcacacctgtaatcccagcattttgagaggctaaggtgggaggattgcttgaggccaggaatttgagaccaggctgggcaacatggtgagaccctgtgtctgcaaaaaaataaattaaaaaaataggtggacattgtggcatgctgctgtagtcctagctacttgggaggctgaggtgggagggtcacttgagcccgggaaatcaaggctgcagtgagctgtgtgaagccactgcatcccagcctgggtgacagagtgaggccctggctcaaaagtaaaataaataaataaaaagttttaaaaacttacttgttaa

SEQ ID NO: 333611 - DNA, 2011 bp, Homo sapiens
gtccgtcaggccgtgtgtcccaggccgtcgaccccgctgtcgcgctgcgtctgctccttgcatgcctttagatggtacagccttcagccggggcttcgggagacagtgcagccaccgagcatctctgctgagcttctccgccgatcctccttttctagcaggcagctcttctaggccacgtccaggtcgagggggaaaatggcgccggcgcccctaggcgtcccggaggagcagttgctggggtgtcgatctagagtgctttctcggttactcttcattgcccagaccgctctcctcctgttgcccgccgccggagcaggtctctgccccgcgccctgctcctgccgcattcctctcctggactgcagtcgcaggaaattgcccgcaccgagctggagggcgctgtcgggcttgctgccccccgacaccgctatcctggatttcagtcataatcggttgtctaactggaacatcagcttggaatcacaaacattacaggaagtgaaaatgaattacaatgaactaacagaaatcccgtattttggagaacctacatctaatattactctactttcattagtccataatataatcccagaaataaatgcacaggcactccagttttaccctgctctggagagtttagacctcagctcaaatataatatcagaaatcaagacatcttcatttcctcgcatgcagcttaaatacctgaatttaagtaataacagaataaccaccttggaggctggttgcttcgataatttatcaagttccttattagtggtaaagttaaaccgtaaccgaatgagcatgattccacctaagatcttcaagctgcctcacctccaattcttggaacttaaaagaaacagaattaaaattgtggaaggtcttacattccaagggcttgactccttaagatctttgaaaatgcagcggaatggaattagcaaacttaaggatggagcattttttggcttgaataacatggaagaactagaactggaacacaacaaccttacacgagtaaacaaggggtggttgtatggcttgcgaatgttacagcagctctatgtgagccagaatgctattgaaagaatcagccctgatgcatgggagttctgccaaagactatccgaacttgatttgtcctataaccagctgacccgcctggatgaatctgcctttgtgggtctgagcttattggagagattgaatttaggagacaacagagtcactcatattgctgatggtgtatttagatttctttccaatcttcagacattagacttaagaaacaatgaaatttcatgggccatagaagatgctagtgaagcctttgctggactcacaagtctcactaaactaatcttacaaggaaaccagattaagtcaattacaaagaaagcattcattggtcttgaatcccttgagcatctagatttgaacaataatgctataatgtctatccaagaaaatgctttttctcagactcatttaaaagaactttacggtgctgtgactccgataggatcagattcatcattggacccccagacctctcacccaggaccccaagtgtgcacctttgaagccattgtcttcactcctgactgatagatcggggatccaatggattctgaacacaagcagtttgctctgtgactgccatttgaagtggctacttcaatggttggttgataataactttcaacattctgtgaatgtaagctgtgcacaccctgaatggctagcagggcaaagcatcctgaatgtggatctgaaagattttgtctgtggtttgtatttttgttttaaaattttatatattacacacttataatcttaacagaattaaaaaaattaaaccagaatggttttccactaggaatttttgtaatcatacagttttaattgccattaaaaatgatcacaggcattttaatgaatgaaggcttttctcttttagagggactgttaaccttaggttaggtatttggtagtcaga

SEQ ID NO: 333612 - DNA, 158 bp, Homo sapiens
atatattaccaaatataagtggtaatgtgtgtgtatattatatatatgcatatcatataagctgtgaatatgtctagcataaaaattaaattcaggcagtgtaatacctataataggaattaactagctacttgtaactagccactttcctcattttt

SEQ ID NO: 333613 - DNA, 440 bp, Homo sapiens
atcccagtctactacagcttgcaagtagcagtgctcactgccactcttcagaaggaactcatgctgacaggagcatcagcgtcacacacaacctccaaggggggcatggcagggactagagggctcacacttgctcttagctatctctgaccaaaagtgacacacatcactaccaggagacaattcacccccaggtctcttgcatttttccacttcttgtgagcaagacactgattgttctttgctctgaactaccttttcaaagatgcttgtacagtaaatggccttggtagagtgtctccctccagatcaaagggcaggtgcgattactgcacagtataaaaagactcaggttctctaaactcagagctcctctcctataatgcaacccattatgtgtgcaggtatcatgtctctttgcattgccctagaggaatctg

SEQ ID NO: 333614 - DNA, 95 bp, Homo sapiens
gcgcaaatactctcaacaaaatatcgacaaattcaatccagcagtgcacaaaaagaattacagaccctacccacgcaggatttgtctcagacatc

SEQ ID NO: 333615 - DNA, 2355 bp, Homo sapiens
tgcctttcctttgccaccctctccctgttttacatggaaattgcacgggcctctctgtgtttgcgtgcatgtgtgcgcctgtatatacatgtatagagagatatatttgtgggggccggggggagcggggagggggtggagtgaagctcagggcttgcagccaggacactgcccactggagcctgtcatctgccccttccgtgttggtgagattaagggaagaaggtgggagggcattagtcaagctggactgccccagtctttgactggttaccctcctctctgcaggtaggtttttctggatgataggacagatgatggattctccaccaccattttccttgtactcttctctccacccttcttagggctggaggatggcatttatctctagatgactgttcccaaggagatgccactctgctctgccttactgttgggaaggagagaggaacccactcactcttatcagcttagagtgttcaactgatccttccccaccatcttcagatctgttcctctggagcttgactggggggtggggatggcaagtccatggtgtgtgttagggacccagggcattgggggaagggaggcgaaggcctgaggttttccatcttcattctcttttgttattaggagaaggtgaggcatgggccaatcccattcctgccttccagtgccccaccacccttctgatcttaggggttggatgggtcatctgtccttggtcagaattttctcaccctagtactcctactggcctgaccagggctgactgggtattctaatgaggagctgggaagtggggtgacatagctgaccttagtatcaacccccctcttctccaactcttgttttctagtccaggatatgctaaaggacgaagattttctattgtttccaggccctcagaccatccttgctgtcccttcaccctccatgcccctgccatcctcactcacttctcataaatggatctgggggttagagtggaggaaataaaatcctgaagtggttgtcagtgcttgtgggatgcagtggtcttcaggattctccccgcattattatgtagttgttcagaagctgttgctactgcgtctctctgtctgcagggggcacttgttcctgaggtcctcgcctgggtcctgacttctgtagtttctgtgaagacgtggctgtcctgtgggctcctgtgtgtgctggctgcgccctgagctccgagacagctgcccataacctgctaaggtcagggcccaggtgccccccacagcatggctgagggaccccttcccagtagggctgtcccaagccccactccatggggccaggtttcctggcacttttgttgatagcagatggatcaatattagtaaccccatccaagattgaactgtgaaagagaggttccaggggtatctccctcagtgccagttacttagtgatgtgttacccaggatgcagcaggtgtgtgcaggtatcttgctctctaggcctgtgtgtgtgtgtgagtgtgtgtgtatatgggtgtgggtgtgtttgtgtgtggtggttgtggggggggtgttggaggttctatttcatttaaaaatgtattcatttccctggccccacagatgcttccctccatactttttatttgctctgtttcctcagatttattttgtcttgccccattgcctctccttccttgaactctttccttttcaatctcaactcattcactgctgttgctcatttgcccttttccatgtattttttcctacttaggattttccactctatctttgtggttcatgaggactttgcctcttctcctgcctcattccctgactttctctagttagatgtcagtcctaaataggttttcctcacttcaggcctcacccctcaccttgtttttttgggggctccagggaccaatctggggctggaaatgttaggaggttgccttggtgctgccccagatctgtccagcagggggcagtaagtgatcttggtagtatccctggctgctaagccttggcaggggtggtcctttctacattcccattcacttaacagctcttttgggattgggtgtttcattccatttctgcccactccctctcctctcctctctggtaggtttaattttatgctttccctgattccagctttctgcttcctgaggactcccgctccccccaccccaaagtttgtctgtggtgttatagtggtaactgcagttcctcctctggaatgtagactgtatatgtttaataactcaccttctctatccttgctcaaaatgtgggataacgcgatgactgtgaccctggttggaaattaaacttgttttatgcaaaattggag

SEQ ID NO: 333616 - DNA, 2014 bp, Homo sapiens
tgcctttcctttgccaccctctccctgttttacatggaaattgcacgggcctctctgtgtttgcgtgcatgtgtgcgcctgtatatacatgtatagagagatatatttgtgggggccggggggagcggggagggggtggagtgaagctcagggcttgcagccaggacactgcccactggagcctgtcatctgccccttccgtgttggtgagattaagggaagaaggtgggagggcattagtcaagctggactgccccagtctttgactggttaccctcctctctgcaggtaggtttttctggatgataggacagatgatggattctccaccaccattttccttgtactcttctctccacccttcttagggctggaggatggcatttatctctagatgactgttcccaaggagatgccactctgctctgccttactgttgggaaggagagaggaacccactcactcttatcagcttagagtgttcaactgatccttccccaccatcttcagatctgttcctctggagcttgactggggggtggggatggcaagtccatggtgtgtgttagggacccagggcattgggggaagggaggcgaaggcctgaggttttccatcttcattctcttttgttattaggagaaggtgaggcatgggccaatcccattcctgccttccagtgccccaccacccttctgatcttaggggttggatgggtcatctgtccttggtcagaattttctcaccctagtactcctactggcctgaccagggctgactgggtattctaatgaggagctgggaagtggggtgacatagctgaccttagtatcaacccccctcttctccaactcttgttttctagtccaggatatgctaaaggacgaagattttctattgtttccaggccctcagaccatccttgctgtcccttcaccctccatgcccctgccatcctcactcacttctcataaatggatctgggggttagagtggaggaaataaaatcctgaagtggttgtcagtgcttgtgggatgcagtggtcttcaggattctccccgcattattatgtagttgttcagaagctgttgctactgcgtctctctgtctgcagggggcacttgttcctgaggtcctcgcctgggtcctgacttctgtagtttctgtgaagacgtggctgtcctgtgggctcctgtgtgtgctggctgcgccctgagctccgagacagctgcccataacctgctaaggtcagggcccaggtgccccccacagcatggctgagggaccccttcccagtagggctgtcccaagccccactccatggggccaggtttcctggcacttttgttgatagcagatggatcaatattagtaaccccatccaagattgaactgtgaaagagaggttccaggggtatctccctcagtgccagttacttagtgatgtgttacccaggatgcagcaggtgtgtgcaggtatcttgctctctaggcctgtgtgtgtgtgtgagtgtgtgtgtatatgggtgtgggtgtgtttgtgtgtggtggttgtggggggggtgttggaggttctatttcatttaaaaatgtattcatttccctggccccacagatgcttccctccatactttttatttgctctgtttcctcagatttattttgtcttgccccattgcctctccttccttgaactctttccttttcaatctcaactcattcactgctgttgctcatttgcccttttccatgtattttttcctacttaggattttccactctatctttgtggttcatgaggactttgcctcttctcctgcctcattccctgactctaggtttagtttgctcttctttttccacgggtcttaaggtgtaaagtgaggttagtgcttcggtctttcttttcttttttttttttttttttgagatggagtctcgctctgctgcccaggctggagtgcagtggtgcactcttggctccctgcaagctctccctcccaggttcacgcc

SEQ ID NO: 333617 - DNA, 450 bp, Homo sapiens
  misc_feature (345)..(345): n is a, c, g, or t
  misc_feature (380)..(380): n is a, c, g, or t
  misc_feature (397)..(397): n is a, c, g, or t
  misc_feature (407)..(407): n is a, c, g, or t
  misc_feature (434)..(434): n is a, c, g, or t
  misc_feature (439)..(439): n is a, c, g, or t
gccgagaaggtgccactgcactccagcctgggcgacagagtgagacttggtctcaataaataaataaataaataaatgtaacatacacttaccacatgacccagcaatcccatttttaggtgtttaaccaggagaaatgaaaatttgtattcaaacaaaagtcggttcacaaatatttatggtcagtttatttataattgccccaaagtacaaacaagtcaaatgcacttcaactacagaatggataaattggtacatccatacagtagactactattcagcagttaaaaaaaaagccgttgagatactcaacaacatgaatgaatctcaaagggcctttatgcntaggtggggagggagggacaggacttccaaatggntttgttgcttccctggntttaccgggnggtgttgagggttgggggggttaggtntttgncttccattggg

SEQ ID NO: 333618 - DNA, 1359 bp, Homo sapiens
gccgagaaggtgccactgcactccagcctgggcgacagagtgagacttggtctcaataaataaataaataaataaatgtaacatacacttaccacatgacccagcaatcccatttttaggtgtttaaccaggagaaatgaaaatttgtattcaaacaaaagtcggttcacaaatatttatggtcagtttatttataattgccccaaagtacaaacaagtcaaatgcacttcaactacagaatggataaattggtacatccatacagtagactactattcagcagttaaaaaaaaagccgttgagatactcaacaacatgaatgaatctcaaaggcattatgctaagtggaagaagacagactcaaaatgctatgtgctccatgattacaggagatgtgaggtgggggtaagacttgactacaatagggcagtgtgcaattttggggaatgatggaacccttttatatcttgattgtgatgatgtctacctaaaggtatgcattctgccagactcacaaaactgtacacaaagactagtcaatttcactgtatgcaaattgtagctcaataaaccagactggaaaagttgaaccataaacattttatataactggtatcatattgtatgtatccttctgcaacctgctttttttgctcactactaatgacttttgaggtttatccaagttgatactacgtagactataatgatatatgtagcttttctttctttattttaactgctacaacatattccattatacattatactttgtttatccagtctcctgttggtgaacatttactttgtttctgtttttttctcttgttttaaacaatgttgcaataaacattcctgtaaatgtattctatagcactagtgctggaatctctctgcaagatatttacgtagaatagtatgtggaatggttgggataagagggtggtgaatatctctgttttgctctccaagggcttataccaactgacactctaccagcatgtgtcagaatctcctttttctacacacccatcaataattgggattatcagactttagcttttgcttagctgataaatgtaaaatgatatattgttgctgctttatttttacaatttctctgattgtcattgtggttgaacatctattcatgtttgtgggtcatttgggttttccttctgtgaattgcctgttcatattctttgcctgtttttttttttttttttaattgtcttcccttccattcccttccccttccccttcctctcccccttcccctccttttcaaataaattgtgcatcaggatgtagagagagtggaagagggagttcagaggcaccaggtgaccaaacgtaag

SEQ ID NO: 333619 - DNA, 93 bp, Homo sapiens
agacagatttataaatgacaggcaacagtcttagtttctttccctacccttttctattcctgttgaggcattgacttttacttgttttgtttt

SEQ ID NO: 333620 - DNA, 411 bp, Homo sapiens
tctatggttatcttgttccacgagaactacaagtcttctggtctacttaggatgatagtcatatttgtatgttacgttaaaaaattggtcacatttgtaagtgattttagagagacaacattattaaatgaattatttcaaaaagatacttaagttggtgaaggttcatctctaaaattcaaacatgctactttaattggcctcataagatatttatttaaaatatatttattgagtactcactaaatgacagtgttcttttttacttttcttttccatcatcatttctcatcaattgcataaaaacaaattttcaagtaagaaagagtaaggaaaaaaatatgattaaaattaggatttctttttattttattttaagttctgggatacatgtgcaggacatgcaagttt

SEQ ID NO: 333621 - DNA, 306 bp, Homo sapiens
ccacaacaactgatccagaggtgagcatgtgacctaaggtgatcaaaacttaggatctcagatcttttactggaatgttagagaaaagactctcctactggccatatgttagggaatatacagctttggaaactactgctaagcatctagggatcataaagacagcaagccttaaaataatggcaacagaacagaagccagagtaagtggaggaaaagcaatcaaatttttgatgacactgttgagccactggatcaattcttatctgaagccaactctacttgctactgaaagcattctaagaga

SEQ ID NO: 333622 - DNA, 630 bp, Homo sapiens
gttactagaagggctccaggatggaggccggcctgacttctccgcctcggtgggctgggtcggcggctggagcattacccctactgcgggtcccgctgctggcagcgctggaaactgggtggacggcatgggttggtctcaggatttgttccgcgccttgtggagatcgctgtcaaggacaaactattcgagagaaaagaattgtagaagcagcaaataaaaaagaagtagactatgaagcaggggatattccaacagaatgggaagcttggattagaagaacaagaaagactccacctactatggaggaaatactaaagaatgaaaaacacagagaagaaatcaaaataaaaagccaagatttttatgaaaaagaaaaactccttagtaaagagaccagtgaggaactcctgcctccaccagttcaaactcaaattaaaggccatgcctctgctccatactttggaaaggaagaaccctcagtggctcccagcagcactggtaaaacctttcagccaggatcctggatgccacgagatggcaagagccacaatcaatgaatgcattatggtcaaatcttttcatgtatatggatgtgactattttaacaaataaaagaagtgaaaagtt

SEQ ID NO: 333623 - DNA, 702 bp, Homo sapiens
attatggccaaagtctaaatttgaatactgtgctgactgacccttttctactctattgttgcgcaaatgatactcttcaaggaaggattatggcagcctgagaaatcaggaaagcatggcttggaactggccaaaacaaaatccagcaagatctctttgaaggacaaactattcgagagaaaagaattgtagaagcagcaaataaaaaagaagtagactatgaagcaggggatattccaacagaatgggaagtttcttacagattctggatattatactttgatgtcttacatttaagtctttaaaccatcttgagttcatttttgtatacggcgaaagcttggattagaagaacaagaaagactccacctactatggaggaaatactaaagaatgaaaaacacagagaagaaatcaaaataaaaagccaagatttttatgaaaaagaaaaactccttagtaaagagaccagtgaggaactcctgcctccaccagttcaaactcaaattaaaggccatgcctctgctccatactttggaaaggaagaaccctcagtggctcccagcagcactggtaaaacctttcagccaggatcctggatgccacgagatggcaagagccacaatcaatgaatgcattatggtcaaatcttttcatgtatatggatgtgactattttaacaaataaaagaagtgaaaagtt

SEQ ID NO: 333624 - DNA, 389 bp, Homo sapiens
  misc_feature (64)..(64): n is a, c, g, or t
ggggcacagcgcgaacatatttataacacataccatcacagttgtcgccttctggcaataactnagcgaaatactaaagaatgaaaaacacagagaagaaatcaaaataaaaagccaagatttttatgaaaaagaaaaactccttagtaaagagaccagtgaggaactcctgcctccaccagttcaaactcaaattaaaggccatgcctctgctccatactttggaaaggaagaaccctcagtggctcccagcagcactggtaaaacctttcagccaggatcctggatgccacgagatggcaagagccacaatcaatgaatgcattatggtcaaatcttttcatgtatatggatgtgactattttaacaaataaaagaagtgaaaagtt

SEQ ID NO: 333625 - DNA, 395 bp, Homo sapiens
  misc_feature (56)..(56): n is a, c, g, or t
  misc_feature (58)..(58): n is a, c, g, or t
  misc_feature (61)..(61): n is a, c, g, or t
  misc_feature (71)..(71): n is a, c, g, or t
atttaatgtaatataacttatttatgtttataccaaccaagttgaattaatggctngngcnctccctcggngcgaaatactaaagaatgaaaaacacagagaagaaatcaaaataaaaagccaagatttttatgaaaaagaaaaactccttagtaaagagaccagtgaggaactcctgcctccaccagttcaaactcaaattaaaggccatgcctctgctccatactttggaaaggaagaaccctcagtggctcccagcagcactggtaaaacctttcagccaggatcctggatgccacgagatggcaagagccacaatcaatgaatgcattatggtcaaatcttttcatgtatatggatgtgactattttaacaaataaaagaagtgaaaagtt

SEQ ID NO: 333626 - DNA, 385 bp, Homo sapiens
tcctctaccaccgacatagtgccggaaagttaaagaagtccccacccctttggtaataccaacgaaatactaaagaatgaaaaacacagagaagaaatcaaaataaaaagccaagatttttatgaaaaagaaaaactccttagtaaagagaccagtgaggaactcctgcctccaccagttcaaactcaaattaaaggccatgcctctgctccatactttggaaaggaagaaccctcagtggctcccagcagcactggtaaaacctttcagccaggatcctggatgccacgagatggcaagagccacaatcaatgaatgcattatggtcaaatcttttcatgtatatggatgtgactattttaacaaataaaagaagtgaaaagtt

SEQ ID NO: 333627 - DNA, 380 bp, Homo sapiens
ttggttttcggccgccccccgggccggttcgaaaaaagagagagggttttggggcggggaaatactaaagaatgaaaaacacagagaagaaatcaaaataaaaagccaagatttttatgaaaaagaaaaactccttagtaaagagaccagtgaggaactcctgcctccaccagttcaaactcaaattaaaggccatgcctctgctccatactttggaaaggaagaaccctcagtggctcccagcagcactggtaaaacctttcagccaggatcctggatgccacgagatggcaagagccacaatcaatgaatgcattatggtcaaatcttttcatgtatatggatgtgactattttaacaaataaaagaagtgaaaagtt

SEQ ID NO: 333628 - DNA, 379 bp, Homo sapiens
cacgcgaccggaaccaacgcgccacacgcgcaagacacacgcgcccggcgcgcctaggaaatactaaagaatgaaaaacacagagaagaaatcaaaataaaaagccaagatttttatgaaaaagaaaaactccttagtaaagagaccagtgaggaactcctgcctccaccagttcaaactcaaattaaaggccatgcctctgctccatactttggaaaggaagaaccctcagtggctcccagcagcactggtaaaacctttcagccaggatcctggatgccacgagatggcaagagccacaatcaatgaatgcattatggtcaaatcttttcatgtatatggatgtgactattttaacaaataaaagaagtgaaaagtt

SEQ ID NO: 333629 - DNA, 382 bp, Homo sapiens
  misc_feature (12)..(12): n is a, c, g, or t
  misc_feature (51)..(51): n is a, c, g, or t
agaggtaaggcnacacaacgtgatatttttattaatgtatagttatgcggnggtttcttggaaatactaaagaatgaaaaacacagagaagaaatcaaaataaaaagccaagatttttatgaaaaagaaaaactccttagtaaagagaccagtgaggaactcctgcctccaccagttcaaactcaaattaaaggccatgcctctgctccatactttggaaaggaagaaccctcagtggctcccagcagcactggtaaaacctttcagccaggatcctggatgccacgagatggcaagagccacaatcaatgaatgcattatggtcaaatcttttcatgtatatggatgtgactattttaacaaataaaagaagtgaaaagtt

SEQ ID NO: 333630 - DNA, 374 bp, Homo sapiens
catctttcgtcaattatagtcgcagctacttccgtgatcgcgagttaataacgaaatactaaagaatgaaaaacacagagaagaaatcaaaataaaaagccaagatttttatgaaaaagaaaaactccttagtaaagagaccagtgaggaactcctgcctccaccagttcaaactcaaattaaaggccatgcctctgctccatactttggaaaggaagaaccctcagtggctcccagcagcactggtaaaacctttcagccaggatcctggatgccacgagatggcaagagccacaatcaatgaatgcattatggtcaaatcttttcatgtatatggatgtgactattttaacaaataaaagaagtgaaaagtt

SEQ ID NO: 333631 - DNA, 375 bp, Homo sapiens
taacctctgctctttcaccaccacccgtgaagaagtccagcgcaccccttaaggaaatactaaagaatgaaaaacacagagaagaaatcaaaataaaaagccaagatttttatgaaaaagaaaaactccttagtaaagagaccagtgaggaactcctgcctccaccagttcaaactcaaattaaaggccatgcctctgctccatactttggaaaggaagaaccctcagtggctcccagcagcactggtaaaacctttcagccaggatcctggatgccacgagatggcaagagccacaatcaatgaatgcattatggtcaaatcttttcatgtatatggatgtgactattttaacaaataaaagaagtgaaaagtt

SEQ ID NO: 333632 - DNA, 411 bp, Homo sapiens
gttactagaagggctccaggatggaggccggcctgacttctccgcctcggtgggctgggtcggcggctggagcattacccctactgcgggtcccgctgctggcagcgctggaaactgggtggacggcatgggttggtctcaggatttgttccgcgccttgtggagatcgctgtcaagggaagtgaaagagcacgtgggcacggaccaattcgggaacaaatactactacatcccgcagtacaagaactggagaggacaaactattcgagagaaaagaattgtagaagcagcaaataaaaaagaagtagactatgaagcaggggatattccaacagaatgggaagcttggattagaagaacaagaaagactccacctactatggaggaaatactaaagaatgaaaaacacag

SEQ ID NO: 333633 - DNA, 753 bp, Homo sapiens
gttactagaagggctccaggatggaggccggcctgacttctccgcctcggtgggctgggtcggcggctggagcattacccctactgcgggtcccgctgctggcagcgctggaaactgggtggacggcatgggttggtctcaggatttgttccgcgccttgtggagatcgctgtcaagggaagtgaaagagcacgtgggcacggaccaattcgggaacaaatactactacatcccgcagtacaagaactggagaggtgaggtggcggcgtgggcagcgattgcgtggtcagtgattgcgaggacaaactattcgagagaaaagaattgtagaagcagcaaataaaaaagaagtagactatgaagcaggggatattccaacagaatgggaagcttggattagaagaacaagaaagactccacctactatggaggaaatactaaagaatgaaaaacacagagaagaaatcaaaataaaaagccaagatttttatgaaaaagaaaaactccttagtaaagagaccagtgaggaactcctgcctccaccagttcaaactcaaattaaaggccatgcctctgctccatactttggaaaggaagaaccctcagtggctcccagcagcactggtaaaacctttcagccaggatcctggatgccacgagatggcaagagccacaatcaatgaatgcattatggtcaaatcttttcatgtatatggatgtgactattttaacaaataaaagaagtgaaaagtt

SEQ ID NO: 333634 - DNA, 666 bp, Homo sapiens
gttactagaagggctccaggatggaggccggcctgacttctccgcctcggtgggctgggtcggcggctggagcattacccctactgcgggtcccgctgctggcagcgctggaaactgggtggacggcatgggttggtctcaggatttgttccgcgccttgtggagatcgctgtcaagggaagtgaaagagcacgtgggcacggaccaattcgggaacaaatactactacatcccgcagtacaagaactggagaggacaaactattcgagagaaaagaattgtagaagcagcaaataaaaaagaagtagactatgaagcaggggatattccaacagaatgggaaggaaatactaaagaatgaaaaacacagagaagaaatcaaaataaaaagccaagatttttatgaaaaagaaaaactccttagtaaagagaccagtgaggaactcctgcctccaccagttcaaactcaaattaaaggccatgcctctgctccatactttggaaaggaagaaccctcagtggctcccagcagcactggtaaaacctttcagccaggatcctggatgccacgagatggcaagagccacaatcaatgaatgcattatggtcaaatcttttcatgtatatggatgtgactattttaacaaataaaagaagtgaaaagtt

SEQ ID NO: 333635 - DNA, 426 bp, Homo sapiens
agtattgatgtgtttttccccggtaaaggttgtgaggtcaattgagtcgccccgctgactccgccttcttgttggcttttattacaagttagactccacctactgaaatactaaagaatgaaaaacacagagaagaaatcaaaataaaaagccaagatttttatgaaaaagaaaaactccttagtaaagagaccagtgaggaactcctgcctccaccagttcaaactcaaattaaaggccatgcctctgctccatactttggaaaggaagaaccctcagtggctcccagcagcactggtaaaacctttcagccaggatcctggatgccacgagatggcaagagccacaatcaatgaatgcattatggtcaaatcttttcatgtatatggatgtgactattttaacaaataaaagaagtgaaaagtt

SEQ ID NO: 333636 - DNA, 694 bp, Homo sapiens
gttactagaagggctccaggatggaggccggcctgacttctccgcctcggtgggctgggtcggcggctggagcattacccctactgcgggtcccgctgctggcagcgctggaaactgggtggacggcatgggttggtctcaggatttgttccgcgccttgtggagatcgctgtcaagggaagtgaaagagcacgtgggcacggaccaattcgggaacaaatactactacatcccgcagtacaagaactggagaggtgaggtggcggcgtgggcagcgattgcgtggtcagtgattgcgaggacaaactattcgagagaaaagaattgtagaagcagcaaataaaaaagaagtagactatgaagcaggggatattccaacagaatgggaagcttggattagaagaacaagaaagactccacctactatggagtgaaaaagaaaaactccttagtaaagagaccagtgaggaactcctgcctccaccagttcaaactcaaattaaaggccatgcctctgctccatactttggaaaggaagaaccctcagtggctcccagcagcactggtaaaacctttcagccaggatcctggatgccacgagatggcaagagccacaatcaatgaatgcattatggtcaaatcttttcatgtatatggatgtgactattttaacaaataaaagaagtgaaaagtt

SEQ ID NO: 333637 - DNA, 707 bp, Homo sapiens
gttactagaagggctccaggatggaggccggcctgacttctccgcctcggtgggctgggtcggcggctggagcattacccctactgcgggtcccgctgctggcagcgctggaaactgggtggacggcatgggttggtctcaggatttgttccgcgccttgtggagatcgctgtcaagggaagtgaaagagcacgtgggcacggaccaattcgggaacaaatactactacatcccgcagtacaagaactggagaggacaaactattcgagagaaaagaattgtagaagcagcaaataaaaaagaagtagactatgaagcaggggatattccaacagaatgggaagcttggattagaagaacaagaaagactccacctactatggaggaaatactaaagaatgaaaaacacagagaagaaatcaaaataaaaagccaagatttttatgaaaaagaaaaactccttagtaaagagaccagtgaggaactcctgcctccaccagttcaaactcaaattaaaggccatgcctctgctccatactttggaaaggaagaaccctcagtggctcccagcagcactggtaaaacctttcagccaggatcctggatgccacgagatggcaagagccacaatcaatgaatgcattatggtcaaatcttttcatgtatatggatgtgactattttaacaaataaaagaagtgaaaagtt

SEQ ID NO: 333638 - DNA, 1169 bp, Homo sapiens
gttactagaagggctccaggatggaggccggcctgacttctccgcctcggtgggctgggtcggcggctggagcattacccctactgcgggtcccgctgctggcagcgctggaaactgggtggacggcatgggttggtctcaggatttgttccgcgccttgtggagatcgctgtcaagggaagtgaaagagcacgtgggcacggaccaattcgggaacaaatactactacatcccgcagtacaagaactggagaggacaaactattcgagagaaaagaattgtagaagcagcaaataaaaaaacaaaaaaaaaaaaaaaaaactttgtgggggccggcctcgggccccgaaaaagttttttaaaacccccttcgttgtttggggccccggggcccccagaggtgtacgggagaacatcgtgggccacaaaggtgtggtccccgggggaaaatcccggggcaatggcaccaaggtggttggggtttctcccccaattaaaaaacagcgcgccgggggggaacacccggagcgggtttggggaaacaaaactccaggagggagaggtccggagggggccagtagcggggtccaatacacaggggggagtccaagggagaggcgtccggtaatctagaaatttaggcggcccggacgtgtggaaacaacgagagaaccaagtcaagagctgaatacagaacagtactagcagcaggacaggagcaacgcagacaaacaacaggacacagaaccagcagacaaagtgaacagcgagagagacagagacgataccagccgagtcgatgcactactacgcacaagagtacaaagacagcgaacaaagcagacacccatggccccacgccacaaggcagaacgtagggccaagaagaggaaatgagggaacaactacaataaacacaaacaccgcacagaacaacaggaccatcacacagggacagagcagacaagacaacaatggagaaccagcaggcaaagaggaaaccaacgcagagacaccgacactcagaaacagtggagaggacaacaacaagaacaacgcctcaccagcaagaaagcacgaacagacgaggacgacgaacacacacgcgccacaccgactgcgccacacgcaagcgaaccgagaacaaacccgcgaacaaccaacaaatg

SEQ ID NO: 333639 - DNA, 617 bp, Homo sapiens
gttactagaagggctccaggatggaggccggcctgacttctccgcctcggtgggctgggtcggcggctggagcattacccctactgcgggtcccgctgctggcagcgctggaaactgggtggacggcatgggttggtctcaggatttgttccgcgccttgtggagatcgctgtcaagggaagtgaaagagcacgtgggcacggaccaattcgggaacaaatactactacatcccgcagtacaagaactggagagcttggattagaagaacaagaaagactccacctactatggaggaaatactaaagaatgaaaaacacagagaagaaatcaaaataaaaagccaagatttttatgaaaaagaaaaactccttagtaaagagaccagtgaggaactcctgcctccaccagttcaaactcaaattaaaggccatgcctctgctccatactttggaaaggaagaaccctcagtggctcccagcagcactggtaaaacctttcagccaggatcctggatgccacgagatggcaagagccacaatcaatgaatgcattatggtcaaatcttttcatgtatatggatgtgactattttaacaaataaaagaagtgaaaagtt

SEQ ID NO: 333640 - DNA, 799 bp, Homo sapiens
gttactagaagggctccaggatggaggccggcctgacttctccgcctcggtgggctgggtcggcggctggagcattacccctactgcgggtcccgctgctggcagcgctggaaactgggtggacggcatgggttggtctcaggatttgttccgcgccttgtggagatcgctgtcaagggaagtgaaagagcacgtgggcacggaccaattcgggaacaaatactactacatcccgcagtacaagaactggagaggtgaggtggcggcgtgggcagcgattgcgtggtcagtgattgcgaggacaaactattcgagagaaaagaattgtagaagcagcaaataaaaaagaagtagactatgaagcaggggatattccaacagaatgggaagtttcttacagattctggatattatactttgatgtcttacatttaagtctttaaaccatcttgagttcatttttgtatacggcgaaaggaaatactaaagaatgaaaaacacagagaagaaatcaaaataaaaagccaagatttttatgaaaaagaaaaactccttagtaaagagaccagtgaggaactcctgcctccaccagttcaaactcaaattaaaggccatgcctctgctccatactttggaaaggaagaaccctcagtggctcccagcagcactggtaaaacctttcagccaggatcctggatgccacgagatggcaagagccacaatcaatgaatgcattatggtcaaatcttttcatgtatatggatgtgactattttaacaaataaaagaagtgaaaagtt

SEQ ID NO: 333641 - DNA, 733 bp, Homo sapiens
gttactagaagggctccaggatggaggccggcctgacttctccgcctcggtgggctgggtcggcggctggagcattacccctactgcgggtcccgctgctggcagcgctggaaactgggtggacggcatgggttggtctcaggatttgttccgcgccttgtggagatcgctgtcaagggaagtgaaagagcacgtgggcacggaccaattcgggaacaaatactactacatcccgcagtacaagaactggagaggtgaggtggcggcgtgggcagcgattgcgtggtcagtgattgcgaggacaaactattcgagagaaaagaattgtagaagcagcaaataaaaaagaagtagactatgaagcaggggatattccaacagaatgggaagcttggattagaagaacaagaaagactccacctactatggagcttggattagaagaacaagaaagactccacctactatggaggtaagactacacaaggaggatatcatttaggagtatatattcccaaggatatacgaagcttcagaaaaactatgatgtattttctcaaagtgttgattttattccatcacagaaaataacttaaaacattttataataaattaatatataaacctatattattaataaaataatatatgataaaataaatgctcatattatggaatataacaaaatttgtataaattttaaagtgaaataataaaaatttaaaacaaaatt

SEQ ID NO: 333642 - DNA, 387 bp, Homo sapiens
atacaaatgtatatatgtataatttgtttattgtttgataaaagtgaatcacattccataaacttcctatttactttcctcatttgatggtacaccatggatatatttccaggtcaatagatctagatccaattcactgaaaataaacctgccaaatataattgttttgctgctaattcaacctttattgatggacatcaggattttccagttaccatcaacaatatcacaataaacattcttgtatgtacatcctttatagaagtatgtatctattacttctgtagaatatgttcttggtttgttgggttaaaggtaagtgtagccgagcatggtggcttacgcctgtaatcccagcactttgggaggccaaggtgagtgaatcac

SEQ ID NO: 333643 - DNA, 120 bp, Homo sapiens
catgttagcaatggagaaacaaggattagattggaaatgatcggtttgcctctatttgaattatatttatagtgagtgtcttgctagtcagaagtcacagaaatcaattttgtctatcct

SEQ ID NO: 333644 - DNA, 385 bp, Homo sapiens
gccctttacctcacttaggagatctattctagtctgttctcagtccttccaaattctacttgaattttaaggccttgcataaattccactcccaccactaaaccttctcaagaccactctagcctatggatatcctgtctatggactatttaactagctctcaataccacttatttctcccttatcatatattatttagtattattacctgtttcaagtgtatcctgtctagaaatcctgacatatgagaatgacagaagaacttgagggtgcttggcctggaggggagatgtttcaaggacacattaggtaaatatatttttaaacgattgaagctttgtcatatagaagaagaattaagaattaacctttgttgctccagaag

SEQ ID NO: 333645 - DNA, 480 bp, Homo sapiens
taatagtggataaaattcagaaacattaatgccccagttctgcttaataactagctttgcacaggcaaatagtcacagattatgtctatacttgaaatccaaggaggaaatcaaaacacatgcaccacctaatctacttctctgtctactttcctcaacctacccaatagctgcattttggcactttggccaacctccaagagtggtttacaaagcaaaatatcttgtggaggagttctcatattcataagatcaggtttctttgtatatctggtgagaagagagtgtaaccaggaaggcagatgaagccattttttaaatcaaaagaacatcttactgcctatgagtctttacctgtcttgctactgatgccaccacaagtgtcttgaagggaaggacaggaaagttttggggaaagtgatagagtaaggagctttcatgctctaggcttccccatgatcactaatggcaatgcaactc

SEQ ID NO: 333646 - DNA, 172 bp, Homo sapiens
tttcttattggtcagcgggctggctatctcagaactaggcgtgtgtgcacacacacatgttcatgcatgtgttctattttttattttgttattatttttttgaggttagttggattagtcatggtggggtggtgattagtcggttgttgatgagatattgggaggtggggat

SEQ ID NO: 333647 - DNA, 567 bp, Homo sapiens
ttcagaaaaggtggttttgcagatggatgggagtggtgcaggcactttgttttcacatggcttctttccccaagcagtaagccccttccaacattgccaaaacatcctgcagtttttaccagggttcctgcgctgagggcagagctgagtgcagatcaaaggagaaagagaaagaagttggaggttttgttgtaatgtaagacagtttcatcagcctatggatttaaaagtccaggctgacttacctcttcctttcctatagattgctcaggaaatatggttattctagtacgtgctaagcatcgttgtaaaaagtaagcccacagcctaaaatactttgaatgtcttagacaaatgtccaatgtttgctacggttttggattatcaaggccactccttacctctatgagtagccaagggtagtgctctaagctgtgagctagcttctctcagagatgcccacaaacataaacaccccttttcaaagtaagctgctatggactcataggactggaaaatacttcagagagtaatccctccattttattaaagagaatactgaaacct

SEQ ID NO: 333648 - DNA, 209 bp, Homo sapiens
ttaataaatatgtcagaggcattgtttaagttaaatataactttttcttttttaccaatttgttgattcagttgccattctgcaaagatgcttacaaattctaatacgataaataagtggatataattggaatactaactgaaagtaaaaagacagttgactgaagacacttattttactgaatttcaaaatcaagttatgaatttctg

SEQ ID NO: 333649 - DNA, 144 bp, Homo sapiens
aacccttgcaactctgggtgaggatcttattgaagataaccttgatcactgttctgtagcttgacgatgatcccaaggagtgtttacctaatagtgcaggatctgtatactttatttttagacagtaagtgaatttacttaata

SEQ ID NO: 333650 - DNA, 326 bp, Homo sapiens
cacttatacacacaagtctggagtctgaggaaagaagttcagactgggctaggtgcagcggctcatgcctgtaatcccagcactttgggaggccgaggtgggcacatcacttgaggtcaggagttcaagactagcctggccaacatggtgaaacccgtctgtactaaaaatacaaaaattagctgcaggtggtggtgtatgcctgtaatcccaagtactcaggaggctgaggcaggagaatcacttaaacccgggaagtggcggttgcagtgagccgcgatcacaccactgcattccaacctagatcagagtaaaactcttgtctc

SEQ ID NO: 333651 - DNA, 422 bp, Homo sapiens
  misc_feature (270)..(270): n is a, c, g, or t
ggcaccaattaatccgggactggagcatctgcagactttgctatccaaggggggtctgaaaccaacccctagatactgagggaccaacccccagatactgagggatggctgtcatgtcatgaggtgttcccacagtacccactgcgtggcatgcaactgacaacgttcttacttaatctggcacccagggccacccctactggagggatccttggtgccgatgaatagcgaggtgccgatgaatagcgatcgctattcatcggcaccacngctcagccccctggattcagcctttttcctaaggatatgtacagaggtcaaacctcccgctttgctggagttgcaactacttttgctgggaagtctggagagtccgagtatcaaagcttttctgggtctccacatgtgcctgagtggctgtt

SEQ ID NO: 333652 - DNA, 434 bp, Homo sapiens
ctgttgtctgtgatgagtaacccgaaatgacaagtaggaaagacaggtacgggggaatccttggaagtcagtgtaccttggaagtcaggtacaggtagagagggatgtgagcgacaggtgtgctcttaggtgacctgtgtgtggccagctcttctggaagggcaggtgttggggtggttaaggaggtgcaacactgtcacggaggaggatgggtgagggccaggaggctggggactggtgggggcaggccttacctgaggggacaggttagcaggttgcatgtgtgagtgcttgtgtgcaacagaaggaatgtgtgtgtgagtgtgtgcatgtgtggtgactcggtactgcttgagaggaggaagaggtgaagaaatacgaatgtgtgaggaacaggtgagtttgcagctttaggggacaggtgggatggctca

SEQ ID NO: 333653 - DNA, 402 bp, Homo sapiens
ccctcaatctaggtatctacctcatagatatgcccttgggccatacatggccaagtcactttcactattggacaaatcgttcccatttcatccaggtctgacagatgatgagtcagcagattattttcctggatggttgatggtgtaaatagagccatattcacctcatcatgcatttgttccttcagttatccattcactgtatactcaacctataacaaaagtgacagtcatagccactgaactgtgggttcacaatctagtggaagaactagtaggtaaaccccaactataagactataatgaagtcagagggaggaaatgataggtaatgattgttgaacacaatattgtcatgtgccaggctctgtgctaaacacttagatttaggatctcaattta

SEQ ID NO: 333654 - DNA, 372 bp, Homo sapiens
tcaaagtgtcatcctgcccccacaggaaaagaagaagccagaactgctgcttcccgtttactacaggtatactggccagggcctcaagtgcacctttgataatccctgactcccctttagggactcccaggtggactcacactcccgatttcagaatgcactctcccatcaacttcatgttctccaccaccggcctgctctctgagagctctgcaaagtaaggtttctcaatttgcactgctgacattctgggttggataatttttgttgtgggagctgccctgttcattatgggatgcaagcagcatccctggctcatacccaccagagcacaaactcctagctgtgaaaaccaaagatgtctcagacact

SEQ ID NO: 333655 - DNA, 1244 bp, Homo sapiens
atgcgcagcgcgcgctctacggcgctgaaccggggcgagcagagagctgtcagatactatagccatatgaagttgaacatggcagaagaagaggactatatgtctgattccttcattaatgtccaggaaaagtggcattggtcatgaggcatcattaaaacggaaagcagaggaaaaattggaaagctacagaaaaaagattcacatgaaaaaccaagctgaagaaaaagctgcagaacagtttcgaatgcgacttaaaaataagcaagatgaaatgaagctagaaggagatctcagaagaagccagcgagcctgtcaacaactggatgtccagaaaaatattcaggttcccagggaagcatggtactggttgaggcttgaagaggagactgaagaagatgaagaagaaaaagaacaggatgaagatgaatataagagtgaagatttaagcgtactggaaaaattacaaatattgactagttatttaagagaagaacatctatattgtatttggtgtggaacagcctatgaagataaagaagacctatcttcaaattgtccaggaccaacttctgcagatcatgactaagattattcccaataaagtggaaacttgaaaaatgttattacttcctagggatagacaatttagcagttggaaatctcaaattttttatgccagtaaagaaagggggactttatataatgttttgttctttttgtactttagaatatgaatgttcattgacttgaaaaaaataatgcaatggcatttcagaacacaagtatcacagagatggacagttacaatttattgctatattgtgatacgtgaggggtttaaggacaccaacaggtaacttcttattcccctcttcactttggaacaaattgagaaataagaaatgggagtcagaggaagagaaaaatatccactttatcagtgaataaactgatacagagaagaaggttgactttttctccagtcagagactgtaatatttctccctgattggagagaacagcgggtctctgccttgttggggcagagcccatctttgcattctgagaccagttagctttcaaggtcagggaaaccaccaggggctggaccacacatgctcagttccttcttgtatcacccatgggataagacagttctctcttgggaaggaatgaatgagggttcagagagctttttcctacacttcttgctttgaaggagcaaggagaagttcccttcc

SEQ ID NO: 333656 - DNA, 182 bp, Homo sapiens
atgcgcagcgcgcgctctacggcgctgaaccggggcgagcagagagctgtcagatactatagccatatgaagttgaacatggcagaagaagaggactatatgtctgattccttcattaatgtccaagaagatatcagaccaggattgccaatgctaaggcaaatccgagaagcccgtcgaaa

SEQ ID NO: 333657 - DNA, 465 bp, Homo sapiens
gatgaatataagagtgaagatttaagcgtatgctttgcaccatttccttcatagggtgtctcagccttggcaacattagcactttgagttgtggtaatccgttgttgtggagagctgtcctgtgcattgcaagatgtttagcagcatctctggcccctgcccaccagataccagttgcacttttgcttatgacaaccaaaaccctctccagacattgctaaatgtccccgaggggaaaaataacccctggttgagaggtactgcattgcaggattactttactaaccccaaatcaaaacttacatataatttttccctttagcttccatttgtcctctcatctcagcttcagtttggatgatgaattagcaacaaatgtaaattattttaatttataccttatttcctgcaaaacttctacaagtcattctaatgtgtacttttttctcctacttataaacaaca

SEQ ID NO: 333658 - DNA, 498 bp, Homo sapiens
gcgcagcgcgcgctctacggcgctgaaccggggcgagcagagagctgtcaggtaagagagctgtcaggtaagggtctggggacaaccggtagaatgataaaaggcagagtgcgctggccatgactaccgtatcacaccgtcagccacttttccatccgtgggtggttgcgtctgtgggacgcttgcagccaggaggaacgcgtgagggaagggatcagcggttcctgagcgtagtattgagagtgggacgtttcttgtcacatttatactgtaggtccatttctccacttgtatatgtaatgggactctcaatatgtctgtttcccgactacgccccctaaaaaaacaaaaacaaacctactcctacagtcttcccactctcaaaaaacgttaactccgttcttccatgtattcaggccaaaaacttagcgttatcttgacatcgttctttacgtactacctacaacatcagcaaatcctgtaagctctaccttcaag

SEQ ID NO: 333659 - DNA, 1150 bp, Homo sapiens
gttgaaccaattcctctcaatatcaaaacagggaaaagtggcattggtcatgaggcatcattaaaacggaaagcagaggaaaaattggaaagctacagaaaaaagattcacatgaaaaaccaagctgaagaaaaagctgcagaacagtttcgaatgcgacttaaaaataagcaagatgaaatgaagctagaaggagatctcagaagaagccagcgagcctgtcaacaactggatgtccagaaaaatattcaggttcccagggaagcatggtactggttgaggcttgaagaggagactgaagaagatgaagaagaaaaagaacaggatgaagatgaatataagagtgaagatttaagcgtactggaaaaattacaaatattgactagttatttaagagaagaacatctatattgtatttggtgtggaacagcctatgaagataaagaagacctatcttcaaattgtccaggaccaacttctgcagatcatgactaagattattcccaataaagtggaaacttgaaaaatgttattacttcctagggatagacaatttagcagttggaaatctcaaattttttatgccagtaaagaaagggggactttatataatgttttgttctttttgtactttagaatatgaatgttcattgacttgaaaaaaataatgcaatggcatttcagaacacaagtatcacagagatggacagttacaatttattgctatattgtgatacgtgaggggtttaaggacaccaacaggtaacttcttattcccctcttcactttggaacaaattgagaaataagaaatgggagtcagaggaagagaaaaatatccactttatcagtgaataaactgatacagagaagaaggttgactttttctccagtcagagactgtaatatttctccctgattggagagaacagcgggtctctgccttgttggggcagagcccatctttgcattctgagaccagttagctttcaaggtcagggaaaccaccaggggctggaccacacatgctcagttccttcttgtatcacccatgggataagacagttctctcttgggaaggaatgaatgagggttcagagagctttttcctacacttcttgctttgaaggagcaaggagaagttcccttcc

SEQ ID NO: 333660 - DNA, 1086 bp, Homo sapiens
ctctcagtgacaaccaaagaatggataaattagagaaaaccaacagcagcttacgcaaacagaaccttgacctccttgaacagtttcgaatgcgacttaaaaataagcaagatgaaatgaagctagaaggagatctcagaagaagccagcgagcctgtcaacaactggatgtccagaaaaatattcaggttcccagggaagcatggtactggttgaggcttgaagaggagactgaagaagatgaagaagaaaaagaacaggatgaagatgaatataagagtgaagatttaagcgtactggaaaaattacaaatattgactagttatttaagagaagaacatctatattgtatttggtgtggaacagcctatgaagataaagaagacctatcttcaaattgtccaggaccaacttctgcagatcatgactaagattattcccaataaagtggaaacttgaaaaatgttattacttcctagggatagacaatttagcagttggaaatctcaaattttttatgccagtaaagaaagggggactttatataatgttttgttctttttgtactttagaatatgaatgttcattgacttgaaaaaaataatgcaatggcatttcagaacacaagtatcacagagatggacagttacaatttattgctatattgtgatacgtgaggggtttaaggacaccaacaggtaacttcttattcccctcttcactttggaacaaattgagaaataagaaatgggagtcagaggaagagaaaaatatccactttatcagtgaataaactgatacagagaagaaggttgactttttctccagtcagagactgtaatatttctccctgattggagagaacagcgggtctctgccttgttggggcagagcccatctttgcattctgagaccagttagctttcaaggtcagggaaaccaccaggggctggaccacacatgctcagttccttcttgtatcacccatgggataagacagttctctcttgggaaggaatgaatgagggttcagagagctttttcctacacttcttgctttgaaggagcaaggagaagttcccttcc

SEQ ID NO: 333661 - DNA, 473 bp, Homo sapiens
tctgccaggaaacatttccaaaaaggaaaggttttgtctcaattgctgtggcagcaaacacttccgttggagctgttagagcggtatcaggatactctcactggcttacatagctttcaaaatatttgtgttgctaccacgctcctttgccaatatatgtgacttgtaatacttttttattcatctggatgtatttatacaactgtgtaggtccagaaaactttttaaaagttggcgtaaatatgctgtgatgaaaactgagaaatacatctgcctttctcactatgtagaaatactacatttgcaaattagggtacaaatcagtcttcactttcaaagaccaaattaagcccttagagaggtcaaatttaaataacatcactatatattacagagaaaataccagcatcttatgtaagctttacttaatcctcaatattttattaggcagatccattctcagagctaaggag

SEQ ID NO: 333662 - DNA, 282 bp, Homo sapiens
gaattcctaaccacctatctacagactgttaaatgttgcctcttctgggagttcttcccaaataaccttttcctgccccacacagcaaaacgaatccccccttgcgttctagaccttccactggaacacctgctgtgcagtcctgggcttggctcacatgcactccctctacgcctctgagtcagggttatctgagcgcgtgctctgcactgtcactgtacctctgaggtctacgtgaactgccccctgtgggctgtggtgcaaaacctgtgtatgtggtgg

SEQ ID NO: 333663 - DNA, 582 bp, Homo sapiens
tatccaaagcgtatgggaatctcttttcttagcaactcgaaagtactgcactccaagttcttgcaggagagtaccaacctcgaacttcagccatcaacaacatctcatacaagaagtcccactgaagcaaactgatttttgagacagggtgaacacagtcattaatgccactcatatctcagggcattctaaccctgactcccacatcaaggtaatatgaagacactgagctacccattgatgctgctgcttctacatttactgagagccaatataaagaaggacagtaattatgaatacttctgcacttccaaaaccacaattggacctagaatgtattaagatgctctcccaagattcatttcagatttcagttccagagggaaaaggtttatctttcccgaagaactgggggacctctttttatcaaacaatgaaagttacactcatacatttcttgtcatctttgacagccaggaagtttaaaattgaactaacttggtcacaaattgctggcattaccactggctttgggatctagaacatttattttcaacattaatttttgatggcttacttgta

SEQ ID NO: 333664 - DNA, 541 bp, Homo sapiens
ctttttttgtcctcgggggtttatggatttattattttactgtcttctaggatggtttaggaaggagtggaaagaaacatgtatcttaacctgccatgtttaactggaaatctttatttacctttagtttcatttcttcttactcactatatgctttctacactccagctgtattaatctactctcaggtagccccatattttctgcttctttatccttgtatactgctgttctccttcaggaactaaaatatctcctctacctttatactctcaaagctaggtatgcatatttccatcatactataaaacagcaatttttcactgaggagcaagtaccatgttcaaaatatagagtgtttgggagagaccaggcccacaaatgtctggaaacatgtccaacttactaaacagaaaactgtgcttttatataaaaaggtcttaatcaaatatataataaagtatgaccgcctgacatctattttgctaatagtagaaacaacataattaggttaaaaggtacgtgtgctggctgggcgcgg

SEQ ID NO: 333665 - DNA, 315 bp, Homo sapiens
tgggggaaggggaaaccgtcagagacccagagacaggcaagagatgacagagaccagggcagaggggactggatccaagaaggcactcagagtagaaagaggcagatgagtcccagagttgggcatttctcgcctgggattctgactcagggggcccgtattgtcccaagagctcggactccagggcctgggagaaccaggctgaagcagctccccagcctggcccggccactcagagagacctctcctgggcctcgagcccccaccctcaccccagctcccacatctctggggcaggccctgcccggctacccc

SEQ ID NO: 333666 - DNA, 330 bp, Homo sapiens
gcttcagcagaaggtgggagcagggggtgtgcagatgacaccagctgccaggacaagccttgctgtaaggatgcaggatgcgaatgggagaggcaccaagggccgcagagaaggagccgtgctgcactgggctgccgtgaagacgaggtgggcggcctcggtggctgtgactgtagcggagctgtgagggtgaagacgaggtgggcggcctcggtggctgaggcggagctgtgagggtgaagacgaggtgggcggcctcggtggctgaggcggagctgtgagggtgaagacgaggtgggcggcctcggtgactgaggcggagctgtgagg

SEQ ID NO: 333667 - DNA, 197 bp, Homo sapiens
tcaaagtgtaagcccaaagggttttttaatgactaaaatatatttcagttatttctatgtttagataacagtattgaggggggccaggcacagtgggtcaaccctgtaatcccaacactttgggaggctgagacaagaggatcgcttaaggctaagagttcaaggttggaatgagctatgattgccctgctgaactc

SEQ ID NO: 333668 - DNA, 198 bp, Homo sapiens
gactaaagtgagtgtaaagaagacagtctggactctggggcagcacaagggtcacagggagccccagctctgaaggctgtcctggctgcaggctctctgagctgcccctggggagctgagggtccaggaagtttgctgcttaggcccagagaggagctggcctggcactggaaagaggagaaagacaggtggggccat

SEQ ID NO: 333669 - DNA, 390 bp, Homo sapiens
tgaagttagttaagcgaaccatttaaataaacgatcagccttagcattctggggaagtcattgggcctaaagaagataaattttagcattctaagtttctgtgtattttctttaatgctagctttgaaatgcaatcaaatttcagtggaaatagaggcataaactaaatttctaatcaattaaaaaatactttagtggtgggcatggatgggtagaaagatatttagccaaacaagccttactggggggaaaataggtagttagaattctagccaacacttcaaaaatgtggaagtatttacaaagtagtccttagttgggggatgctagagtacacttattaaaatttgcttttggtgctgtggctcatgcctgtaatcccaacacttt

SEQ ID NO: 333670 - DNA, 508 bp, Homo sapiens
aaaaaaaaaaaaattagctgggcatggtggtggactcctgtaatcccagcaactcgagaggctgaggtagaagaatcgcttgaacccaggaggcagaggttgcagtgagccgagatcatgacactgcactcccgtctggacaacagagcgagactctgtcaaaaacaaacaaacaaacaaaacccacagattaaagaacaagtaaaattaccactatttggaatgtaatgaaaatgaaaacatagcacatcaaaatgtgtagtgacactaaagcaaacttaggaattatttatagcactaaatgtctatatcagaaaagaaaaaaaaaaaaaagaggtaaaatcaatgaccttagcttccaccttcagaaactagaaaaagaagagtttttatgccaaagtatctaagaaaaaggaaataataaagataacagcagaaataaatgaaatataaaaggaatatatataatattccacatatatgatacctatatgataaaaaaaaatat

SEQ ID NO: 333671 - DNA, 542 bp, Homo sapiens
aaactcagtattttacttgtttctgatttttttccccttaaaatgttgccatgacatgttaggccgtgttaaacatcacacaatcacctaaaacaattttagaatagcagggaaaacagccatctgcatttctacatgacagaaagccaggcagttagttttcattgaaaatggaaagtgttgagaactaggttctctgggagatgacttggctttagcctgtagcagagagatgttggcaggtggccctggctcacctcatcttggaaggaccctcgagtcagagagaatgtacactgagttgagaggagaaaacaaatgggaaactaatgtgtatagagcatcacttatgtgtcaggctctgttatcgttccatataaagctctcagaacaccccagctaggcagttgtgcaaccattttataaaggagaaactgaaccagagacaggttcaataacttgttcagaaactgatgattttaagtggtgaggctggctgggatttgtgctcagtatgtctgactcttgcctatggtcttttc

SEQ ID NO: 333672 - DNA, 328 bp, Homo sapiens
tccaacctaaatgtcttaactttgttctccttcaaatttaaacgggcgtattaatgtgtaacgggagttagtgccccaagccaaggtacactcaagacctgttgcctcagcccagcatgcagaggtggtggggttcagaataggcctccaggaaggagaattgtgccctgtagttggttacgcagaggtcaaaagccagaagcacatggccaatctcctttaagcactttcatttcagctgttcccctctcctgagccatggtgggtccctggcaatgcccggtcttcaatctagtttcatttcttactagctgtgcaacctccatgt

SEQ ID NO: 333673 - DNA, 206 bp, Homo sapiens
agtaagcactgagccatggaccatgcaagaaaagcctcaattcacacctctcacttccttcatggcctaactccaaaaatattacttttcttctgctctaatgtatctttcctgaaattattatgcttttgtagactcattttgtctccccagattgtgagtgatcttaaggcgtggagtccgccctcctccttcctcggtgtttc

SEQ ID NO: 333674 - DNA, 676 bp, Homo sapiens
cagggtgctgtgggagcacagggaagggttcctaactcacactggggatcagggaggctttggctcctgatactaaatgacctcttatttgatacactttttatgtcagacttgctggttctttccacacattgagtcaaagggtgtctctggttcctccctggatggactgatacaggccatttcactcactctcccaagggtttatctcctctggcctctccgagtctcacctggaggtgtgtgttcctgtggcgtgggttccttgggagcgtgggtgattcaccggctggcctcatcccatactgatcctctggggtgatccctattcaccttgtctcctttgctgtcataactccactgctgggggcagaggtggagatgttgagcttgtgggcaggaataagttccactgagccacagagcttgactctgctcaccttcccacaatagaactcagagttggaatcctttccccagccacctcccctcccatctgaggacagagggtaacctgcccgtcatctctggggttatctccaattttcagtctccctcatctccagctgacctcccatatggccaaatcgatcctgaggttgggaatccagttcttcaaactgagcccttcagactctgctgtggtacgtgaaaacagtttcagtatcccgccata

SEQ ID NO: 333675 - DNA, 309 bp, Homo sapiens
ggtcctgctgtagtttttaattaaaacttgttcacactgaacctccagcttggtttaggctttcctaccttggtaatggttcccaaggagctttctgcagttgtaagttgtggttctctgtatcctgaacctgcctgcctctctctctaattttgggggcagtggtttgccctgtgactccaatttctgcaatggctttacgaagagttgttgcttttcacctttgcttttcttttgttttgagtatggaatggcagtttttaactccttaaattccagaccagaaaccggtcatctgcagggctaatt

SEQ ID NO: 333676 - DNA, 361 bp, Homo sapiens
ggaaattgtatggagggacaaacgttcatctaatggaaggcaggtcagataacctggtataaaattgtgctgaaagctccattaacccactacatccgtgactgcgtcctatttttctggttatatcaccaaacttaataccccaaattagaagcacagcatttcagagttcaaagagtacttagcgcctaattcggggcagccctgctgctagtggccattgtggtctaacctccccacatcctgaaatggcccctgctccccgactcccactcagtgtctccgcagctcccgttacactaactcccacgtctcagtctgcctgctggggtcacacagagagggtcaaatgcctctccac

SEQ ID NO: 333677 - DNA, 715 bp, Homo sapiens
ttcattttgggtttctctcttcatgtggttcaaaccaaggttaaaataattatgggagaaaaggtcttaaagggaagagaatgttaatgtcctcagtgagatacaaaagagcattgtctgcatgaaaaaggaacaggatactagaaaaaggataacaaagggaacagaataagaaagttcttaaaattaaaaaatagaaaaaaaacttcaaaagaaggcttagattctactattgtctcaaggagatattccaaaagcaaaatagagatagtttttttatctttcctctcctcctaatgtaggaacaagtctagaagcccaatataggatgagtaggaattccagaaagaatagaaaactgaaaggaggaaatgaacatagaatgcaagatagtttcttggcaccaggcatggtggctcatgcctgtaatcccaacactttgggagaccaaggcaggcagatgacttgagctcacgagtttgagaccagccttggcaacatagggagacaccatcccccacttcccgtgtctacaaacactatgaaaattagccaggcatggagttgtgtacttatggccccagctacgtgggaggctgaggttggggatggcttgagcctggaaggcagagggtgcaacgagcctggattgtaccactgcactccatcctgggagacagaaacagaccttgtctcaaacaaaacaaaacaaaac

SEQ ID NO: 333678 - DNA, 1158 bp, Homo sapiens
gaagaccatctgttcaggtaccaggaaaggcaagaggtgggagtgatcgggggacaggaacaaggggggagggttgaaaacctctagggagtgtcagctagagacttcagggcccacttggccagatgatggctcttgccaacaattgaaggagacctcatgtttaattccaggagcacctgacccagggaagcttcagcatgggatactagagacaggccagggtgaggcaccagcctgaaactgggcatcccgaatgagcaatgggcccagcagtcagttccctggccaggcaggaggtggggagtccctgctgagggaggttgaatgcccccagagaagtgtcctacagctcctgcctgccagacccccaggcaccctgcagagggaaagttagtgatggcgctggccccacagaaggcttcctgtcaaccttagtgcttcagtgggatcagacccctgggtcaccagccatctgaggaaagcccccacacatgggagaaaaggtcttaaagggaagagaatgttaatgtcctcagtgagatacaaaagagcattgtctgcatgaaaaaggaacaggatactagaaaaaggataacaaagggaacagaataagaaagttcttaaaattaaaaaatagaaaaaaaacttcaaaagaaggcttagattctactattgtctcaaggagatattccaaaagcaaaatagagatagtttttttatctttcctctcctcctaatgtaggaacaagtctagaagcccaatataggatgagtaggaattccagaaagaatagaaaactgaaaggaggaaatgaacatagaatgcaagatagtttcttggcaccaggcatggtggctcatgcctgtaatcccaacactttgggagaccaaggcaggcagatgacttgagctcacgagtttgagaccagccttggcaacatagggagacaccatcccccacttcccgtgtctacaaacactatgaaaattagccaggcatggagttgtgtacttatggccccagctacgtgggaggctgaggttggggatggcttgagcctggaaggcagagggtgcaacgagcctggattgtaccactgcactccatcctgggagacagaaacagaccttgtctcaaacaaaacaaaacaaaac

SEQ ID NO: 333679 - DNA, 512 bp, Homo sapiens
ctatctgaatatataaaatgttagcttttttaaaaagttttttttttctttctatgtggtgtttcctctaggttttattttcttactttttatttgctttggtctttatctttcatcttatagcctttcctcagatagttggtagtcatgtgtaagagtaaggaattaaaatgctaattagaaattctgagcgtggcttgtcaattgttagctttcctgtatggtaacctggctgtggtgtttggttggaggacttctagtgtcggtttcttcttgtatatcctcctagctggttagatccctataagaaggctcttctgatttcttgcttggaattgaaggcctttctacaagcattctgtggggtgggcagtgagggggatgtggaatgaaaggttttgggggatccccagatacgtttcttcactcaaccctgttttcagtatgttctgcattttgctgtgcctgatttccttagtcctgtgatcctatgttttaccttcttcagacaa

SEQ ID NO: 333680 - DNA, 218 bp, Homo sapiens
ctcagtcaatccacccaccttggtctcccaaagtgctgggattaccagtgtgagccactgcgcctggccccaggtcctctttataccctccctggacaacctagcctgcagttccagcctccccagaactcccagagcctctcctggggtcccacatcccctcattatgaatagttagatatatttaatgtactttatacccacatgcatgcaccagg

SEQ ID NO: 333681 - DNA, 80 bp, Homo sapiens
ctttttttttttttttggttttggccaaactttttatttagtattctgtagttgtttaacacacacttaaatggtcttat

SEQ ID NO: 333682 - DNA, 692 bp, Homo sapiens
aaacggaattcttgttaaaatgactgattctcgtgcatgtgaaaggctctggggaatgaatacctgtttggtccaaacttactgtatcataatgctgtatatgttgaaaacgtaatacctgttaatgtcctaatgaatcacgttttgcagaaaacaccgtaagaaacacttcagtctttctgtagtttccatgcatatttcaccatggttcgcactctgatcctcatctggtttagaaagcaattcagtttctttcaaaccaccataacctaagtgctgccccatccttcacctttaccctagaaaatctgagaatccattggtgtgtactgtgtgacacaatgccaacaagcctctggtttctaatactggcaggaccaacacacatactttagtgggaatataatctgtttagacgataatagagggaaatgccataattaacaaatctcccttcactcaccactatcctcattcttgcagttgtcaaggtgtaagcctcactgtaagttacaaagctaccactcccctctttaagaacacatagcttaggattgccttggcgatgtgggctcttttttggttccatatgaacttaagtagttttttccaattctgtgaagaaagtcattggtagcttgatggggatggcattgaatctgtaaattaccttgggcagtatggccattttc

SEQ ID NO: 333683 - DNA, 433 bp, Homo sapiens
tgctgggattaccggcatgagccaccgcgcccggcctatgggaggaagttctgacatggatggcaggggtggggagggcagctgaggactctggagcagaggctggggccccactctggctttccctggccctaaaggaagggtggggtctgagagtgtggaggcctgagagcaggggcagcacagacacccactctgagaccacttggttgtcccagccaccgggttccaggtgtctggggccaggtggggttttctctccaagcccagagtgacctccccactcccagccttgcccagagcaagtcttgctgagttctaaggtgaactcccacttgttccagaccagggacacagggtcctgcaggcctcccggagcaagcactcttgagagggcttctccacgtggccacaggacagactgtgcttcatc

SEQ ID NO: 333684 - DNA, 366 bp, Homo sapiens
ggtgcgctgttacaatcaattagatgttgtgagagccaggcaccccactcccatccccaccgaagttaaaagactctgcacttctggctcctctggaatgccaaggggcagggtttctctgccaccgagtggggccctttcaacccaaagctaaaaagcaaggccaccctccgcgtgccagcattgagctcagtgttcaacccacagttaatacctcacaaaagcccttggatgtgggcctggtcatccccattttacggatgacggagcagaggctccgagagtttaaggggtacatccacgtgagtcacagagcagggtgggcaggagcggggcgtcccacctggtctgcctgagcccagagca

SEQ ID NO: 333685 - DNA, 366 bp, Homo sapiens
aaccagctctgagcagagtgttatcattatcttaatcacactgctctggaatttatcatattctggaaatcacatttgcttaaaattacatctatgtcatttatggttatggttgatgaatatcccatgaaccctttattgagttactgaaatgagtatgttaatccccattgaaaaaaggtgtggcccaaacaaagcaagatgcttcttcagaattgtatttattaatatttaagggtgatatttctgcctttctgatatgaaaatccatcaaagtgcttacgttgtgaatagattactttttgagatgccgcctactttgactcaaagctctgtaattgtgctatttaaatcaaataaattgaa

SEQ ID NO: 333686 - DNA, 3527 bp, Homo sapiens
aaaagcgtgggcagttggagaagaagcagccagagtgtgaagaagcccacggaagggaagtccaggaggaggaaaagaagcagaagttttggcatctgttccctggctgtgccaagatgggcgattggagcttcctgggaaatttcctggaggaagtacacaagcactcgaccgtggtaggcaaggtctggctcactgtcctcttcatattccgtatgctcgtgctgggcacagctgctgagtcttcctggggggatgagcaggctgatttccggtgtgatacgattcagcctggctgccagaatgtctgctacgaccaggctttccccatctcccacattcgctactgggtgctgcagatcatcttcgtctccacgccctctctggtgtacatgggccacgccatgcacactgtgcgcatgcaggagaagcgcaagctacgggaggccgagagggccaaagaggtccggggctctggctcttacgagtacccggtggcagagaaggcagaactgtcctgctgggaggaagggaatggaaggattgccctccagggcactctgctcaacacctatgtgtgcagcatcctgatccgcaccaccatggaggtgggcttcattgtgggccagtacttcatctacggaatcttcctgaccaccctgcatgtctgccgcaggagtccctgtccccacccggtcaactgttacgtatcccggcccacagagaagaatgtcttcattgtctttatgctggctgtggctgcactgtccctcctccttagcctggctgaactctaccacctgggctggaagaagatcagacagcgatttgtcaaaccgcggcagcacatggctaagtgccagctttctggcccctctgtgggcatagtccagagctgcacaccaccccccgactttaatcagtgcctggagaatggccctgggggaaaattcttcaatcccttcagcaataatatggcctcccaacaaaacacagacaacctggtcaccgagcaagtacgaggtcaggagcagactcctggggaaggtttcatccaggttcgttatggccagaagcctgaggtgcccaatggagtctcaccaggtcaccgccttccccatggctatcatagtgacaagcgacgtcttagtaaggccagcagcaaggcaaggtcagatgacctatcagtgtgaccctcctttatgggaggatcaggaccaggtgggaacaaaggaggctcagagaagaaagacgtgtcccttctgaactgatgctttctcactgtcatcactgcttggctcctttgagccccgggtctcaatgacgttgctcattaattctagaaactataaccagggctctgggatagtaagagaggtgacaacccacccagactgcagttccctccccaccctctacccagtatacgaagcctttcagattactcatgaaacagggtagagggaaagaagggaagcatggcaaaagctggcctggaagggatagccagagggatagaatgactctctctctacataccagcagcataccaaatgcgttctctaagttcctacctccttgacctgatcaccctccctcctccaaggaagagctcaaagttcccagccaatagacagcatgaatcaaggaacttgcattatatgtgctcttgaatctgttgtctccatggaccattcctcggagtagtggtgagatggccttgggttgcccttggcttctcctccctctactcagccttaaaaagggcttcttggaactttaccagcagcctcagctttacaaatgccttggtatgtacctctggcaaatgccccaccttggtgatgttgcaacctttccttctgctagggtgtacacctagcctgtgcaggtgtcagccctgctagggagtcactgtacacacaaactctactggaattcctgccaacatctgtcaccctgcagctcctttacagttcaatccaatgatagaaaccatcccttccctttctcccttggctgttcacccagccattccctgaaggccttaccaacaggaatatccaagaagctgttgtcctctctcgaaccctgaccagatcatcagccactgaggccagtggaatttccccaggccttgttaaaacaaagaaagcattgtacttctcagattccccttgtggaaaaaaaaattctgctgtgaagatgaaaataaaaatggagagaaaacactggaaaactattttcccctcctatttacttcctttgctgactgccaacttagtgccaagaggaggtgtgatgacagctatggaggcccccagatctctctctcctggaggctttagcaggggcaaggaaatagtaggggaatctccagctctcttggcagggcctttatttaaagagcgcagagattcctatgtctccctagtgcccctaatgagactgccaagtgggggctgtagaaaagccttgccttccccagggattggcctggtctctgtattcactggatccataatgggttgctgttgttttggatgaaggtaaacgatgcttggaattggaaactgagacttatagagggattattacattattaaaatgcacgtgtgtgtgtgtgtgggtgctgatgggatgggtaaaggcttggggagtcctgaaataaggaaaggaaaccacagagaaacttgtgtcttcctgctctcctctccggctgcctggcagttattaacctaaacagatagccacaagaggttgggacagaggagggtaaaggctcagaaggaggttcaacctctgactcacctgcccatctctgggccctctgctgacacttggatgctattgttgggtggaaagataaatgagagtggagaggtggaggaaagtgactaggatgccatttaggaaggaatgtctgatcatcccgggtccctggaggggacaccttttaatctattgcctagcattaatattttctctccttctatctctgaaatgttttatgaaatgagtgttcttgaattagaaattctgtgggatcaatctttgatggtgagggttttagaaaggaaaaatatagtaaaatgtgtaatttgtcttaataaaatctatctctacatctatctctcttttgttgtccacttcatactgtgactacaagagaaggatggcagacttggtggggaggggagcgcttggactatacccatcagtaagccagtaatgcaaagagctttgaagtcaggcatgcaatggttaaaattccagttgttaacttacatctggactccagcaagacaatctctgagccttggtttcttcatctgtaaactgggccccattaatatctacctcatggggctgttaactgagctgttaagtacctcatagggctgttaactgagttgactgtaaagagtttagcagagtgcttgggaaataacagtcattacatggtaattgttgttattatctgattatttttgttattgttttgaatacacagtatttgaaaatgg

SEQ ID NO: 333687 - DNA, 3211 bp, Homo sapiens
cagtctccattttcaaacagtccctcctgggagaacacagacaggcagaggattacaacacaaggcagcaagcactgggagacgaaagttttggcatctgttccctggctgtgccaagatgggcgattggagcttcctgggaaatttcctggaggaagtacacaagcactcgaccgtggtaggcaaggtctggctcactgtcctcttcatattccgtatgctcgtgctgggcacagctgctgagtcttcctggggggatgagcaggctgatttccggtgtgatacgattcagcctggctgccagaatgtctgctacgaccaggctttccccatctcccacattcgctactgggtgctgcagatcatcttcgtctccacgccctctctggtgtacatgggccacgccatgcacactgtgcgcatgcaggagaagcgcaagctacgggaggccgagagggccaaagaggtccggggctctggctcttacgagtacccggtggcagagaaggcagaactgtcctgctgggaggaagggaatggaaggattgccctccagggcactctgctcaacacctatgtgtgcagcatcctgatccgcaccaccatggaggtgggcttcattgtgggccagtacttcatctacggaatcttcctgaccaccctgcatgtctgccgcaggagtccctgtccccacccggtcaactgttacgtatcccggcccacagagaagaatgtcttcattgtctttatgctggctgtggctgcactgtccctcctccttagcctggctgaactctaccacctgggctggaagaagatcagacagcgatttgtcaaaccgcggcagcacatggctaagtgccagctttctggcccctctgtgggcatagtccagagctgcacaccaccccccgactttaatcagtgcctggagaatggccctgggggaaaattcttcaatcccttcagcaataatatggcctcccaacaaaacacagacaacctggtcaccgagcaagtacgaggtcaggagcagactcctggggaaggtttcatccaggttcgttatggccagaagcctgaggtgcccaatggagtctcaccaggtcaccgccttccccatggctatcatagtgacaagcgacgtcttagtaaggccagcagcaaggcaaggtcagatgacctatcagtgtgaccctcctttatgggaggatcaggaccaggtgggaacaaaggaggctcagagaagaaagacgtgtcccttctgaactgatgctttctcactgtcatcactgcttggctcctttgagccccgggtctcaatgacgttgctcattaattctagaaactataaccagggctctgggatagtaagagaggtgacaacccacccagactgcagttccctccccaccctctacccagtatacgaagcctttcagattactcatgaaacagggtagagggaaagaagggaagcatggcaaaagctggcctggaagggatagccagagggatagaatgactctctctctacataccagcagcataccaaatgcgttctctaagttcctacctccttgacctgatcaccctccctcctccaaggaagagctcaaagttcccagccaatatctgtcaccctgcagctcctttacagttcaatccaatgatagaaaccatcccttccctttctcccttggctgttcacccagccattccctgaaggccttaccaacaggaatatccaagaagctgttgtcctctctcgaaccctgaccagatcatcagccactgaggccagtggaatttccccaggccttgttaaaacaaagaaagcattgtacttctcagattccccttgtggaaaaaaaaattctgctgtgaagatgaaaataaaaatggagagaaaacactggaaaactattttcccctcctatttacttcctttgctgactgccaacttagtgccaagaggaggtgtgatgacagctatggaggcccccagatctctctctcctggaggctttagcaggggcaaggaaatagtaggggaatctccagctctcttggcagggcctttatttaaagagcgcagagattcctatgtctccctagtgcccctaatgagactgccaagtgggggctgtagaaaagccttgccttccccagggattggcctggtctctgtattcactggatccataatgggttgctgttgttttggatgaaggtaaacgatgcttggaattggaaactgagacttatagagggattattacattattaaaatgcacgtgtgtgtgtgtgtgggtgctgatgggatgggtaaaggcttggggagtcctgaaataaggaaaggaaaccacagagaaacttgtgtcttcctgctctcctctccggctgcctggcagttattaacctaaacagatagccacaagaggttgggacagaggagggtaaaggctcagaaggaggttcaacctctgactcacctgcccatctctgggccctctgctgacacttggatgctattgttgggtggaaagataaatgagagtggagaggtggaggaaagtgactaggatgccatttaggaaggaatgtctgatcatcccgggtccctggaggggacaccttttaatctattgcctagcattaatattttctctccttctatctctgaaatgttttatgaaatgagtgttcttgaattagaaattctgtgggatcaatctttgatggtgagggttttagaaaggaaaaatatagtaaaatgtgtaatttgtcttaataaaatctatctctacatctatctctcttttgttgtccacttcatactgtgactacaagagaaggatggcagacttggtggggaggggagcgcttggactatacccatcagtaagccagtaatgcaaagagctttgaagtcaggcatgcaatggttaaaattccagttgttaacttacatctggactccagcaagacaatctctgagccttggtttcttcatctgtaaactgggccccattaatatctacctcatggggctgttaactgagctgttaagtacctcatagggctgttaactgagttgactgtaaagagtttagcagagtgcttgggaaataacagtcattacatggtaattgttgttattatctgattatttttgttattgttttgaatacacagtatttgaaaatgg

SEQ ID NO: 333688 - DNA, 2947 bp, Homo sapiens
cagtctccattttcaaacagtccctcctgggagaacacagacaggcagaggattacaacacaaggcagcaagcactgggagacgaaagttttggcatctgttccctggctgtgccaagatgggcgattggagcttcctgggaaatttcctggaggaagtacacaagcactcgaccgtggtaggcaaggtctggctcactgtcctcttcatattccgtatgctcgtgctgggcacagctgctgagtcttcctggggggatgagcaggctgatttccggtgtgatacgattcagcctggctgccagaatgtctgctacgaccaggctttccccatctcccacattcgctactgggtgctgcagatcatcttcgtctccacgccctctctggtgtacatgggccacgccatgcacactgtgcgcatgcaggagaagcgcaagctacgggaggccgagagggccaaagaggtccggggctctggctcttacgagtacccggtggcagagaaggcagaactgtcctgctgggaggaagggaatggaaggattgccctccagggcactctgctcaacacctatgtgtgcagcatcctgatccgcaccaccatggaggtgggcttcattgtgggccagtacttcatctacggaatcttcctgaccaccctgcatgtctgccgcaggagtccctgtccccacccggtcaactgttacgtatcccggcccacagagaagaatgtcttcattgtctttatgctggctgtggctgcactgtccctcctccttagcctggctgaactctaccacctgggctggaagaagatcagacagcgatttgtcaaaccgcggcagcacatggctaagtgccagctttctggcccctctgtgggcatagtccagagctgcacaccaccccccgactttaatcagtgcctggagaatggccctgggggaaaattcttcaatcccttcagcaataatatggcctcccaacaaaacacagacaacctgatcaccctccctcctccaaggaagagctcaaagttcccagccaatagacagcatgaatcaaggaacttgcattatatgtgctcttgaatctgttgtctccatggaccattcctcggagtagtggtgagatggccttgggttgcccttggcttctcctccctctactcagccttaaaaagggcttcttggaactttaccagcagcctcagctttacaaatgccttggtatgtacctctggcaaatgccccaccttggtgatgttgcaacctttccttctgctagggtgtacacctagcctgtgcaggtgtcagccctgctagggagtcactgtacacacaaactctactggaattcctgccaacatctgtcaccctgcagctcctttacagttcaatccaatgatagaaaccatcccttccctttctcccttggctgttcacccagccattccctgaaggccttaccaacaggaatatccaagaagctgttgtcctctctcgaaccctgaccagatcatcagccactgaggccagtggaatttccccaggccttgttaaaacaaagaaagcattgtacttctcagattccccttgtggaaaaaaaaattctgctgtgaagatgaaaataaaaatggagagaaaacactggaaaactattttcccctcctatttacttcctttgctgactgccaacttagtgccaagaggaggtgtgatgacagctatggaggcccccagatctctctctcctggaggctttagcaggggcaaggaaatagtaggggaatctccagctctcttggcagggcctttatttaaagagcgcagagattcctatgtctccctagtgcccctaatgagactgccaagtgggggctgtagaaaagccttgccttccccagggattggcctggtctctgtattcactggatccataatgggttgctgttgttttggatgaaggtaaacgatgcttggaattggaaactgagacttatagagggattattacattattaaaatgcacgtgtgtgtgtgtgtgggtgctgatgggatgggtaaaggcttggggagtcctgaaataaggaaaggaaaccacagagaaacttgtgtcttcctgctctcctctccggctgcctggcagttattaacctaaacagatagccacaagaggttgggacagaggagggtaaaggctcagaaggaggttcaacctctgactcacctgcccatctctgggccctctgctgacacttggatgctattgttgggtggaaagataaatgagagtggagaggtggaggaaagtgactaggatgccatttaggaaggaatgtctgatcatcccgggtccctggaggggacaccttttaatctattgcctagcattaatattttctctccttctatctctgaaatgttttatgaaatgagtgttcttgaattagaaattctgtgggatcaatctttgatggtgagggttttagaaaggaaaaatatagtaaaatgtgtaatttgtcttaataaaatctatctctacatctatctctcttttgttgtccacttcatactgtgactacaagagaaggatggcagacttggtggggaggggagcgcttggactatacccatcagtaagccagtaatgcaaagagctttgaagtcaggcatgcaatggttaaaattccagttgttaacttacatctggactccagcaagacaatctctgagccttggtttcttcatctgtaaactgggccccattaatatctacctcatggggctgttaactgagctgttaagtacctcatagggctgttaactgagttgactgtaaagagtttagcagagtgcttgggaaataacagtcattacatggtaattgttgttattatctgattatttttgttattgttttgaatacacagtatttgaaaatgg

SEQ ID NO: 333689 - DNA, 1653 bp, Homo sapiens
cgcatcttcgtcccatcaggatctataacctatttatttagatagaagtggcagtgaatcatattcatttgttatattcaagttggcagtattttattattgggacaaccataataatccttagcatatatgctgatgggggcaagactgcccagtcttgctcccatcaggccttaccaacaggaatatccaagaagctgttgtcctctctcgaaccctgaccagatcatcagccactgaggccagtggaatttccccaggccttgttaaaacaaagaaagcattgtacttctcagattccccttgtggaaaaaaaaattctgctgtgaagatgaaaataaaaatggagagaaaacactggaaaactattttcccctcctatttacttcctttgctgactgccaacttagtgccaagaggaggtgtgatgacagctatggaggcccccagatctctctctcctggaggctttagcaggggcaaggaaatagtaggggaatctccagctctcttggcagggcctttatttaaagagcgcagagattcctatgtctccctagtgcccctaatgagactgccaagtgggggctgtagaaaagccttgccttccccagggattggcctggtctctgtattcactggatccataatgggttgctgttgttttggatgaaggtaaacgatgcttggaattggaaactgagacttatagagggattattacattattaaaatgcacgtgtgtgtgtgtgtgggtgctgatgggatgggtaaaggcttggggagtcctgaaataaggaaaggaaaccacagagaaacttgtgtcttcctgctctcctctccggctgcctggcagttattaacctaaacagatagccacaagaggttgggacagaggagggtaaaggctcagaaggaggttcaacctctgactcacctgcccatctctgggccctctgctgacacttggatgctattgttgggtggaaagataaatgagagtggagaggtggaggaaagtgactaggatgccatttaggaaggaatgtctgatcatcccgggtccctggaggggacaccttttaatctattgcctagcattaatattttctctccttctatctctgaaatgttttatgaaatgagtgttcttgaattagaaattctgtgggatcaatctttgatggtgagggttttagaaaggaaaaatatagtaaaatgtgtaatttgtcttaataaaatctatctctacatctatctctcttttgttgtccacttcatactgtgactacaagagaaggatggcagacttggtggggaggggagcgcttggactatacccatcagtaagccagtaatgcaaagagctttgaagtcaggcatgcaatggttaaaattccagttgttaacttacatctggactccagcaagacaatctctgagccttggtttcttcatctgtaaactgggccccattaatatctacctcatggggctgttaactgagctgttaagtacctcatagggctgttaactgagttgactgtaaagagtttagcagagtgcttgggaaataacagtcattacatggtaattgttgttattatctgattatttttgttattgttttgaatacacagtatttgaaaatgg

SEQ ID NO: 333690 - DNA, 954 bp, Homo sapiens
  misc_feature (937)..(937): n is a, c, g, or t
aaaagcgtgggcagttggagaagaagcagccagagtgtgaagaagcccacggaagggaagtccaggaggaggaaaagaagcagaagttttggcatctgttccctggctgtgccaagatgggcgattggagcttcctgggaaatttcctggaggaagtacacaagcactcgaccgtggtaggcaaggtctggctcactgtcctcttcatattccgtatgctcgtgctgggcacagctgctgagtcttcctggggggatgagcaggctgatttccggtgtgatacgattcagcctggctgccagaatgtctgctacgaccaggctttccccatctcccacattcgctactgggtgctgcagatcatcttcgtctccacgccctctctggtgtacatgggccacgccatgcacactgtgcgcatgcaggagaagcgcaagctacgggaggccgagagggccaaagaggtccggggctctggctcttacgagtacccggtggcagagaaggcagaactgtcctgctgggaggaagggaatggaaggattgccctccagggcactctgctcaacacctatgtgtgcagcatcctgatccgcaccaccatggaggtgggcttcattgtgggccagtacttcatctacggaatcttcctgaccaccctgcatgtctgccgcaggagtccctgtccccacccggtcaactgttacgtatcccggcccacagagaagaatgtcttcattgtctttatgctggctgtggctgcactgtccctcctccttagcctggctgaactctaccacctgggctggaagaagatcagacagcgatttgtcaaaccgcggcagcacatggctaagtgccagctttctggcccctctgtgggcatagtccagagctgcacaccaccccccacctcatttccacccgacctcaattnaggatcctctagatcta

SEQ ID NO: 333691 - DNA, 3529 bp, Homo sapiens
cagtctccattttcaaacagtccctcctgggagaacacagacaggcagaggattacaacacaaggcagcaagcactgggagacgaaagttttggcatctgttccctggctgtgccaagatgggcgattggagcttcctgggaaatttcctggaggaagtacacaagcactcgaccgtggtaggcaaggtctggctcactgtcctcttcatattccgtatgctcgtgctgggcacagctgctgagtcttcctggggggatgagcaggctgatttccggtgtgatacgattcagcctggctgccagaatgtctgctacgaccaggctttccccatctcccacattcgctactgggtgctgcagatcatcttcgtctccacgccctctctggtgtacatgggccacgccatgcacactgtgcgcatgcaggagaagcgcaagctacgggaggccgagagggccaaagaggtccggggctctggctcttacgagtacccggtggcagagaaggcagaactgtcctgctgggaggaagggaatggaaggattgccctccagggcactctgctcaacacctatgtgtgcagcatcctgatccgcaccaccatggaggtgggcttcattgtgggccagtacttcatctacggaatcttcctgaccaccctgcatgtctgccgcaggagtccctgtccccacccggtcaactgttacgtatcccggcccacagagaagaatgtcttcattgtctttatgctggctgtggctgcactgtccctcctccttagcctggctgaactctaccacctgggctggaagaagatcagacagcgatttgtcaaaccgcggcagcacatggctaagtgccagctttctggcccctctgtgggcatagtccagagctgcacaccaccccccgactttaatcagtgcctggagaatggccctgggggaaaattcttcaatcccttcagcaataatatggcctcccaacaaaacacagacaacctggtcaccgagcaagtacgaggtcaggagcagactcctggggaaggtttcatccaggttcgttatggccagaagcctgaggtgcccaatggagtctcaccaggtcaccgccttccccatggctatcatagtgacaagcgacgtcttagtaaggccagcagcaaggcaaggtcagatgacctatcagtgtgaccctcctttatgggaggatcaggaccaggtgggaacaaaggaggctcagagaagaaagacgtgtcccttctgaactgatgctttctcactgtcatcactgcttggctcctttgagccccgggtctcaatgacgttgctcattaattctagaaactataaccagggctctgggatagtaagagaggtgacaacccacccagactgcagttccctccccaccctctacccagtatacgaagcctttcagattactcatgaaacagggtagagggaaagaagggaagcatggcaaaagctggcctggaagggatagccagagggatagaatgactctctctctacataccagcagcataccaaatgcgttctctaagttcctacctccttgacctgatcaccctccctcctccaaggaagagctcaaagttcccagccaatagacagcatgaatcaaggaacttgcattatatgtgctcttgaatctgttgtctccatggaccattcctcggagtagtggtgagatggccttgggttgcccttggcttctcctccctctactcagccttaaaaagggcttcttggaactttaccagcagcctcagctttacaaatgccttggtatgtacctctggcaaatgccccaccttggtgatgttgcaacctttccttctgctagggtgtacacctagcctgtgcaggtgtcagccctgctagggagtcactgtacacacaaactctactggaattcctgccaacatctgtcaccctgcagctcctttacagttcaatccaatgatagaaaccatcccttccctttctcccttggctgttcacccagccattccctgaaggccttaccaacaggaatatccaagaagctgttgtcctctctcgaaccctgaccagatcatcagccactgaggccagtggaatttccccaggccttgttaaaacaaagaaagcattgtacttctcagattccccttgtggaaaaaaaaattctgctgtgaagatgaaaataaaaatggagagaaaacactggaaaactattttcccctcctatttacttcctttgctgactgccaacttagtgccaagaggaggtgtgatgacagctatggaggcccccagatctctctctcctggaggctttagcaggggcaaggaaatagtaggggaatctccagctctcttggcagggcctttatttaaagagcgcagagattcctatgtctccctagtgcccctaatgagactgccaagtgggggctgtagaaaagccttgccttccccagggattggcctggtctctgtattcactggatccataatgggttgctgttgttttggatgaaggtaaacgatgcttggaattggaaactgagacttatagagggattattacattattaaaatgcacgtgtgtgtgtgtgtgggtgctgatgggatgggtaaaggcttggggagtcctgaaataaggaaaggaaaccacagagaaacttgtgtcttcctgctctcctctccggctgcctggcagttattaacctaaacagatagccacaagaggttgggacagaggagggtaaaggctcagaaggaggttcaacctctgactcacctgcccatctctgggccctctgctgacacttggatgctattgttgggtggaaagataaatgagagtggagaggtggaggaaagtgactaggatgccatttaggaaggaatgtctgatcatcccgggtccctggaggggacaccttttaatctattgcctagcattaatattttctctccttctatctctgaaatgttttatgaaatgagtgttcttgaattagaaattctgtgggatcaatctttgatggtgagggttttagaaaggaaaaatatagtaaaatgtgtaatttgtcttaataaaatctatctctacatctatctctcttttgttgtccacttcatactgtgactacaagagaaggatggcagacttggtggggaggggagcgcttggactatacccatcagtaagccagtaatgcaaagagctttgaagtcaggcatgcaatggttaaaattccagttgttaacttacatctggactccagcaagacaatctctgagccttggtttcttcatctgtaaactgggccccattaatatctacctcatggggctgttaactgagctgttaagtacctcatagggctgttaactgagttgactgtaaagagtttagcagagtgcttgggaaataacagtcattacatggtaattgttgttattatctgattatttttgttattgttttgaatacacagtatttgaaaatgg

SEQ ID NO: 333692 - DNA, 3172 bp, Homo sapiens
cagtctccattttcaaacagtccctcctgggagaacacagacaggcagaggattacaacacaaggcagcaagcactgggagacgaaagttttggcatctgttccctggctgtgccaagatgggcgattggagcttcctgggaaatttcctggaggaagtacacaagcactcgaccgtggtaggcaaggtctggctcactgtcctcttcatattccgtatgctcgtgctgggcacagctgctgagtcttcctggggggatgagcaggctgatttccggtgtgatacgattcagcctggctgccagaatgtctgctacgaccaggctttccccatctcccacattcgctactgggtgctgcagatcatcttcgtctccacgccctctctggtgtacatgggccacgccatgcacactgtgcgcatgcaggagaagcgcaagctacgggaggccgagagggccaaagaggtccggggctctggctcttacgagtacccggtggcagagaaggcagaactgtcctgctgggaggaagggaatggaaggattgccctccagggcactctgctcaacacctatgtgtgcagcatcctgatccgcaccaccatggaggtgggcttcattgtgggccagtacttcatctacggaatcttcctgaccaccctgcatgtctgccgcaggagtccctgtccccacccggtcaactgttacgtatcccggcccacagagaagaatgtcttcattgtctttatgctggctgtggctgcactgtccctcctccttagcctggctgaactctaccacctgggctggaagaagatcagacagcgatttgtcaaaccgcggcagcacatggctaagtgccagctttctggcccctctgtgggcatagtccagagctgcacaccaccccccgactttaatcagtgcctggagaatggccctgggggaaaattcttcaatcccttcagcaataatatggcctcccaacaaaacacagacaacctggtcaccgagcaagtacgaggtcaggagcagactcctggggaaggtttcatccaggttcgttatggccagaagcctgaggtgcccaatggagtctcaccaggtcaccgccttccccatggctatcatagtgacaagcgacgtcttagtaaggccagcagcaaggcaaggtcagatgacctatcagtgtgaccctcctttatgggaggatcaggaccaggtgggaacaaaggaggctcagagaagaaagacgtgtcccttctgaactgatgctttctcactgtcatcactgcttggctcctttgagccccgggtctcaatgacgttgctcattaattctagaaactataaccagggctctgggatagtaagagaggtgacaacccacccagactgcagttccctccccaccctctacccagtatacgaagcctttcagattactcatgaaacagggtagagggaaagaagggaagcatggcaaaagctggcctggaagggatagccagagggatagaatgactctctctctacataccagcagcataccaaatgcgttctctaagttcctacctccttgacctgatcaccctccctcctccaaggaagagctcaaagttcccagccaatagacagcatgaatcaaggaacttgcattatatgtgctcttgaatctgttgtctccatggaccattcctcggagtagtggtgagatggccttgggttgcccttggcttctcctccctctactcagccttaaaaagggcttcttggaactttaccagcagcctcagctttacaaatgccttggtatgtacctctggcaaatgccccaccttggtgatgttgcaacctttccttctgctagggtgtacacctagcctgtgcaggtgtcagccctgctagggagtcactgtacacacaaactctactggaattcctgccaacatctgtcaccctgcagctcctttacagttcaatccaatgatagaaaccatcccttccctttctcccttggctgttcacccagccattccctgaaggccttaccaacaggaatatccaagaagctgttgtcctctctcgaaccctgaccagatcatcagccactgaggccagtggaatttccccaggccttgttaaaacaaagaaagcattgtacttctcagattccccttgtggaaaaaaaaattctgctgtgaagatgaaaataaaaatggagagaaaacactggaaaactattttcccctcctatttacttcctttgctgactgccaacttagtgccaagaggaggtgtgatgacagctatggaggcccccagatctctctctcctggaggctttagcaggggcaaggaaatagtaggggaatctccagctctcttggcagggcctttatttaaagagcgcagagattcctatgtctccctagtgcccctaatgagactgccaagtgggggctgtagaaaagccttgccttccccagggattggcctggtctctgtattcactggatccataatgggttgctgttgttttggatgaaggtaaacgatgcttggaattggaaactgagacttatagagggattattacattattaaaatgcacgtgtgtgtgtgtgtgggtgctgatgggatgggtaaaggcttggggagtcctgaaataaggaaaggaaaccacagagaaacttgtgtcttcctgctctcctctccggctgcctggcagttattaacctaaacagatagccacaagaggttgggacagaggagggtaaaggctcagaaggaggttcaacctctgactcacctgcccatctctgggccctctgctgacacttggatgctattgttgggtggaaagataaatgagagtggagaggtggaggaaagtgactaggatgccatttaggaaggaatgtctgatcatcccgggtccctggaggggacaccttttaatctattgcctagcattaatattttctctccttctatctctgaaatgttttatgaaatgagtgttcttgaattagaaattctgtgggatcaatctttgatggtgagggttttagaaaggaaaaatatagtaaaatgtgtaatttgtcttaataaaatctatctctacatcatgaacaatcacatcatgaacaatcacatcatgaacaatca

SEQ ID NO: 333693 - DNA, 2644 bp, Homo sapiens
aaaagcgtgggcagttggagaagaagcagccagagtgtgaagaagcccacggaagggaagtccaggaggaggaaaagaagcagaagttttggcatctgttccctggctgtgccaagatgggcgattggagcttcctgggaaatttcctggaggaagtacacaagcactcgaccgtggtaggcaaggtctggctcactgtcctcttcatattccgtatgctcgtgctgggcacagctgctgagtcttcctggggggatgagcaggctgatttccggtgtgatacgattcagcctggctgccagaatgtctgctacgaccaggctttccccatctcccacattcgctactgggtgctgcagatcatcttcgtctccacgccctctctggtgtacatgggccacgccatgcacactgtgcgcatgcaggagaagcgcaagctacgggaggccgagagggccaaagaggtccggggctctggctcttacgagtacccggtggcagagaaggcagaactgtcctgctgggaggaagggaatggaaggattgccctccagggcactctgctcaacacctatgtgtgcagcatcctgatccgcaccaccatggaggtgggcttcattgtgggccagtacttcatctacggaatcttcctgaccaccctgcatgtctgccgcaggagtccctgtccccacccggtcaactgttacgtatcccggcccacagagaagaatgtcttcattgtctttatgctggctgtggctgcactgtccctcctccttagcctggctgaactctaccacctgggctggaagaagatcagacagcgatttgtcaaaccgcggcagcacatggctaagtgccagctttctggcccctctgtgggcatagtccagagctgcacaccaccccccgactttaatcagtgcctggagaatggccctgggggaaaattcttcaatcccttcagcaacctttccttctgctagggtgtacacctagcctgtgcaggtgtcagccctgctagggagtcactgtacacacaaactctactggaattcctgccaacatctgtcaccctgcagctcctttacagttcaatccaatgatagaaaccatcccttccctttctcccttggctgttcacccagccattccctgaaggccttaccaacaggaatatccaagaagctgttgtcctctctcgaaccctgaccagatcatcagccactgaggccagtggaatttccccaggccttgttaaaacaaagaaagcattgtacttctcagattccccttgtggaaaaaaaaattctgctgtgaagatgaaaataaaaatggagagaaaacactggaaaactattttcccctcctatttacttcctttgctgactgccaacttagtgccaagaggaggtgtgatgacagctatggaggcccccagatctctctctcctggaggctttagcaggggcaaggaaatagtaggggaatctccagctctcttggcagggcctttatttaaagagcgcagagattcctatgtctccctagtgcccctaatgagactgccaagtgggggctgtagaaaagccttgccttccccagggattggcctggtctctgtattcactggatccataatgggttgctgttgttttggatgaaggtaaacgatgcttggaattggaaactgagacttatagagggattattacattattaaaatgcacgtgtgtgtgtgtgtgggtgctgatgggatgggtaaaggcttggggagtcctgaaataaggaaaggaaaccacagagaaacttgtgtcttcctgctctcctctccggctgcctggcagttattaacctaaacagatagccacaagaggttgggacagaggagggtaaaggctcagaaggaggttcaacctctgactcacctgcccatctctgggccctctgctgacacttggatgctattgttgggtggaaagataaatgagagtggagaggtggaggaaagtgactaggatgccatttaggaaggaatgtctgatcatcccgggtccctggaggggacaccttttaatctattgcctagcattaatattttctctccttctatctctgaaatgttttatgaaatgagtgttcttgaattagaaattctgtgggatcaatctttgatggtgagggttttagaaaggaaaaatatagtaaaatgtgtaatttgtcttaataaaatctatctctacatctatctctcttttgttgtccacttcatactgtgactacaagagaaggatggcagacttggtggggaggggagcgcttggactatacccatcagtaagccagtaatgcaaagagctttgaagtcaggcatgcaatggttaaaattccagttgttaacttacatctggactccagcaagacaatctctgagccttggtttcttcatctgtaaactgggccccattaatatctacctcatggggctgttaactgagctgttaagtacctcatagggctgttaactgagttgactgtaaagagtttagcagagtgcttgggaaataacagtcattacatggtaattgttgttattatctgattatttttgttattgttttgaatacacagtatttgaaaatgg

SEQ ID NO: 333694 - DNA, 395 bp, Homo sapiens
cttgtgatccgcctgcctgggcctcccaaagtgctgggattacaggtgtgagctacgcctcagtgccaaactggtaccaggtgctctgctgggtttgtttcagcggatggtcagccagcccatgggtggatgctgtcattattgccattttacagtgggggaaactgaggcacatggggctgaaaaacctgcctgaggtcatactgccagaggtgggaaagctgggatccagcaggccctgtctggttcctgtctgcttccaggatctcagggcttggatgattcctgccttcagggaccattagtcagaaaggaaaacttaaaagggaggggacccagtggactctaaggccaacaagccatgggtgaggtatggatgagtcaggattctggac

SEQ ID NO: 333695 - DNA, 495 bp, Homo sapiens
tgaaacctgctcaatggaagtacctactctattggttgcttcccatatggttgtcactgtaccttcatactgcctcatttgaccctcatattagccctgtacagtagatgggtacactggtttgccaaaggagacctggaatccaaggtggaagtaagcagcaaagccagaaacttcaattctggtctgtctaccttgatagcctgcaccctcccctctaccgttttcttccactatttttgattccttaatgatgaatcatcctctcccttctagttggatttgtttctaatggcttccattacaaggataataatgaaactggtgaaaactttcaggcaaaaggattttctttttatattttttcttattattttttaattattaaccaaattaactcattacagtaaaaaggactgatttttaagccagctgtgatagctctgtaatagtctgtaatctcagcactttgggaggccaaggcgggcagatcgc

SEQ ID NO: 333696 - DNA, 2444 bp, Homo sapiens
aatacatggtctcgctctgttgcccaggctggagtgcggtggcgcgagcaccgcttactgcggtgtcgacctctcgggctcgagttatcctcccacctcagccttccaagtaggtgggaccacaggcaccaccactccaagcccgtatatggtttttaaataagacaaattgcaaaaaacgttgccagacagcgttcgctggtttgggccgtcactgggtatggctcgtgtccgtctagatattcagaggccgagcacagtcctcagtagggctgctcggcaggtacacagctgacgctggtccttggacttatgggagtgggaacaactttcaactcggccgcggaccaggaaggcgttctgacccgctagagctcggggacagggaccccatcccggtgcctagagcgtctcccttagtcggcgtgggccagcgccagttacctcacgagcactgaactagcgcctgcgcccttctatacttctcgctctttcttcaagtcacttctacccggcgagcccgccctcccgccaatcgtcatttccggcgggtgctctgcgtcatttacggtcgtcacttcctgccgatgccggtgtggacgctgtgaatcgtggctggcccggttctccgcttctccccatcccctactttcctccctccctccctttccctccctcgtcgactgttgcttgctggtcgcagactccctgacccctccctcacccctccctaacctcggtgccaccggattgcccttcttttcctgttgcccagcccagccctagtgtcagggcgggggcctggagcagcccgaggcactgcagcagaagagagaaaagacaacgacgaccctcagctcgccagtccggtcgctggcttcgccgccgccatggcaatgagacagacgccgctcacctgctctggccacacgcgacccgtggttgatttggccttcagtggcatcacgccttatgggtatttcttaatcagcgcttgcaaagatggtaaacctatgctacgccagggagatacaggagactggattggaacatttttgggtcataaaggtgctgtttggggtgcaacactgaataaggatgccaccaaagcagctacagcagctgcagatttcacagccaaagtgtgggatgctgtctcaggagatgaattgatgaccctggctcataaacacattgtcaagactgtggatttcacgcaggatagtaattatttgttaaccgggggacaggataaactgttacgcatatatgacttgaacaaacctgaagcagaacctaaggaaattagtggtcatacttctggtataaaaaaagctctgtggtgcagtgaggataaacagattctttctgctgatgacaaaactgttcgactttgggatcatgctactatgacagaagtgaaatctctaaattttaatatgtctgttagtagtatggaatatattcctgagggagagattttggttataacttatggacgatctattgcttttcatagtgcagtaagtttggacccaattaaatcctttgaagctcctgcaaccatcaattctgcatctcttcatcctgagaaagaatttcttgttgcaggcggtgaagattttaaactttataagtatgattataatagtggagaagaattagaatcctacaagggacactttggtcctattcactgtgtgagatttagtcctgatggagaactctatgccagtggttcagaagatggaacattgagactatggcaaactgtggtaggaaaaacgtatggcctttggaaatgtgtgcttcctgaagaagatagtggtgagctggcaaagccaaagattggttttccagagacaacagaagaggagctagaagaaattgcttcagagaattcagattgcatctttccttcagctcctgatgttaaggcctgagcgtcaatcatatgttgcagttagtatacaactgactaaaacaagcaagcagagaaaagcatcagccttccagagttactgtctgcttaaggcagaaacagcagtaaataatgaggaaaatgaattagctccagtgctggaacaactaactaacttggtgttacctgtaagtgaaaactcaagtgtcagatgaagggaggtggagttatcctcttatagtacagtggcctgttatctttttaatgaatatatacaagccaacatccaatttctattattacaattagggttcttgtagctgtttatgttaatatggagaagaaaactatattggctgattttttctgatcttaaagcagaatgccttttctttttttgcttcagttgtaaagaagagggaatacatgataaagtaactggtttgatttctcgttcattgtacactgcctctgaacatctaattgtttttagttgtctaaataaaatgcctctaaaacaaaa

SEQ ID NO: 333697 - DNA, 2378 bp, Homo sapiens
aatacatggtctcgctctgttgcccaggctggagtgcggtggcgcgagcaccgcttactgcggtgtcgacctctcgggctcgagttatcctcccacctcagccttccaagtaggtgggaccacaggcaccaccactccaagcccgtatatggtttttaaataagacaaattgcaaaaaacgttgccagacagcgttcgctggtttgggccgtcactgggtatggctcgtgtccgtctagatattcagaggccgagcacagtcctcagtagggctgctcggcaggtacacagctgacgctggtccttggacttatgggagtgggaacaactttcaactcggccgcggaccaggaaggcgttctgacccgctagagctcggggacagggaccccatcccggtgcctagagcgtctcccttagtcggcgtgggccagcgccagttacctcacgagcactgaactagcgcctgcgcccttctatacttctcgctctttcttcaagtcacttctacccggcgagcccgccctcccgccaatcgtcatttccggcgggtgctctgcgtcatttacggtcgtcacttcctgccgatgccggtgtggacgctgtgaatcgtggctggcccggttctccgcttctccccatcccctactttcctccctccctccctttccctccctcgtcgactgttgcttgctggtcgcagactccctgacccctccctcacccctccctaacctcggtgccaccggattgcccttcttttcctgttgcccagcccagccctagtgtcagggcgggggcctggagcagcccgaggcactgcagcagaagagagaaaagacaacgacgaccctcagctcgccagtccggtcgctggcttcgccgccgccatggcaatgagacagacgccgctcacctgctctggccacacgcgacccgtggttgatttggccttcagtggcatcacgccttatgggtatttcttaatcagcgcttgcaaagatggtaaacctatgctacgccagggagatacaggagactggattggaacatttttgggtcataaaggtgctgtttggggtgcaacactgaataaggatgccaccaaagcagctacagcagctgcagatttcacagccaaagtgtgggatgctgtctcaggagatgaattgatgaccctggctcataaacacattgtcaagactgtggatttcacgcaggatagtaattatttgttaaccgggggacaggataaactgttacgcatatatgacttgaacaaacctgaagcagaacctaaggaaattagtggtcatacttctggtataaaaaaagctctgtggtgcagtgaggataaacagattctttctgctgatgacaaaactgttcgactttgggatcatgctactatgacagaagtgaaatctctaaattttaatatgtctgttagtagtatggaatatattcctgagggagagattttggttataacttatggacgatctattgcttttcatagtgcagtaagtttggacccaattaaatcctttgaagctcctgcaaccatcaattctgcatctcttcatcctgagaaagaatttcttgttgcaggcggtgaagattttaaactttataagtatgattataatagtggagaagaattagaatcctacaagggacactttggtcctattcactgtgtgagatttagtcctgatggagaactctatgccagtggttcagaagatggaacattgagactatggcaaactgtggtaggaaaaacgtatggcctttggaaatgtgtgcttcctgaagaaattgcttcagagaattcagattgcatctttccttcagctcctgatgttaaggcctgagcgtcaatcatatgttgcagttagtatacaactgactaaaacaagcaagcagagaaaagcatcagccttccagagttactgtctgcttaaggcagaaacagcagtaaataatgaggaaaatgaattagctccagtgctggaacaactaactaacttggtgttacctgtaagtgaaaactcaagtgtcagatgaagggaggtggagttatcctcttatagtacagtggcctgttatctttttaatgaatatatacaagccaacatccaatttctattattacaattagggttcttgtagctgtttatgttaatatggagaagaaaactatattggctgattttttctgatcttaaagcagaatgccttttctttttttgcttcagttgtaaagaagagggaatacatgataaagtaactggtttgatttctcgttcattgtacactgcctctgaacatctaattgtttttagttgtctaaataaaatgcctctaaaacaaaa

SEQ ID NO: 333698 - DNA, 2085 bp, Homo sapiens
aatacatggtctcgctctgttgcccaggctggagtgcggtggcgcgagcaccgcttactgcggtgtcgacctctcgggctcgagttatcctcccacctcagccttccaagtaggtgggaccacaggcaccaccactccaagcccgtatatggtttttaaataagacaaattgcaaaaaacgttgccagacagcgttcgctggtttgggccgtcactgggtatggctcgtgtccgtctagatattcagaggccgagcacagtcctcagtagggctgctcggcaggtacacagctgacgctggtccttggacttatgggagtgggaacaactttcaactcggccgcggaccaggaaggcgttctgacccgctagagctcggggacagggaccccatcccggtgcctagagcgtctcccttagtcggcgtgggccagcgccagttacctcacgagcactgaactagcgcctgcgcccttctatacttctcgctctttcttcaagtcacttctacccggcgagcccgccctcccgccaatcgtcatttccggcgggtgctctgcgtcatttacggtcgtcacttcctgccgatgccggtgtggacgctgtgaatcgtggctggcccggttctccgcttctccccatcccctactttcctccctccctccctttccctccctcgtcgactgttgcttgctggtcgcagactccctgacccctccctcacccctccctaacctcggtgccaccggattgcccttcttttcctgttgcccagcccagccctagtgtcagggcgggggcctggagcagcccgaggcactgcagcagaagagagaaaagacaacgacgaccctcagctcgccagtccggtcgctggcttcgccgccgccatggcaatgagacagacgccgctcacctgctctggccacacgcgacccgtggttgatttggccttcagtggcatcacgccttatgggtatttcttaatcagcgcttgcaaagatggtaaacctatgctacgccagggagatacaggagactggattggaacatttttgggtcataaaggtgctgtttggggtgcaacactgaataaggatgccaccaaagcagctacagcagctgcagatttcacagccaaagtgtgggatgctgtctcaggagatgaattgatgaccctggctcataaacacattgtcaagactgtggatttcacgcaggatagtaattatttgttaaccgggggacaggataaactgttacgcatatatgacttgaacaaacctgaagcagaacctaaggaaattagtggtcatacttctggtataaaaaaagctctgtggtgcagtgaggataaacagattctttctgctgatgacaaaactgttcgactttgggatcatgctactatgacagaagtgaaatctctaaattttaatatgtctgttagtagtatggaatatattcctgagggagagattttggttataacttatggacgatctattgcttttcatagtgcagtaagtttggacccaattaaatcctttgaagctcctgcaaccatcaattctgcatctcttcatcctgagaaagaatttcttgttgcaggcggtgaagattttaaactttataagtatgattataatagtggagaagaattagaatcctacaagggacactttggtcctattcactgtgtgagatttagtcctgatggagaactctatgccagtggttcagaagatggaacattgagactatggcaaactgtggtaggaaaaacgtatggcctttggaaatgtgtgcttcctgaagaagatagtggtgagctggcaaagccaaagattggttttccagagacaacagaagaggagctagaagaaattgcttcagagaattcagattgcatctttccttcagctcctgatgttaaggcctgagcgtcaatcatatgttgcagttagtatacaactgactaaaacaagcaagcagagaaaagcatcagccttccagagtcaactgcattcagagagctcaatgtctgagttatctttggacaggcttaatccacttcttgacatc

SEQ ID NO: 333699 - DNA, 2341 bp, Homo sapiens
aatacatggtctcgctctgttgcccaggctggagtgcggtggcgcgagcaccgcttactgcggtgtcgacctctcgggctcgagttatcctcccacctcagccttccaagtaggtgggaccacaggcaccaccactccaagcccgtatatggtttttaaataagacaaattgcaaaaaacgttgccagacagcgttcgctggtttgggccgtcactgggtatggctcgtgtccgtctagatattcagaggccgagcacagtcctcagtagggctgctcggcaggtacacagctgacgctggtccttggacttatgggagtgggaacaactttcaactcggccgcggaccaggaaggcgttctgacccgctagagctcggggacagggaccccatcccggtgcctagagcgtctcccttagtcggcgtgggccagcgccagttacctcacgagcactgaactagcgcctgcgcccttctatacttctcgctctttcttcaagtcacttctacccggcgagcccgccctcccgccaatcgtcatttccggcgggtgctctgcgtcatttacggtcgtcacttcctgccgatgccggtgtggacgctgtgaatcgtggctggcccggttctccgcttctccccatcccctactttcctccctccctccctttccctccctcgtcgactgttgcttgctggtcgcagactccctgacccctccctcacccctccctaacctcggtgccaccggattgcccttcttttcctgttgcccagcccagccctagtgtcagggcgggggcctggagcagcccgaggcactgcagcagaagagagaaaagacaacgacgaccctcagctcgccagtccggtcgctggcttcgccgccgccatggcaatgagacagacgccgctcacctgctctggccacacgcgacccgtggttgatttggccttcagtggcatcacgccttatgggtatttcttaatcagcgcttgcaaagatggtaaacctatgctacgccagggagatacaggagactggattggaacatttttgggtcataaaggtgctgtttggggtgcaacaacattgtcaagactgtggatttcacgcaggatagtaattatttgttaaccgggggacaggataaactgttacgcatatatgacttgaacaaacctgaagcagaacctaaggaaattagtggtcatacttctggtataaaaaaagctctgtggtgcagtgaggataaacagattctttctgctgatgacaaaactgttcgactttgggatcatgctactatgacagaagtgaaatctctaaattttaatatgtctgttagtagtatggaatatattcctgagggagagattttggttataacttatggacgatctattgcttttcatagtgcagtaagtttggacccaattaaatcctttgaagctcctgcaaccatcaattctgcatctcttcatcctgagaaagaatttcttgttgcaggcggtgaagattttaaactttataagtatgattataatagtggagaagaattagaatcctacaagggacactttggtcctattcactgtgtgagatttagtcctgatggagaactctatgccagtggttcagaagatggaacattgagactatggcaaactgtggtaggaaaaacgtatggcctttggaaatgtgtgcttcctgaagaagatagtggtgagctggcaaagccaaagattggttttccagagacaacagaagaggagctagaagaaattgcttcagagaattcagattgcatctttccttcagctcctgatgttaaggcctgagcgtcaatcatatgttgcagttagtatacaactgactaaaacaagcaagcagagaaaagcatcagccttccagagttactgtctgcttaaggcagaaacagcagtaaataatgaggaaaatgaattagctccagtgctggaacaactaactaacttggtgttacctgtaagtgaaaactcaagtgtcagatgaagggaggtggagttatcctcttatagtacagtggcctgttatctttttaatgaatatatacaagccaacatccaatttctattattacaattagggttcttgtagctgtttatgttaatatggagaagaaaactatattggctgattttttctgatcttaaagcagaatgccttttctttttttgcttcagttgtaaagaagagggaatacatgataaagtaactggtttgatttctcgttcattgtacactgcctctgaacatctaattgtttttagttgtctaaataaaatgcctctaaaacaaaa

SEQ ID NO: 333700 - DNA, 1641 bp, Homo sapiens
taacagattcaaatacactaaaactctcccagagttaaatgttgttttcccactctggaaaagggaaattatggcttcgccgccgccatggcaatgagacagacgccgctcacctgctctggccacacgcgacccgtggttgatttggccttcagtggcatcacgccttatgggtatttcttaatcagcgcttgcaaagatggtaaacctatgctacgccagggagatacaggagactggattggaacatttttgggtcataaaggtgctgtttggggtgcaacactgaataaggatgccaccaaagcagctacagcagctgcagatttcacagccaaagtgtgggatgctgtctcaggagatgaattgatgaccctggctcataaacacattgtcaagactgtggatttcacgcaggatagtaattatttgttaaccgggggacaggataaactgttacgcatatatgacttgaacaaacctgaagcagaacctaaggaaattagtggtcatacttctggtataaaaaaagctctgtggtgcagtgaggataaacagattctttctgctgatgacaaaactgttcgactttgggatcatgctactatgacagaagtgaaatctctaaattttaatatgtctgttagtagtatggaatatattcctgagggagagattttggttataacttatggacgatctattgcttttcatagtgcagtaagtttggacccaattaaatcctttgaagctcctgcaaccatcaattctgcatctcttcatcctgagaaagaatttcttgttgcaggcggtgaagattttaaactttataagtatgattataatagtggagaagaattagaatcctacaagggacactttggtcctattcactgtgtgagatttagtcctgatggagaactctatgccagtggttcagaagatggaacattgagactatggcaaactgtggtaggaaaaacgtatggcctttggaaatgtgtgcttcctgaagaagatagtggtgagctggcaaagccaaagattggttttccagagacaacagaagaggagctagaagaaattgcttcagagaattcagattgcatctttccttcagctcctgatgttaaggcctgagcgtcaatcatatgttgcagttagtatacaactgactaaaacaagcaagcagagaaaagcatcagccttccagagttactgtctgcttaaggcagaaacagcagtaaataatgaggaaaatgaattagctccagtgctggaacaactaactaacttggtgttacctgtaagtgaaaactcaagtgtcagatgaagggaggtggagttatcctcttatagtacagtggcctgttatctttttaatgaatatatacaagccaacatccaatttctattattacaattagggttcttgtagctgtttatgttaatatggagaagaaaactatattggctgattttttctgatcttaaagcagaatgccttttctttttttgcttcagttgtaaagaagagggaatacatgataaagtaactggtttgatttctcgttcattgtacactgcctctgaacatctaattgtttttagttgtctaaataaaatgcctctaaaacaaaa

SEQ ID NO: 333701 - DNA, 987 bp, Homo sapiens
gttacaggagcttcaaaggatttattgggtcaaacttactgcactatgaaaagcaatagatcgtccataagtttggacccaattaaatcctttgaagctcctgcaaccatcaattctgcatctcttcatcctgagaaagaatttcttgttgcaggcggtgaagattttaaactttataagtatgattataatagtggagaagaattagaatcctacaagggacactttggtcctattcactgtgtgagatttagtcctgatggagaactctatgccagtggttcagaagatggaacattgagactatggcaaactgtggtaggaaaaacgtatggcctttggaaatgtgtgcttcctgaagaagatagtggtgagctggcaaagccaaagattggttttccagagacaacagaagaggagctagaagaaattgcttcagagaattcagattgcatctttccttcagctcctgatgttaaggcctgagcgtcaatcatatgttgcagttagtatacaactgactaaaacaagcaagcagagaaaagcatcagccttccagagttactgtctgcttaaggcagaaacagcagtaaataatgaggaaaatgaattagctccagtgctggaacaactaactaacttggtgttacctgtaagtgaaaactcaagtgtcagatgaagggaggtggagttatcctcttatagtacagtggcctgttatctttttaatgaatatatacaagccaacatccaatttctattattacaattagggttcttgtagctgtttatgttaatatggagaagaaaactatattggctgattttttctgatcttaaagcagaatgccttttctttttttgcttcagttgtaaagaagagggaatacatgataaagtaactggtttgatttctcgttcattgtacactgcctctgaacatctaattgtttttagttgtctaaataaaatgcctctaaaacaaaa

SEQ ID NO: 333702 - DNA, 1531 bp, Homo sapiens
  misc_feature (1397)..(1397): n is a, c, g, or t
  misc_feature (1404)..(1404): n is a, c, g, or t
  misc_feature (1441)..(1441): n is a, c, g, or t
  misc_feature (1492)..(1492): n is a, c, g, or t
  misc_feature (1504)..(1504): n is a, c, g, or t
  misc_feature (1522)..(1522): n is a, c, g, or t
aatacatggtctcgctctgttgcccaggctggagtgcggtggcgcgagcaccgcttactgcggtgtcgacctctcgggctcgagttatcctcccacctcagccttccaagtaggtgggaccacaggcaccaccactccaagcccgtatatggtttttaaataagacaaattgcaaaaaacgttgccagacagcgttcgctggtttgggccgtcactgggtatggctcgtgtccgtctagatattcagaggccgagcacagtcctcagtagggctgctcggcaggtacacagctgacgctggtccttggacttatgggagtgggaacaactttcaactcggccgcggaccaggaaggcgttctgacccgctagagctcggggacagggaccccatcccggtgcctagagcgtctcccttagtcggcgtgggccagcgccagttacctcacgagcactgaactagcgcctgcgcccttctatacttctcgctctttcttcaagtcacttctacccggcgagcccgccctcccgccaatcgtcatttccggcgggtgctctgcgtcatttacggtcgtcacttcctgccgatgccggtgtggacgctgtgaatcgtggctggcccggttctccgcttctccccatcccctactttcctccctccctccctttccctccctcgtcgactgttgcttgctggtcgcagactccctgacccctccctcacccctccctaacctcggtgccaccggattgcccttcttttcctgttgcccagcccagccctagtgtcagggcgggggcctggagcagcccgaggcactgcagcagaagagagaaaagacaacgacgaccctcagctcgccagtccggtcgctggcttcgccgccgccatggcaatgagacagacgccgctcacctgctctggccacacgcgacccgtggttgatttggccttcagtggcatcacgccttatgggtatttcttaatcagcgcttgcaaagatggtaaacctatgctacgccagggagatacaggagactggattggaacatttttgggtcataaaggtgctgtttggggtgcaacactgaataaggatgccaccaaagcagctacagcagctgcagatttcacagccaaagtgtgggatgctgtctcaggagatgaattgatgaccctggctcataaacacattgtcaagactgtggatttcacgcaggatagtaattatttgttaaccgggggacaggataaactgttacgcatatatgacttgaacaaacctgaagcagaacctaaggaaattagtggtcatacttctggtataaaaaaagctctgtggtgcagtgaggataaacagattctttctgctgatgacaaaactgttcgaactttnggggatnattgcctacctattgaacagaaaatttgaaaatctcntcaaatttttaaataatgtttttgtttaagtaattttgggaaattattttnccctgaaagggnaaaaaaatttttgggttntttaactta

SEQ ID NO: 333703 - DNA, 1077 bp, Homo sapiens
aatacatggtctcgctctgttgcccaggctggagtgcggtggcgcgagcaccgcttactgcggtgtcgacctctcgggctcgagttatcctcccacctcagccttccaagtaggtgggaccacaggcaccaccactccaagcccgtatatggtttttaaataagacaaattgcaaaaaacgttgccagacagcgttcgctggtttgggccgtcactgggtatggctcgtgtccgtctagatattcagaggccgagcacagtcctcagtagggctgctcggcaggtacacagctgacgctggtccttggacttatgggagtgggaacaactttcaactcggccgcggaccaggaaggcgttctgacccgctagagctcggggacagggaccccatcccggtgcctagagcgtctcccttagtcggcgtgggccagcgccagttacctcacgagcactgaactagcgcctgcgcccttctatacttctcgctctttcttcaagtcacttctacccggcgagcccgccctcccgccaatcgtcatttccggcgggtgctctgcgtcatttacggtcgtcacttcctgccgatgccggtgtggacgctgtgaatcgtggctggcccggttctccgcttctccccatcccctactttcctccctccctccctttccctccctcgtcgactgttgcttgctggtcgcagactccctgacccctccctcacccctccctaacctcggtgccaccggattgcccttcttttcctgttgcccagcccagccctagtgtcagggcgggggcctggagcagcccgaggcactgcagcagaagagagaaaagacaacgacgaccctcagctcgccagtccggtcgctggcttcgccgccgccatggcaatgagacagacgccgctcacctgctctggccacacgcgacccgtggttgatttggccttcagtggcatcacgccttatgggtatttcttaatcagcgcttgcaaagatggtaaacctatgctacgcaatgagagatttcgtaaagagtgttttagatcaccccctccccaatgagagattt

SEQ ID NO: 333704 - DNA, 757 bp, Homo sapiens
aagaagatagtggtgagctggcaaagccaaagattggttttccagagacaacagaagaggagctaggtaaatgctatggaattgacttttgtaagagtcttgggggatttaaaattgaactgtaacagaagttttactcattggcagaagaaatttattaaatatgaacatatttaaataatggaaactttaaatatttatgcatgtatatatacatatttataagctaaatatttaaatacctactgcatagtagtaataggcacagagatgtagtatggacacaaccgatgtggttactctttcagagctagagtctaacttaggagacatgccaaaacacaaattattgtaagggggattaaaaaaagcttcctagagaagtgacatttaaactgggaactaaggatgagcagaaatgatttaggtgaggtcatgagagggggtgttggtagggacaggatggaaaagttcatagcaggaaaactatgttaactaaaagttcagaaccaaaaaggagcatagcatatgaggaactaaaagaacttctccatgcctccaggttaaagagcaaaggcaaagtgaagctggagaagctagatcatctgagggcctcatttgctgtattaggacttggagagttttatactaagagcaatgagaaacctttgaattttaagaagaggactttaaaagattgccttggtagttcaagaccaacctggccaacatggtgaaaccctgtctctactaaaaa

SEQ ID NO: 333705 - DNA, 2888 bp, Homo sapiens
  misc_feature (2544)..(2544): n is a, c, g, or t
  misc_feature (2888)..(2888): n is a, c, g, or t
aatacatggtctcgctctgttgcccaggctggagtgcggtggcgcgagcaccgcttactgcggtgtcgacctctcgggctcgagttatcctcccacctcagccttccaagtaggtgggaccacaggcaccaccactccaagcccgtatatggtttttaaataagacaaattgcaaaaaacgttgccagacagcgttcgctggtttgggccgtcactgggtatggctcgtgtccgtctagatattcagaggccgagcacagtcctcagtagggctgctcggcaggtacacagctgacgctggtccttggacttatgggagtgggaacaactttcaactcggccgcggaccaggaaggcgttctgacccgctagagctcggggacagggaccccatcccggtgcctagagcgtctcccttagtcggcgtgggccagcgccagttacctcacgagcactgaactagcgcctgcgcccttctatacttctcgctctttcttcaagtcacttctacccggcgagcccgccctcccgccaatcgtcatttccggcgggtgctctgcgtcatttacggtcgtcacttcctgccgatgccggtgtggacgctgtgaatcgtggctggcccggttctccgcttctccccatcccctactttcctccctccctccctttccctccctcgtcgactgttgcttgctggtcgcagactccctgacccctccctcacccctccctaacctcggtgccaccggattgcccttcttttcctgttgcccagcccagccctagtgtcagggcgggggcctggagcagcccgaggcactgcagcagaagagagaaaagacaacgacgaccctcagctcgccagtccggtcgctggcttcgccgccgccatggcaatgagacagacgccgctcacctgctctggccacacgcgacccgtggttgatttggccttcagtggcatcacgccttatgggtatttcttaatcagcgcttgcaaagatggtaaacctatgctacgccagggagatacaggagactggattggaacatttttgggtcataaaggtgctgtttggggtgcaacactgaataaggatgccaccaaagcagctacagcagctgcagatttcacagccaaagtgtgggatgctgtctcaggagatgaattgatgaccctggctcataaacacattgtcaagactgtggatttcacgcaggatagtaattatttgttaaccgggggacaggataaactgttacgcatatatgacttgaacaaacctgaagcagaacctaaggaaattagtggtcatacttctggtataaaaaaagctctgtggtgcagtgaggataaacagattctttctgctgatgacaaaactgttcgactttgggatcatgctactatgacagaagtgaaatctctaaattttaatatgtctgttagtagtatggaatatattcctgagggagagattttggttataacttatggacgatctattgcttttcatagtgcagtaagtttggacccaattaaatcctttgaagctcctgcaaccatcaattctgcatctcttcatcctgagaaagaatttcttgttgcaggcggtgaagattttaaactttataagtatgattataatagtggagaagaattagaatcctacaagggacactttggtcctattcactgtgtgagatttagtcctgatggagaactctatgccagtggttcagaagatggaacattgagactatggcaaactgtggtaggaaaaacgtatggcctttggaaatgtgtgcttcctgaagaagatagtggtgagctggcaaagccaaagattggttttccagagacaacagaagaggagctagaagaaattgcttcagagaattcagattgcatctttccttcagctcctgatgttaaggcctgagcgtcaatcatatgttgcagttagtatacaactgactaaaacaagcaagcagagaaaagcatcagccttccagagttactgtctgcttaaggcagaaacagcagtaaataatgaggaaaatgaattagctccagtgctggaacaactaactaacttggtgttacctgtaagtgaaaactcaagtgtcagatgaagggaggtggagttatcctcttatagtacagtggcctgttatctttttaatgaatatatacaagccaacatccaatttctattattacaattagggttcttgtagctgtttatgttaatatggagaagaaaactatattggctgattttttctgatcttaaagcagaatgccttttctttttttgcttcagttgtaaagaagagggaatacatgataaagtaactggtttgatttctcgttcattgtacactgcctctgaacatctaattgtttttagttgtctaaataaaatgcctctaaaacaaaaaaaaaaaaaccgggggctcaatgcgggggcgggaaggggtaggaagggcccggtcctagggttccggacccagttttgtgtccaggggggaattgggggngccccataggaggcagataaatggatagcagacacgtatcatacgacacacagcacacgaacagagcgcgaatacatcaccggggcaacagaacaacacacgacgagacacaaacacagcagaggacgactgactagtcggagcgcgacataaaggtagagtctaccccgtctggaaacggggacgacagaggacggagcgcgccgctgcaacacgagcctgagacacagcaaacagtggacggagcgaaagcagagacagcggacgacggcgcgcacgatcggcggcaggcacgcagcgagagcacgcactaacggacatgcgcagcgagagcaggacgcagn

SEQ ID NO: 333706 - DNA, 2387 bp, Homo sapiens
aatacatggtctcgctctgttgcccaggctggagtgcggtggcgcgagcaccgcttactgcggtgtcgacctctcgggctcgagttatcctcccacctcagccttccaagtaggtgggaccacaggcaccaccactccaagcccgtatatggtttttaaataagacaaattgcaaaaaacgttgccagacagcgttcgctggtttgggccgtcactgggtatggctcgtgtccgtctagatattcagaggccgagcacagtcctcagtagggctgctcggcaggtacacagctgacgctggtccttggacttatgggagtgggaacaactttcaactcggccgcggaccaggaaggcgttctgacccgctagagctcggggacagggaccccatcccggtgcctagagcgtctcccttagtcggcgtgggccagcgccagttacctcacgagcactgaactagcgcctgcgcccttctatacttctcgctctttcttcaagtcacttctacccggcgagcccgccctcccgccaatcgtcatttccggcgggtgctctgcgtcatttacggtcgtcacttcctgccgatgccggtgtggacgctgtgaatcgtggctggcccggttctccgcttctccccatcccctactttcctccctccctccctttccctccctcgtcgactgttgcttgctggtcgcagactccctgacccctccctcacccctccctaacctcggtgccaccggattgcccttcttttcctgttgcccagcccagccctagtgtcagggcgggggcctggagcagcccgaggcactgcagcagaagagagaaaagacaacgacgaccctcagctcgccagtccggtcgctggcttcgccgccgccatggcaatgagacagacgccgctcacctgctctggccacacgcgacccgtggttgatttggccttcagtggcatcacgccttatgggtatttcttaatcagcgcttgcaaagatggtaaacctatgctacgccagggagatacaggagactggattggaacatttttgggtcataaaggtgctgtttggggtgcaacactgaataaggatgccaccaaagcagctacagcagctgcagatttcacagccaaagtgtgggatgctgtctcaggagatgaattgatgaccctggctcataaacacattgtcaagactgtggatttcacgcaggatagtaattatttgttaaccgggggacaggataaactgttacgcatatatgacttgaacaaacctgaagcagaacctaaggaaattagtggtcatacttctggtataaaaaaagctctgtggtgcagtgaggataaacagattctttctgctgatgacaaaactgttcgactttgggatcatgctactatgacagaagtgaaatctctaaattttaatatgtctgttagtagtatggaatatattcctgagggagagattttggttataacttatggacgatctattgcttttcatagtgcagtaagtttggacccaattaaatcctttgaagctcctgcaaccatcaattctgcatctcttcatcctgagaaagaatttcttgttgcaggcggtgaagattttaaactttataagtatgattataatagtggagaagaattagaactctatgccagtggttcagaagatggaacattgagactatggcaaactgtggtaggaaaaacgtatggcctttggaaatgtgtgcttcctgaagaagatagtggtgagctggcaaagccaaagattggttttccagagacaacagaagaggagctagaagaaattgcttcagagaattcagattgcatctttccttcagctcctgatgttaaggcctgagcgtcaatcatatgttgcagttagtatacaactgactaaaacaagcaagcagagaaaagcatcagccttccagagttactgtctgcttaaggcagaaacagcagtaaataatgaggaaaatgaattagctccagtgctggaacaactaactaacttggtgttacctgtaagtgaaaactcaagtgtcagatgaagggaggtggagttatcctcttatagtacagtggcctgttatctttttaatgaatatatacaagccaacatccaatttctattattacaattagggttcttgtagctgtttatgttaatatggagaagaaaactatattggctgattttttctgatcttaaagcagaatgccttttctttttttgcttcagttgtaaagaagagggaatacatgataaagtaactggtttgatttctcgttcattgtacactgcctctgaacatctaattgtttttagttgtctaaataaaatgcctctaaaacaaaa

SEQ ID NO: 333707 - DNA, 2308 bp, Homo sapiens
aatacatggtctcgctctgttgcccaggctggagtgcggtggcgcgagcaccgcttactgcggtgtcgacctctcgggctcgagttatcctcccacctcagccttccaagtaggtgggaccacaggcaccaccactccaagcccgtatatggtttttaaataagacaaattgcaaaaaacgttgccagacagcgttcgctggtttgggccgtcactgggtatggctcgtgtccgtctagatattcagaggccgagcacagtcctcagtagggctgctcggcaggtacacagctgacgctggtccttggacttatgggagtgggaacaactttcaactcggccgcggaccaggaaggcgttctgacccgctagagctcggggacagggaccccatcccggtgcctagagcgtctcccttagtcggcgtgggccagcgccagttacctcacgagcactgaactagcgcctgcgcccttctatacttctcgctctttcttcaagtcacttctacccggcgagcccgccctcccgccaatcgtcatttccggcgggtgctctgcgtcatttacggtcgtcacttcctgccgatgccggtgtggacgctgtgaatcgtggctggcccggttctccgcttctccccatcccctactttcctccctccctccctttccctccctcgtcgactgttgcttgctggtcgcagactccctgacccctccctcacccctccctaacctcggtgccaccggattgcccttcttttcctgttgcccagcccagccctagtgtcagggcgggggcctggagcagcccgaggcactgcagcagaagagagaaaagacaacgacgaccctcagctcgccagtccggtcgctggcttcgccgccgccatggcaatgagacagacgccgctcacctgctctggccacacgcgacccgtggttgatttggccttcagtggcatcacgccttatgggtatttcttaatcagcgcttgcaaagcaaagtgtgggatgctgtctcaggagatgaattgatgaccctggctcataaacacattgtcaagactgtggatttcacgcaggatagtaattatttgttaaccgggggacaggataaactgttacgcatatatgacttgaacaaacctgaagcagaacctaaggaaattagtggtcatacttctggtataaaaaaagctctgtggtgcagtgaggataaacagattctttctgctgatgacaaaactgttcgactttgggatcatgctactatgacagaagtgaaatctctaaattttaatatgtctgttagtagtatggaatatattcctgagggagagattttggttataacttatggacgatctattgcttttcatagtgcagtaagtttggacccaattaaatcctttgaagctcctgcaaccatcaattctgcatctcttcatcctgagaaagaatttcttgttgcaggcggtgaagattttaaactttataagtatgattataatagtggagaagaattagaatcctacaagggacactttggtcctattcactgtgtgagatttagtcctgatggagaactctatgccagtggttcagaagatggaacattgagactatggcaaactgtggtaggaaaaacgtatggcctttggaaatgtgtgcttcctgaagaagatagtggtgagctggcaaagccaaagattggttttccagagacaacagaagaggagctagaagaaattgcttcagagaattcagattgcatctttccttcagctcctgatgttaaggcctgagcgtcaatcatatgttgcagttagtatacaactgactaaaacaagcaagcagagaaaagcatcagccttccagagttactgtctgcttaaggcagaaacagcagtaaataatgaggaaaatgaattagctccagtgctggaacaactaactaacttggtgttacctgtaagtgaaaactcaagtgtcagatgaagggaggtggagttatcctcttatagtacagtggcctgttatctttttaatgaatatatacaagccaacatccaatttctattattacaattagggttcttgtagctgtttatgttaatatggagaagaaaactatattggctgattttttctgatcttaaagcagaatgccttttctttttttgcttcagttgtaaagaagagggaatacatgataaagtaactggtttgatttctcgttcattgtacactgcctctgaacatctaattgtttttagttgtctaaataaaatgcctctaaaacaaaa

SEQ ID NO: 333708 - DNA, 2453 bp, Homo sapiens
aatacatggtctcgctctgttgcccaggctggagtgcggtggcgcgagcaccgcttactgcggtgtcgacctctcgggctcgagttatcctcccacctcagccttccaagtaggtgggaccacaggcaccaccactccaagcccgtatatggtttttaaataagacaaattgcaaaaaacgttgccagacagcgttcgctggtttgggccgtcactgggtatggctcgtgtccgtctagatattcagaggccgagcacagtcctcagtagggctgctcggcaggtacacagctgacgctggtccttggacttatgggagtgggaacaactttcaactcggccgcggaccaggaaggcgttctgacccgctagagctcggggacagggaccccatcccggtgcctagagcgtctcccttagtcggcgtgggccagcgccagttacctcacgagcactgaactagcgcctgcgcccttctatacttctcgctctttcttcaagtcacttctacccggcgagcccgccctcccgccaatcgtcatttccggcgggtgctctgcgtcatttacggtcgtcacttcctgccgatgccggtgtggacgctgtgaatcgtggctggcccggttctccgcttctccccatcccctactttcctccctccctccctttccctccctcgtcgactgttgcttgctggtcgcagactccctgacccctccctcacccctccctaacctcggtgccaccggattgcccttcttttcctgttgcccagcccagccctagtgtcagggcgggggcctggagcagcccgaggcactgcagcagaagagagaaaagacaacgacgaccctcagctcgccagtccggtcgctggcttcgccgccgccatggcaatgagacagacgccgctcacctgctctggccacacgcgacccgtggttgatttggccttcagtggcatcacgccttatgggtatttcttaatcagcgcttgcaaagatggtaaacctatgctacgccagggagatacaggagactggattggaacatttttgggtcataaaggtgctgtttggggtgcaacactgaataaggatgccaccaaagcagctacagcagctgcagatttcacagccaaagtgtgggatgctgtctcaggagatgaattgatgaccctggctcataaacacattgtcaagactgtggatttcacgcagcggatagtaacattattgttaccccgggcgacacggatacaccttgtaacgcatctatgcacttgaccaacccgtgaagcagaacctaaggaaattagtggtcatacttctggtataaaaaaagctctgtggtgcagtgaggataaacagattctttctgctgatgacaaaactgttcgactttgggatcatgctactatgacagaagtgaaatctctaaattttaatatgtctgttagtagtatggaatatattcctgagggagagattttggttataacttatggacgatctattgcttttcatagtgcagtaagtttggacccaattaaatcctttgaagctcctgcaaccatcaattctgcatctcttcatcctgagaaagaatttcttgttgcaggcggtgaagattttaaactttataagtatgattataatagtggagaagaattagaatcctacaagggacactttggtcctattcactgtgtgagatttagtcctgatggagaactctatgccagtggttcagaagatggaacattgagactatggcaaactgtggtaggaaaaacgtatggcctttggaaatgtgtgcttcctgaagaagatagtggtgagctggcaaagccaaagattggttttccagagacaacagaagaggagctagaagaaattgcttcagagaattcagattgcatctttccttcagctcctgatgttaaggcctgagcgtcaatcatatgttgcagttagtatacaactgactaaaacaagcaagcagagaaaagcatcagccttccagagttactgtctgcttaaggcagaaacagcagtaaataatgaggaaaatgaattagctccagtgctggaacaactaactaacttggtgttacctgtaagtgaaaactcaagtgtcagatgaagggaggtggagttatcctcttatagtacagtggcctgttatctttttaatgaatatatacaagccaacatccaatttctattattacaattagggttcttgtagctgtttatgttaatatggagaagaaaactatattggctgattttttctgatcttaaagcagaatgccttttctttttttgcttcagttgtaaagaagagggaatacatgataaagtaactggtttgatttctcgttcattgtacactgcctctgaacatctaattgtttttagttgtctaaataaaatgcctctaaaacaaaa

SEQ ID NO: 333709 - DNA, 1005 bp, Homo sapiens
tgcacacgccgaaggtccagctactacttcgtccatcacgatctctgtccaggtctggtgcctcggcgtgtgcatgcacacgccgaatctttggacccaattaaatcctttgaagctcctgcaaccatcaattctgcatctcttcatcctgagaaagaatttcttgttgcaggcggtgaagattttaaactttataagtatgattataatagtggagaagaattagaatcctacaagggacactttggtcctattcactgtgtgagatttagtcctgatggagaactctatgccagtggttcagaagatggaacattgagactatggcaaactgtggtaggaaaaacgtatggcctttggaaatgtgtgcttcctgaagaagatagtggtgagctggcaaagccaaagattggttttccagagacaacagaagaggagctagaagaaattgcttcagagaattcagattgcatctttccttcagctcctgatgttaaggcctgagcgtcaatcatatgttgcagttagtatacaactgactaaaacaagcaagcagagaaaagcatcagccttccagagttactgtctgcttaaggcagaaacagcagtaaataatgaggaaaatgaattagctccagtgctggaacaactaactaacttggtgttacctgtaagtgaaaactcaagtgtcagatgaagggaggtggagttatcctcttatagtacagtggcctgttatctttttaatgaatatatacaagccaacatccaatttctattattacaattagggttcttgtagctgtttatgttaatatggagaagaaaactatattggctgattttttctgatcttaaagcagaatgccttttctttttttgcttcagttgtaaagaagagggaatacatgataaagtaactggtttgatttctcgttcattgtacactgcctctgaacatctaattgtttttagttgtctaaataaaatgcctctaaaacaaaa

SEQ ID NO: 333710 - DNA, 1819 bp, Homo sapiens
aatacatggtctcgctctgttgcccaggctggagtgcggtggcgcgagcaccgcttactgcggtgtcgacctctcgggctcgagttatcctcccacctcagccttccaagtaggtgggaccacaggcaccaccactccaagcccgtatatggtttttaaataagacaaattgcaaaaaacgttgccagacagcgttcgctggtttgggccgtcactgggtatggctcgtgtccgtctagatattcagaggccgagcacagtcctcagtagggctgctcggcaggtacacagctgacgctggtccttggacttatgggagtgggaacaactttcaactcggccgcggaccaggaaggcgttctgacccgctagagctcggggacagggaccccatcccggtgcctagagcgtctcccttagtcggcgtgggccagcgccagttacctcacgagcactgaactagcgcctgcgcccttctatacttctcgctctttcttcaagtcacttctacccggcgagcccgccctcccgccaatcgtcatttccggcgggtgctctgcgtcatttacggtcgtcacttcctgccgatgccggtgtggacgctgtgaatcgtggctggcccggttctccgcttctccccatcccctactttcctccctccctccctttccctccctcgtcgactgttgcttgctggtcgcagactccctgacccctccctcacccctccctaacctcggtgccaccggattgcccttcttttcctgttgcccagcccagccctagtgtcagggcgggggcctggagcagcccgaggcactgcagcagaagagagaaaagacaacgacgaccctcagctcgccagtccggtcgctggcttcgccgccgccatggcaatgagacagacgccgctcacctgctctggccacacgcgacccgtggttgatttggccttcagtggcatcacgccttatgggtatttcttaatcagcgcttgcaaagatggtaaacctatgctacgccagggagatacaggagactggattggaacatttttgggtcataaaggtgctgtttggggtgcaacactgaataaggatgccaccaaagcagctacagcagctgcagatttcacagcgtaagtgtagccaagatggctaactttggtgttctctgtagcttgtgtcctgaaataatcaaaaacttcagtgtcagatattcataaaattctgactcactggctgccatacagaacgcatgtttgatcccaccaaaattccatcgtggtccatcgtggtcctgtgtgcttctttgtcttcagtggttctcaaaattttcagaggcctaaatgacttattccgtatattttgattgagactcaggaatctgcattaacaaacgcaccagataatgaatgttgatctcctttacgaatgctgctctgtgtgtactccttagtgatatcctacattgatggccctaggtttttatttcaatcccggtttttgttaactggctttaggcatcattaaaactcattgtgtcaaaaacaaacaaacaaaaaaacaacaaaaaaacaaaactcagctgctcgtcatttcctaagtttttaaaggttgaaatctaaagcattcttgattttcccttatatctagattatcatcatcttttttgattctgccagcgggatgtctcctgactccaatgttccttcatgtagtaactgtggctgccttagttcaggatcatttttaactttcagtagtttcttttcctcctattcattttccatattgttgccagttgtcttcctaaaaac

SEQ ID NO: 333711 - DNA, 7602 bp, Homo sapiens
  misc_feature (2)..(2): n is a, c, g, or t
  misc_feature (4)..(6): n is a, c, g, or t
  misc_feature (10)..(10): n is a, c, g, or t
  misc_feature (12)..(14): n is a, c, g, or t
  misc_feature (16)..(18): n is a, c, g, or t
tngnnnggcngnnngnnnaggtagacagtaaggagccaggggaacagagagaattgtggggcagcaccgctccttgggtccccactccccatttctcattgcttggaaatccatgccaagatgcctgccttccttggtctaaagtgtctggggaaattgtgcagctctgagaaaagcaaagtcacctcatctgagagaaccagtgccaggggctcgaacagaaagagactgattgttgaggaccggagggtctctgggacctccttcaccgctcataggcgtgccactatcactcatttgctgtatctctgtcccaaggactactgcccacgtgggcgtgtatgtaacagcgttgatccttttgtggcccaccctcaggaccctcaccacccatcagagaagcctgtcattcactgccataaatgtggggagccttgcaagggtgaagtgcttcgggtccagaccaaacatttccacatcaagtgtttcacctgcaaagtgtgtggctgtgacctggcacaagggggcttcttcataaagaacggagagtatctctgcaccctggactaccagcggatgtacgggacacgctgccatggctgtggggagttcgtggagggcgaagtggtgactgctctgggcaagacctaccatcccaattgctttgcttgtactatctgcaagcgcccgtttccacccggagaccgagtcacattcaatgggagagactgcctttgtcaactctgtgcacagccgatgtcgtccagtccgaaagaaaccaccttctccagcaattgtgccggctgcggaagagatatcaagaacgggcaggcgctgctggcgctggataagcagtggcacttggggtgctttaaatgcaagtcctgcgggaaggtcctcaccggggagtacatcagcaaggatggtgctccgtactgtgaaaaggactaccagggactctttggggtgaaatgtgaggcgtgtcaccagtttatcacagggaaagtcctggaggcaggtgacaaacattaccaccccagctgtgcacgatgcagcagatgcaaccagatgttcacagaaggagaggaaatgtatcttcaaggctccaccgtttggcatcccgactgtaagcaatctacgaagaccgaggaaaagctgcggcctaccaggacatcctcggaaagtatttattctaggccaggctccagtattcctggctcaccaggtcatactatctatgcaaaagtagacaatgagatcctggattacaaggatttagcagccattccgaaggtcaaggcaatttatgacattgaacgtccagatcttattacctatgagcctttctacacttcgggctatgatgacaaacaggagagacagagccttggagagtctccgaggactttgtctcctactccatcagcagaagggtaccaggatgttcgggatcggatgatccatcggtccacgagccagggctccatcaactcccctgtgtacagccgccacagctacactccaaccacgtcccgctctccccagcatttccacagacctggcaatgagccgtccagcggccggaactcccctctcccttaccggccagacagcctccctctaactccaacttacgctcaggcccctaaacatttccatgttccagatcaaggaatcaacatttaccgaaagccacccatctacaaacagcatgctgccttggcagcccagagcaagtcctcagaagatatcatcaagttttccaagttcccagcagcccaggcaccagaccccagcgagacaccaaagattgagacggaccactggcctggtcccccctcatttgctgtcgtaggacctgacatgaaacgcagatctagtggcagagaggaagatgatgaggaacttctgagacgtcggcagcttcaagaagagcaattaatgaagcttaactcaggcctgggacagttgatcttgaaagaagagatggagaaagagagccgggaaaggtcatctctgttagccagtcgctacgattctcccatcaactcagcttcacatattccatcatctaaaactgcatctctccctggctatggaagaaatgggcttcaccggcctgtttctaccgacttcgctcagtataacagctatggggatgtcagcgggggagtgcgagattaccagacactcccagatggccacatgcctgcaatgagaatggaccgaggagtgtctatgcccaacatgttggaaccaaagatatttccatatgaaatgctcatggtgaccaacagagggcgaaacaaaatcctcagagaggtggacagaaccaggctggagcgccacttagcccctgaagtgtttcgggaaatctttggaatgtccatacaggagtttgacaggttacctctttggagacgcaacgacatgaagaaaaaagcaaaactcttctaagtcccactcgtgaatggcaattagagaaaggactgacagtggcggtgccccataggatgtcatattgaggcccaaacttgattggagaatttgcaaactaccgtcgctcagcaacaccaaaaagagaaagtctggttaaaacaccatgagtcaaatgtcgggccagccaacagtaacacttgccaagaagcatggcgtagaaatttctatgttccgaaacacagagtagtgtccacatgtgaccttttcacattaccttatgtatacaacaggagctgcgttgttttcttctttttcttttcctttatctgttgtccaacaacagtgctgactgtccggataagagctggcaagtgcccttaggatgccgcatgggaaaaatcggttatcataatttcaaagtataaatatatttattatgtagcgctgcggctaagaaggaagagtgaggggtctgtccatggggtggcagtgatttcacacccgcctttcttgaatggcttcgtgttactcagccgtgccctggcaggaatggaactccatcagggaacagggcagctctgtttgaatggggtgaaaaacagcaaaattaattcttagcaagctccttgttctctactgttcaccgggacctggctggcaaatgacttagctattagtatatttaaaaactgttcaaaagcaaaagagaaggaacaggaatgaaaggaaaccttcccttaactctttctgcttcccatagcaggtctggttcctgctccccgcctaggacaggagctgtctggagctccacctttgcaaagaaaggaaaaacacaaattgcccccagattggcccagtggcatgccattaggtgattttgcgtaggggccatatcattcatggccaaaaaaaaccaaaaagcaaaaaacaaaaacaagtcccatgtcctactgactctagttcttccagtcgttatcctctgctgtctctctggcatcctatgaatcagatcaagcccatgctgttgttggtttttaaggtttctttcaataataggctaaggaaagacatgtttttctcttttaaatctctgcaactccaaagtagactccttcgaacgtatttaatttggccttttcagctttcttcttgcccagctctgtcgaattcatgggtgtgtgtgcacatgttggtttcactcacccagagtaattttgtgagcatgcatgtgctttttaatttctgcttgaatgtttgtcctgctgtgttgcagcttctaaagacattgtcaccgagtgtgtgtgactcaaagatcaagagtgaggctaaactgcgaccccaacatcacttccttcatggaaaggtgttggcgctgatgtagctcatggaaggatcagactgggaaccacagaggaaggatgaggtgggatgtggaggtcagagcatctcacgagagtccctcaggctctgcaacactagattcgaatatgagcctagggtttccccaacacgtgcgtgcatatgaaaccacatcatgattcccgacgtgagttagatgagggagagtttgtgtaactccacacccaggagggtaagccactttattatcatgctttggggctgtgcttaagaatttaagctctgttttaaagccgaagaagaaaacatttgaatttaccttcatatgccactaagaacaaaagctctgaagttcttcctgctggcaccaaatattaggattacaagctgtctctctgacaccagtggtaaaaaagcaagtagaatagtttctgagtctgtgttgcagcctctgacacgtggctcaccgctgtcatttgggggatggaatgaacagtcactgttctatagcatcctcctgtgctcttacctaaggaatctaaattgtcctagccttccattgctatgcactgaatgaggactactctcgtgtgtgtgtgtgtgtgtgtgtgtgtgtgtgtgtgtgtgtgtgtgtgttggatctactaacatgtttagcaaatggctctgacagggtggccatgagcagatgagaccagctcttgcttggttggaagccacactgcagtttgcagtttagcctttggtgtctcagtggcctcttgcttattccatgctttttctatcccatcctctctctgtgccctcctgcaatggcagccttggcacaatgcctgggtgtcctcatccttgctttactctggaaagtgtggggatggagaggatggtgcatttccagtgcttccttacctgtcaataacaatggtggccacctgggtcccagcacttggctggtggagagatttttttcattatggagctaataaagggtccctacgttttacattgattaatgaattatcacccagacatgtgcagatgaaatgtcaatataagaaaaatcaaggtatttgggaaacatgggcataatcaggtagttttgctaaaattcctcttccttggtctacataaagaagacatgggtctgtcatagaatggggacattagactgaaaactgggacaacccccttccttattttatagagactaggagttaaggggcctgcctaagattgcagtgataaagaactgaaccctaaatcagctcccactaatgaaaccctgctttccttgtatcttttaaactcagttctgcatccaacttgagaagaaaaaaagcttctttccatatcaagtaccatatgagttcatttaaactgcaccttgcagaaatgcattgccagaaagcaccagtagcctcctatctgcaagcagagtagtgctctgctctggggaggggtcattggaaaccataatgcagagtgggccccctactccatttcccagcaaaaggctccagctggagggatgggttgtggggcaacctggttcctgctaactgccagattgaatgtgtgggctagaatgcctgcacatttagttaaactgggctcagcatgcttgtcctcaaaatgtccatcctggtcacagcacacaagatggctattggtctgcttttaccctaccctgtactatacatgaaaattccagttattaacacactcaaactggtggagcttgttcaccctaggaaggggattgtatatatggcaggcttccctggtgccgatgtaaagggctacatttgggaacatttgacttccttgggactcttaagtgcatactgatggcatgaagtaaaaggggcctcaatgatgataggaaaatcagttcttttaaaatttcttcaagaaaatccaggctatcacatagtctttctgtgtgacttattaggagataggaagagcattgggaaacttgcacagctagctatgcatctacattttggtttggggttagttatgaaatgttcttaatatgacgtgttcaataacttcacataaacttcctgttctccaaaacctcaaagagatagagttaatgagttgttgtttttttttaaatgggggtagttttctatctgtcatgggctctagcatctactccgctacccaattctgtcatctccaagctgagtttcctcttctgaggcagaggctggagcagttctttttcagttctcatcctctccatcccaatccagtatatcaatcaactctaactcggagacgtctagctggcaatgtttctaaaactttcactggatttctttagacattgaagcaaacatttttttctaagaattgcttctcagatgatgatatcaaatgtatatgcttttgcaagtttgaaaagttcaaattaaccacttttgactaggtaagtctttctaaaaaccatttaaagctaactgggtcttagcatcctcctgtgtatggaagagacaggtgaccgctccaggttgggtgctcacagaacccttttcctgactctcatggaagatggtggaaggaaaatagactgtctcatcaaccctcctgtgtcctctgaagcaatctcagtttttattaaccacctcttctgtgtttctggtagctatttaacctgtatttaatctgtacttcctatgccagcctcaattttatttgatttttaaaattattctcttctaaccaatgaagtgtttgtcagtatgccccaaagcttgctcttttgtgctcccttttgaataactttctatccagaaaaagagattatttgggacttgagatttgcagtgataccaacttatagcaatgatgtactttaagggaactacccaactatgttgtgatagaagaaagagaaaccttcactttggcattttttttaatcactgtttatttttctgtttgcggcccaggaagcagtgggaggtggtggcagatatgctttgcatatggattgttatgtttttatttgggcaagtttaatcatggaaaactcaaaaagaaggggggaaatggtcagtttaagccaaaagaaactttctaaacaatgtataggtacacagcaaaattaaacaaatccaacaatttctgaagcttagtgtaattgagtggtggttgttattcaataaaattattcccaaaagtgtttctcctaagagtgcagttcccatgagtcacttcctgaacccattgaccaaaggtggacagagacaatcctgtagaccttgacattcagaaagatgtgagctgcttactgatcatatatgcatacgtttctttacagcagaggaaaccattgtccacaaaactgatgttcttttggggttttatgtacagacttgtccaatcatgtgtgtggttcctgcgagttgctgatgactccgcattgaagctctctgagttctttgattttaagttgggtttatggaattttttcaaatgttggaaggcgtgtggttcttcctgccctccctccccttttggaaatatgaaagcaaatgtttagaagaattccttttgaaaagctgtgtcgtgttccctgtgaaactgagcaggtgtgtgttggcgcgctaagtgccacatgcttgtgtgtagaggaggaggtggccctgccggctccgcgctgctgtgcctgtgatccctacctgctccccgctcctgttgccagcagcactcactgcactcctttgtcatatactctgcatcactgtcatactcacaacttcgtgaataaagttgtgtgctttattcgta

SEQ ID NO: 333712 - DNA, 541 bp, Homo sapiens
cagtaggcaacaaaccaggaactgtcctggcagataagacagactgtgcaaggtcatcgtcatcggcatgggaagggcattaattaccaaagtggagacacagtcactgtctccaagagcatttggaatcacttcacagagttctcaaggaggggaaggctatctgtcagctcctggcgggactgctgccccatatactgtgatgaattgcttcacatatctgagttctgatgggaaggagtccaagtgcggtagctgtagagaacgctggggaagcccagttctgtgtagctcacgtatgaaaggaatattcatgaagagcaaaacagaggcattatttgagattaactgcctgagaaacctagtctaatcccaagtgtctagaaaatgttgactacttgccatgtgcccagtaaggtgcttggagctttatatgcatcctctcatttaaccctgtgacatagttatgctggtacaccttgctgcgttctgtacatgaagaagttgaagctcaaggaagttaaaagaaaaagagaatgga

SEQ ID NO: 333713 - DNA, 814 bp, Homo sapiens
gtcctgcgggcggcgtccccgcaccgggagccggagggggccggggccgggcgggcgctccggggctgccttcttccccgcgccctgcggggctgtccaacgccttccagctccggctcccgctgcctgcaccatgtccgccagagtggcccaccctcaggaccctcaccacccatcagagaagcctgtcattcactgccataaatgtggggagccttgcaagggtgaagtgcttcgggtccagaccaaacatttccacatcaagtgtttcacctgcaaagtgtgtggctgtgacctggcacaagggggcttcttcataaagaacggagagtatctctgcaccctggactaccagcggatgtacgggacacgctgccatggctgtggggagttcgtggagggcgaagtggtgactgctctgggcaagacctaccatcccaattgctttgcttgtactatctgcaagcgcccgtttccacccggagaccgagtcacattcaatgggagagactgcctttgtcaactctgtgcacagccgatgtcgtccagtccgaaagaaaccaccttctccagcaagagatggtggcagctgtaggcagagagtggaccactgacaaccagaagaggaagacgaatgatcctggctcctcagagaatttctaatggagttttctcctctactggcattccatttttccttgccacaaatcctgagttccctctcttgctggctgaaatacattcctttctgttggcagaaaccaatttgacagtgcagcaagctgtgggctatgattcatactaatacaaacca

SEQ ID NO: 333714 - DNA, 495 bp, Homo sapiens
tgcctgtaatttccattatcttctaatgtttaccttcatcccaatacatagtaagttagtgttctgccactcaacaaagcccccctaaggctcagtgctacctgagacactggtggaaagttgagaatgtctaagattctgtccctgtcccctggaaactggagcttccactggccttgcagaaggaagacccatcactcgaattctgtcatgacagtctcttggaagctctatcttgggagtactagcgtttaggtggattctgcttgttaataaaatggactgtggtgttctagaagaggtgttttctttcttctcagatatttccatatgaaatgctcatggtgaccaacagagggcgaaacaaaatcctcagagaggtggacagaaccaggctggaggtaaaacaaaaccgaaaaatccagtcccaactgcagatccctatgcactcccccaactctcccctaagcaatgttttatttcttcagtgaaaac

SEQ ID NO: 333715 - DNA, 685 bp, Homo sapiens
agtagctggaataacaggtgtgtgccaccacacctggctaatcttttgtatttttggtagagacagggtttcactatgttggccaggctggtctctaactcctgacctcgtgatctgcctgcctgggcctcccaaagtgctgggattacagacatgagccaccgcacccggccagtatcagggtatcttaactggtgaaagccacaagtggcagggaagcccaccattgtactgcccatcccccgggagtgtttgtgccaactaataattctgtttaccgaactcacatggtataagaaaatgaggtcgtggaagccagtttaagagaaggatcattttggacaactaatgactgggtaactgtgtatgtagcttcaagtagctgccacttgccacagcaggaaatgggcctttagtggcccaccctcaggaccctcaccacccatcagagaagcctgtcattcactgccataaatgtggggagccttgcaagggtgaagtgcttcgggtccagaccaaacatttccacatcaagtgtttcacctgcaaagaaacttctagaccatttagaaaagaccaaggaccaaggagactgcccagagaatcaagattgttcagccaaattgtctgttttcagtgatcctttcctgggctgtcccatatataaaatcaactactccctata

SEQ ID NO: 333716 - DNA, 6894 bp, Homo sapiens
aagaaaaattgaggccgggcgcggtggctcacgcctgtaatcccagcactttgggagagagcgtgcctgcccgccgcacacggggctggtttccggagtgcgtctctagagggatgcacgttgccttagccgagcttcggagagaagcctgatatgtaacccaggcaggtgggagcctcagtctgtcgggctgaggtctggcatctacaaagcctcttggccgtgttctgaacttgaagcctggaggagttctctgctcagcacagccaaggaacagaattagaagaaaaggaaccctggcctgaggcaggtgacaaacattaccaccccagctgtgcacgatgcagcagatgcaaccagatgttcacagaaggagaggaaatgtatcttcaaggctccaccgtttggcatcccgactgtaagcaatctacgaagaccgaggaaaagctgcggcctaccaggacatcctcggaaagtatttattctaggccaggctccagtattcctggctcaccaggtcatactatctatgcaaaagtagacaatgagatcctggattacaaggatttagcagccattccgaaggtcaaggcaatttatgacattgaacgtccagatcttattacctatgagcctttctacacttcgggctatgatgacaaacaggagagacagagccttggagagtctccgaggactttgtctcctactccatcagcagaagggtaccaggatgttcgggatcggatgatccatcggtccacgagccagggctccatcaactcccctgtgtacagccgccacagctacactccaaccacgtcccgctctccccagcatttccacagacctggcaatgagccgtccagcggccggaactcccctctcccttaccggccagacagcctccctctaactccaacttacgctcaggcccctaaacatttccatgttccagatcaaggaatcaacatttaccgaaagccacccatctacaaacagcatgctgccttggcagcccagagcaagtcctcagaagatatcatcaagttttccaagttcccagcagcccaggcaccagaccccagcgagacaccaaagattgagacggaccactggcctggtcccccctcatttgctgtcgtaggacctgacatgaaacgcagatctagtggcagagaggaagatgatgaggaacttctgagacgtcggcagcttcaagaagagcaattaatgaagcttaactcaggcctgggacagttgatcttgaaagaagagatggagaaagagagccgggaaaggtcatctctgttagccagtcgctacgattctcccatcaactcagcttcacatattccatcatctaaaactgcatctctccctggctatggaagaaatgggcttcaccggcctgtttctaccgacttcgctcagtataacagctatggggatgtcagcgggggagtgcgagattaccagacactcccagatggccacatgcctgcaatgagaatggaccgaggagtgtctatgcccaacatgttggaaccaaagatatttccatatgaaatgctcatggtgaccaacagagggcgaaacaaaatcctcagagaggtggacagaaccaggctggagcgccacttagcccctgaagtgtttcgggaaatctttggaatgtccatacaggagtttgacaggttacctctttggagacgcaacgacatgaagaaaaaagcaaaactcttctaagtcccactcgtgaatggcaattagagaaaggactgacagtggcggtgccccataggatgtcatattgaggcccaaacttgattggagaatttgcaaactaccgtcgctcagcaacaccaaaaagagaaagtctggttaaaacaccatgagtcaaatgtcgggccagccaacagtaacacttgccaagaagcatggcgtagaaatttctatgttccgaaacacagagtagtgtccacatgtgaccttttcacattaccttatgtatacaacaggagctgcgttgttttcttctttttcttttcctttatctgttgtccaacaacagtgctgactgtccggataagagctggcaagtgcccttaggatgccgcatgggaaaaatcggttatcataatttcaaagtataaatatatttattatgtagcgctgcggctaagaaggaagagtgaggggtctgtccatggggtggcagtgatttcacacccgcctttcttgaatggcttcgtgttactcagccgtgccctggcaggaatggaactccatcagggaacagggcagctctgtttgaatggggtgaaaaacagcaaaattaattcttagcaagctccttgttctctactgttcaccgggacctggctggcaaatgacttagctattagtatatttaaaaactgttcaaaagcaaaagagaaggaacaggaatgaaaggaaaccttcccttaactctttctgcttcccatagcaggtctggttcctgctccccgcctaggacaggagctgtctggagctccacctttgcaaagaaaggaaaaacacaaattgcccccagattggcccagtggcatgccattaggtgattttgcgtaggggccatatcattcatggccaaaaaaaaccaaaaagcaaaaaacaaaaacaagtcccatgtcctactgactctagttcttccagtcgttatcctctgctgtctctctggcatcctatgaatcagatcaagcccatgctgttgttggtttttaaggtttctttcaataataggctaaggaaagacatgtttttctcttttaaatctctgcaactccaaagtagactccttcgaacgtatttaatttggccttttcagctttcttcttgcccagctctgtcgaattcatgggtgtgtgtgcacatgttggtttcactcacccagagtaattttgtgagcatgcatgtgctttttaatttctgcttgaatgtttgtcctgctgtgttgcagcttctaaagacattgtcaccgagtgtgtgtgactcaaagatcaagagtgaggctaaactgcgaccccaacatcacttccttcatggaaaggtgttggcgctgatgtagctcatggaaggatcagactgggaaccacagaggaaggatgaggtgggatgtggaggtcagagcatctcacgagagtccctcaggctctgcaacactagattcgaatatgagcctagggtttccccaacacgtgcgtgcatatgaaaccacatcatgattcccgacgtgagttagatgagggagagtttgtgtaactccacacccaggagggtaagccactttattatcatgctttggggctgtgcttaagaatttaagctctgttttaaagccgaagaagaaaacatttgaatttaccttcatatgccactaagaacaaaagctctgaagttcttcctgctggcaccaaatattaggattacaagctgtctctctgacaccagtggtaaaaaagcaagtagaatagtttctgagtctgtgttgcagcctctgacacgtggctcaccgctgtcatttgggggatggaatgaacagtcactgttctatagcatcctcctgtgctcttacctaaggaatctaaattgtcctagccttccattgctatgcactgaatgaggactactctcgtgtgtgtgtgtgtgtgtgtgtgtgtgtgtgtgtgtgtgtgtgtgtgttggatctactaacatgtttagcaaatggctctgacagggtggccatgagcagatgagaccagctcttgcttggttggaagccacactgcagtttgcagtttagcctttggtgtctcagtggcctcttgcttattccatgctttttctatcccatcctctctctgtgccctcctgcaatggcagccttggcacaatgcctgggtgtcctcatccttgctttactctggaaagtgtggggatggagaggatggtgcatttccagtgcttccttacctgtcaataacaatggtggccacctgggtcccagcacttggctggtggagagatttttttcattatggagctaataaagggtccctacgttttacattgattaatgaattatcacccagacatgtgcagatgaaatgtcaatataagaaaaatcaaggtatttgggaaacatgggcataatcaggtagttttgctaaaattcctcttccttggtctacataaagaagacatgggtctgtcatagaatggggacattagactgaaaactgggacaacccccttccttattttatagagactaggagttaaggggcctgcctaagattgcagtgataaagaactgaaccctaaatcagctcccactaatgaaaccctgctttccttgtatcttttaaactcagttctgcatccaacttgagaagaaaaaaagcttctttccatatcaagtaccatatgagttcatttaaactgcaccttgcagaaatgcattgccagaaagcaccagtagcctcctatctgcaagcagagtagtgctctgctctggggaggggtcattggaaaccataatgcagagtgggccccctactccatttcccagcaaaaggctccagctggagggatgggttgtggggcaacctggttcctgctaactgccagattgaatgtgtgggctagaatgcctgcacatttagttaaactgggctcagcatgcttgtcctcaaaatgtccatcctggtcacagcacacaagatggctattggtctgcttttaccctaccctgtactatacatgaaaattccagttattaacacactcaaactggtggagcttgttcaccctaggaaggggattgtatatatggcaggcttccctggtgccgatgtaaagggctacatttgggaacatttgacttccttgggactcttaagtgcatactgatggcatgaagtaaaaggggcctcaatgatgataggaaaatcagttcttttaaaatttcttcaagaaaatccaggctatcacatagtctttctgtgtgacttattaggagataggaagagcattgggaaacttgcacagctagctatgcatctacattttggtttggggttagttatgaaatgttcttaatatgacgtgttcaataacttcacataaacttcctgttctccaaaacctcaaagagatagagttaatgagttgttgtttttttttaaatgggggtagttttctatctgtcatgggctctagcatctactccgctacccaattctgtcatctccaagctgagtttcctcttctgaggcagaggctggagcagttctttttcagttctcatcctctccatcccaatccagtatatcaatcaactctaactcggagacgtctagctggcaatgtttctaaaactttcactggatttctttagacattgaagcaaacatttttttctaagaattgcttctcagatgatgatatcaaatgtatatgcttttgcaagtttgaaaagttcaaattaaccacttttgactaggtaagtctttctaaaaaccatttaaagctaactgggtcttagcatcctcctgtgtatggaagagacaggtgaccgctccaggttgggtgctcacagaacccttttcctgactctcatggaagatggtggaaggaaaatagactgtctcatcaaccctcctgtgtcctctgaagcaatctcagtttttattaaccacctcttctgtgtttctggtagctatttaacctgtatttaatctgtacttcctatgccagcctcaattttatttgatttttaaaattattctcttctaaccaatgaagtgtttgtcagtatgccccaaagcttgctcttttgtgctcccttttgaataactttctatccagaaaaagagattatttgggacttgagatttgcagtgataccaacttatagcaatgatgtactttaagggaactacccaactatgttgtgatagaagaaagagaaaccttcactttggcattttttttaatcactgtttatttttctgtttgcggcccaggaagcagtgggaggtggtggcagatatgctttgcatatggattgttatgtttttatttgggcaagtttaatcatggaaaactcaaaaagaaggggggaaatggtcagtttaagccaaaagaaactttctaaacaatgtataggtacacagcaaaattaaacaaatccaacaatttctgaagcttagtgtaattgagtggtggttgttattcaataaaattattcccaaaagtgtttctcctaagagtgcagttcccatgagtcacttcctgaacccattgaccaaaggtggacagagacaatcctgtagaccttgacattcagaaagatgtgagctgcttactgatcatatatgcatacgtttctttacagcagaggaaaccattgtccacaaaactgatgttcttttggggttttatgtacagacttgtccaatcatgtgtgtggttcctgcgagttgctgatgactccgcattgaagctctctgagttctttgattttaagttgggtttatggaattttttcaaatgttggaaggcgtgtggttcttcctgccctccctccccttttggaaatatgaaagcaaatgtttagaagaattccttttgaaaagctgtgtcgtgttccctgtgaaactgagcaggtgtgtgttggcgcgctaagtgccacatgcttgtgtgtagaggaggaggtggccctgccggctccgcgctgctgtgcctgtgatccctacctgctccccgctcctgttgccagcagcactcactgcactcctttgtcatatactctgcatcactgtcatactcacaacttcgtgaataaagttgtgtgctttattcgta

SEQ ID NO: 333717 - DNA, 7604 bp, Homo sapiens
gtcattgagctgatgtgcttttgcaaggggtctctttagaagtggtaggggcagggtcgagagaagaaggggatgcagaatctgtacatgaggaaggagccagagtcactcaggaaactcctcattcttcctgcgctggctgtggcacacccaccggtggcacacccctccctcgggtccagttcagcccacagactcctgggaggagagccagggccccagcctctcctttgaggagtgttgcagcctttctgtgtgccagatgcctagtgaagaaaagctgaaaccctggagctttgtgcatgttaatgaccttggaaatgactgagctcacggaccctcatcacaccatgggagactacaaagtggcccaccctcaggaccctcaccacccatcagagaagcctgtcattcactgccataaatgtggggagccttgcaagggtgaagtgcttcgggtccagaccaaacatttccacatcaagtgtttcacctgcaaagtgtgtggctgtgacctggcacaagggggcttcttcataaagaacggagagtatctctgcaccctggactaccagcggatgtacgggacacgctgccatggctgtggggagttcgtggagggcgaagtggtgactgctctgggcaagacctaccatcccaattgctttgcttgtactatctgcaagcgcccgtttccacccggagaccgagtcacattcaatgggagagactgcctttgtcaactctgtgcacagccgatgtcgtccagtccgaaagaaaccaccttctccagcaattgtgccggctgcggaagagatatcaagaacgggcaggcgctgctggcgctggataagcagtggcacttggggtgctttaaatgcaagtcctgcgggaaggtcctcaccggggagtacatcagcaaggatggtgctccgtactgtgaaaaggactaccagggactctttggggtgaaatgtgaggcgtgtcaccagtttatcacagggaaagtcctggaggcaggtgacaaacattaccaccccagctgtgcacgatgcagcagatgcaaccagatgttcacagaaggagaggaaatgtatcttcaaggctccaccgtttggcatcccgactgtaagcaatctacgaagaccgaggaaaagctgcggcctaccaggacatcctcggaaagtatttattctaggccaggctccagtattcctggctcaccaggtcatactatctatgcaaaagtagacaatgagatcctggattacaaggatttagcagccattccgaaggtcaaggcaatttatgacattgaacgtccagatcttattacctatgagcctttctacacttcgggctatgatgacaaacaggagagacagagccttggagagtctccgaggactttgtctcctactccatcagcagaagggtaccaggatgttcgggatcggatgatccatcggtccacgagccagggctccatcaactcccctgtgtacagccgccacagctacactccaaccacgtcccgctctccccagcatttccacagacctggcaatgagccgtccagcggccggaactcccctctcccttaccggccagacagcctccctctaactccaacttacgctcaggcccctaaacatttccatgttccagatcaaggaatcaacatttaccgaaagccacccatctacaaacagcatgctgccttggcagcccagagcaagtcctcagaagatatcatcaagttttccaagttcccagcagcccaggcaccagaccccagcgagacaccaaagattgagacggaccactggcctggtcccccctcatttgctgtcgtaggacctgacatgaaacgcagatctagtggcagagaggaagatgatgaggaacttctgagacgtcggcagcttcaagaagagcaattaatgaagcttaactcaggcctgggacagttgatcttgaaagaagagatggagaaagagagccgggaaaggtcatctctgttagccagtcgctacgattctcccatcaactcagcttcacatattccatcatctaaaactgcatctctccctggctatggaagaaatgggcttcaccggcctgtttctaccgacttcgctcagtataacagctatggggatgtcagcgggggagtgcgagattaccagacactcccagatggccacatgcctgcaatgagaatggaccgaggagtgtctatgcccaacatgttggaaccaaagatatttccatatgaaatgctcatggtgaccaacagagggcgaaacaaaatcctcagagaggtggacagaaccaggctggagcgccacttagcccctgaagtgtttcgggaaatctttggaatgtccatacaggagtttgacaggttacctctttggagacgcaacgacatgaagaaaaaagcaaaactcttctaagtcccactcgtgaatggcaattagagaaaggactgacagtggcggtgccccataggatgtcatattgaggcccaaacttgattggagaatttgcaaactaccgtcgctcagcaacaccaaaaagagaaagtctggttaaaacaccatgagtcaaatgtcgggccagccaacagtaacacttgccaagaagcatggcgtagaaatttctatgttccgaaacacagagtagtgtccacatgtgaccttttcacattaccttatgtatacaacaggagctgcgttgttttcttctttttcttttcctttatctgttgtccaacaacagtgctgactgtccggataagagctggcaagtgcccttaggatgccgcatgggaaaaatcggttatcataatttcaaagtataaatatatttattatgtagcgctgcggctaagaaggaagagtgaggggtctgtccatggggtggcagtgatttcacacccgcctttcttgaatggcttcgtgttactcagccgtgccctggcaggaatggaactccatcagggaacagggcagctctgtttgaatggggtgaaaaacagcaaaattaattcttagcaagctccttgttctctactgttcaccgggacctggctggcaaatgacttagctattagtatatttaaaaactgttcaaaagcaaaagagaaggaacaggaatgaaaggaaaccttcccttaactctttctgcttcccatagcaggtctggttcctgctccccgcctaggacaggagctgtctggagctccacctttgcaaagaaaggaaaaacacaaattgcccccagattggcccagtggcatgccattaggtgattttgcgtaggggccatatcattcatggccaaaaaaaaccaaaaagcaaaaaacaaaaacaagtcccatgtcctactgactctagttcttccagtcgttatcctctgctgtctctctggcatcctatgaatcagatcaagcccatgctgttgttggtttttaaggtttctttcaataataggctaaggaaagacatgtttttctcttttaaatctctgcaactccaaagtagactccttcgaacgtatttaatttggccttttcagctttcttcttgcccagctctgtcgaattcatgggtgtgtgtgcacatgttggtttcactcacccagagtaattttgtgagcatgcatgtgctttttaatttctgcttgaatgtttgtcctgctgtgttgcagcttctaaagacattgtcaccgagtgtgtgtgactcaaagatcaagagtgaggctaaactgcgaccccaacatcacttccttcatggaaaggtgttggcgctgatgtagctcatggaaggatcagactgggaaccacagaggaaggatgaggtgggatgtggaggtcagagcatctcacgagagtccctcaggctctgcaacactagattcgaatatgagcctagggtttccccaacacgtgcgtgcatatgaaaccacatcatgattcccgacgtgagttagatgagggagagtttgtgtaactccacacccaggagggtaagccactttattatcatgctttggggctgtgcttaagaatttaagctctgttttaaagccgaagaagaaaacatttgaatttaccttcatatgccactaagaacaaaagctctgaagttcttcctgctggcaccaaatattaggattacaagctgtctctctgacaccagtggtaaaaaagcaagtagaatagtttctgagtctgtgttgcagcctctgacacgtggctcaccgctgtcatttgggggatggaatgaacagtcactgttctatagcatcctcctgtgctcttacctaaggaatctaaattgtcctagccttccattgctatgcactgaatgaggactactctcgtgtgtgtgtgtgtgtgtgtgtgtgtgtgtgtgtgtgtgtgtgtgtgttggatctactaacatgtttagcaaatggctctgacagggtggccatgagcagatgagaccagctcttgcttggttggaagccacactgcagtttgcagtttagcctttggtgtctcagtggcctcttgcttattccatgctttttctatcccatcctctctctgtgccctcctgcaatggcagccttggcacaatgcctgggtgtcctcatccttgctttactctggaaagtgtggggatggagaggatggtgcatttccagtgcttccttacctgtcaataacaatggtggccacctgggtcccagcacttggctggtggagagatttttttcattatggagctaataaagggtccctacgttttacattgattaatgaattatcacccagacatgtgcagatgaaatgtcaatataagaaaaatcaaggtatttgggaaacatgggcataatcaggtagttttgctaaaattcctcttccttggtctacataaagaagacatgggtctgtcatagaatggggacattagactgaaaactgggacaacccccttccttattttatagagactaggagttaaggggcctgcctaagattgcagtgataaagaactgaaccctaaatcagctcccactaatgaaaccctgctttccttgtatcttttaaactcagttctgcatccaacttgagaagaaaaaaagcttctttccatatcaagtaccatatgagttcatttaaactgcaccttgcagaaatgcattgccagaaagcaccagtagcctcctatctgcaagcagagtagtgctctgctctggggaggggtcattggaaaccataatgcagagtgggccccctactccatttcccagcaaaaggctccagctggagggatgggttgtggggcaacctggttcctgctaactgccagattgaatgtgtgggctagaatgcctgcacatttagttaaactgggctcagcatgcttgtcctcaaaatgtccatcctggtcacagcacacaagatggctattggtctgcttttaccctaccctgtactatacatgaaaattccagttattaacacactcaaactggtggagcttgttcaccctaggaaggggattgtatatatggcaggcttccctggtgccgatgtaaagggctacatttgggaacatttgacttccttgggactcttaagtgcatactgatggcatgaagtaaaaggggcctcaatgatgataggaaaatcagttcttttaaaatttcttcaagaaaatccaggctatcacatagtctttctgtgtgacttattaggagataggaagagcattgggaaacttgcacagctagctatgcatctacattttggtttggggttagttatgaaatgttcttaatatgacgtgttcaataacttcacataaacttcctgttctccaaaacctcaaagagatagagttaatgagttgttgtttttttttaaatgggggtagttttctatctgtcatgggctctagcatctactccgctacccaattctgtcatctccaagctgagtttcctcttctgaggcagaggctggagcagttctttttcagttctcatcctctccatcccaatccagtatatcaatcaactctaactcggagacgtctagctggcaatgtttctaaaactttcactggatttctttagacattgaagcaaacatttttttctaagaattgcttctcagatgatgatatcaaatgtatatgcttttgcaagtttgaaaagttcaaattaaccacttttgactaggtaagtctttctaaaaaccatttaaagctaactgggtcttagcatcctcctgtgtatggaagagacaggtgaccgctccaggttgggtgctcacagaacccttttcctgactctcatggaagatggtggaaggaaaatagactgtctcatcaaccctcctgtgtcctctgaagcaatctcagtttttattaaccacctcttctgtgtttctggtagctatttaacctgtatttaatctgtacttcctatgccagcctcaattttatttgatttttaaaattattctcttctaaccaatgaagtgtttgtcagtatgccccaaagcttgctcttttgtgctcccttttgaataactttctatccagaaaaagagattatttgggacttgagatttgcagtgataccaacttatagcaatgatgtactttaagggaactacccaactatgttgtgatagaagaaagagaaaccttcactttggcattttttttaatcactgtttatttttctgtttgcggcccaggaagcagtgggaggtggtggcagatatgctttgcatatggattgttatgtttttatttgggcaagtttaatcatggaaaactcaaaaagaaggggggaaatggtcagtttaagccaaaagaaactttctaaacaatgtataggtacacagcaaaattaaacaaatccaacaatttctgaagcttagtgtaattgagtggtggttgttattcaataaaattattcccaaaagtgtttctcctaagagtgcagttcccatgagtcacttcctgaacccattgaccaaaggtggacagagacaatcctgtagaccttgacattcagaaagatgtgagctgcttactgatcatatatgcatacgtttctttacagcagaggaaaccattgtccacaaaactgatgttcttttggggttttatgtacagacttgtccaatcatgtgtgtggttcctgcgagttgctgatgactccgcattgaagctctctgagttctttgattttaagttgggtttatggaattttttcaaatgttggaaggcgtgtggttcttcctgccctccctccccttttggaaatatgaaagcaaatgtttagaagaattccttttgaaaagctgtgtcgtgttccctgtgaaactgagcaggtgtgtgttggcgcgctaagtgccacatgcttgtgtgtagaggaggaggtggccctgccggctccgcgctgctgtgcctgtgatccctacctgctccccgctcctgttgccagcagcactcactgcactcctttgtcatatactctgcatcactgtcatactcacaacttcgtgaataaagttgtgtgctttattcgta

SEQ ID NO: 333718 - DNA, 7654 bp, Homo sapiens
agtagctggaataacaggtgtgtgccaccacacctggctaatcttttgtatttttggtagagacagggtttcactatgttggccaggctggtctctaactcctgacctcgtgatctgcctgcctgggcctcccaaagtgctgggattacagacatgagccaccgcacccggccagtatcagggtatcttaactggtgaaagccacaagtggcagggaagcccaccattgtactgcccatcccccgggagtgtttgtgccaactaataattctgtttaccgaactcacatggtataagaaaatgaggtcgtggaagccagtttaagagaaggatcattttggacaactaatgactgggtaactgtgtatgtagcttcaagtagctgccacttgccacagcaggaaatgggcctttagtggcccaccctcaggaccctcaccacccatcagagaagcctgtcattcactgccataaatgtggggagccttgcaagggtgaagtgcttcgggtccagaccaaacatttccacatcaagtgtttcacctgcaaagtgtgtggctgtgacctggcacaagggggcttcttcataaagaacggagagtatctctgcaccctggactaccagcggatgtacgggacacgctgccatggctgtggggagttcgtggagggcgaagtggtgactgctctgggcaagacctaccatcccaattgctttgcttgtactatctgcaagcgcccgtttccacccggagaccgagtcacattcaatgggagagactgcctttgtcaactctgtgcacagccgatgtcgtccagtccgaaagaaaccaccttctccagcaattgtgccggctgcggaagagatatcaagaacgggcaggcgctgctggcgctggataagcagtggcacttggggtgctttaaatgcaagtcctgcgggaaggtcctcaccggggagtacatcagcaaggatggtgctccgtactgtgaaaaggactaccagggactctttggggtgaaatgtgaggcgtgtcaccagtttatcacagggaaagtcctggaggcaggtgacaaacattaccaccccagctgtgcacgatgcagcagatgcaaccagatgttcacagaaggagaggaaatgtatcttcaaggctccaccgtttggcatcccgactgtaagcaatctacgaagaccgaggaaaagctgcggcctaccaggacatcctcggaaagtatttattctaggccaggctccagtattcctggctcaccaggtcatactatctatgcaaaagtagacaatgagatcctggattacaaggatttagcagccattccgaaggtcaaggcaatttatgacattgaacgtccagatcttattacctatgagcctttctacacttcgggctatgatgacaaacaggagagacagagccttggagagtctccgaggactttgtctcctactccatcagcagaagggtaccaggatgttcgggatcggatgatccatcggtccacgagccagggctccatcaactcccctgtgtacagccgccacagctacactccaaccacgtcccgctctccccagcatttccacagacctggcaatgagccgtccagcggccggaactcccctctcccttaccggccagacagcctccctctaactccaacttacgctcaggcccctaaacatttccatgttccagatcaaggaatcaacatttaccgaaagccacccatctacaaacagcatgctgccttggcagcccagagcaagtcctcagaagatatcatcaagttttccaagttcccagcagcccaggcaccagaccccagcgagacaccaaagattgagacggaccactggcctggtcccccctcatttgctgtcgtaggacctgacatgaaacgcagatctagtggcagagaggaagatgatgaggaacttctgagacgtcggcagcttcaagaagagcaattaatgaagcttaactcaggcctgggacagttgatcttgaaagaagagatggagaaagagagccgggaaaggtcatctctgttagccagtcgctacgattctcccatcaactcagcttcacatattccatcatctaaaactgcatctctccctggctatggaagaaatgggcttcaccggcctgtttctaccgacttcgctcagtataacagctatggggatgtcagcgggggagtgcgagattaccagacactcccagatggccacatgcctgcaatgagaatggaccgaggagtgtctatgcccaacatgttggaaccaaagatatttccatatgaaatgctcatggtgaccaacagagggcgaaacaaaatcctcagagaggtggacagaaccaggctggagcgccacttagcccctgaagtgtttcgggaaatctttggaatgtccatacaggagtttgacaggttacctctttggagacgcaacgacatgaagaaaaaagcaaaactcttctaagtcccactcgtgaatggcaattagagaaaggactgacagtggcggtgccccataggatgtcatattgaggcccaaacttgattggagaatttgcaaactaccgtcgctcagcaacaccaaaaagagaaagtctggttaaaacaccatgagtcaaatgtcgggccagccaacagtaacacttgccaagaagcatggcgtagaaatttctatgttccgaaacacagagtagtgtccacatgtgaccttttcacattaccttatgtatacaacaggagctgcgttgttttcttctttttcttttcctttatctgttgtccaacaacagtgctgactgtccggataagagctggcaagtgcccttaggatgccgcatgggaaaaatcggttatcataatttcaaagtataaatatatttattatgtagcgctgcggctaagaaggaagagtgaggggtctgtccatggggtggcagtgatttcacacccgcctttcttgaatggcttcgtgttactcagccgtgccctggcaggaatggaactccatcagggaacagggcagctctgtttgaatggggtgaaaaacagcaaaattaattcttagcaagctccttgttctctactgttcaccgggacctggctggcaaatgacttagctattagtatatttaaaaactgttcaaaagcaaaagagaaggaacaggaatgaaaggaaaccttcccttaactctttctgcttcccatagcaggtctggttcctgctccccgcctaggacaggagctgtctggagctccacctttgcaaagaaaggaaaaacacaaattgcccccagattggcccagtggcatgccattaggtgattttgcgtaggggccatatcattcatggccaaaaaaaaccaaaaagcaaaaaacaaaaacaagtcccatgtcctactgactctagttcttccagtcgttatcctctgctgtctctctggcatcctatgaatcagatcaagcccatgctgttgttggtttttaaggtttctttcaataataggctaaggaaagacatgtttttctcttttaaatctctgcaactccaaagtagactccttcgaacgtatttaatttggccttttcagctttcttcttgcccagctctgtcgaattcatgggtgtgtgtgcacatgttggtttcactcacccagagtaattttgtgagcatgcatgtgctttttaatttctgcttgaatgtttgtcctgctgtgttgcagcttctaaagacattgtcaccgagtgtgtgtgactcaaagatcaagagtgaggctaaactgcgaccccaacatcacttccttcatggaaaggtgttggcgctgatgtagctcatggaaggatcagactgggaaccacagaggaaggatgaggtgggatgtggaggtcagagcatctcacgagagtccctcaggctctgcaacactagattcgaatatgagcctagggtttccccaacacgtgcgtgcatatgaaaccacatcatgattcccgacgtgagttagatgagggagagtttgtgtaactccacacccaggagggtaagccactttattatcatgctttggggctgtgcttaagaatttaagctctgttttaaagccgaagaagaaaacatttgaatttaccttcatatgccactaagaacaaaagctctgaagttcttcctgctggcaccaaatattaggattacaagctgtctctctgacaccagtggtaaaaaagcaagtagaatagtttctgagtctgtgttgcagcctctgacacgtggctcaccgctgtcatttgggggatggaatgaacagtcactgttctatagcatcctcctgtgctcttacctaaggaatctaaattgtcctagccttccattgctatgcactgaatgaggactactctcgtgtgtgtgtgtgtgtgtgtgtgtgtgtgtgtgtgtgtgtgtgtgtgttggatctactaacatgtttagcaaatggctctgacagggtggccatgagcagatgagaccagctcttgcttggttggaagccacactgcagtttgcagtttagcctttggtgtctcagtggcctcttgcttattccatgctttttctatcccatcctctctctgtgccctcctgcaatggcagccttggcacaatgcctgggtgtcctcatccttgctttactctggaaagtgtggggatggagaggatggtgcatttccagtgcttccttacctgtcaataacaatggtggccacctgggtcccagcacttggctggtggagagatttttttcattatggagctaataaagggtccctacgttttacattgattaatgaattatcacccagacatgtgcagatgaaatgtcaatataagaaaaatcaaggtatttgggaaacatgggcataatcaggtagttttgctaaaattcctcttccttggtctacataaagaagacatgggtctgtcatagaatggggacattagactgaaaactgggacaacccccttccttattttatagagactaggagttaaggggcctgcctaagattgcagtgataaagaactgaaccctaaatcagctcccactaatgaaaccctgctttccttgtatcttttaaactcagttctgcatccaacttgagaagaaaaaaagcttctttccatatcaagtaccatatgagttcatttaaactgcaccttgcagaaatgcattgccagaaagcaccagtagcctcctatctgcaagcagagtagtgctctgctctggggaggggtcattggaaaccataatgcagagtgggccccctactccatttcccagcaaaaggctccagctggagggatgggttgtggggcaacctggttcctgctaactgccagattgaatgtgtgggctagaatgcctgcacatttagttaaactgggctcagcatgcttgtcctcaaaatgtccatcctggtcacagcacacaagatggctattggtctgcttttaccctaccctgtactatacatgaaaattccagttattaacacactcaaactggtggagcttgttcaccctaggaaggggattgtatatatggcaggcttccctggtgccgatgtaaagggctacatttgggaacatttgacttccttgggactcttaagtgcatactgatggcatgaagtaaaaggggcctcaatgatgataggaaaatcagttcttttaaaatttcttcaagaaaatccaggctatcacatagtctttctgtgtgacttattaggagataggaagagcattgggaaacttgcacagctagctatgcatctacattttggtttggggttagttatgaaatgttcttaatatgacgtgttcaataacttcacataaacttcctgttctccaaaacctcaaagagatagagttaatgagttgttgtttttttttaaatgggggtagttttctatctgtcatgggctctagcatctactccgctacccaattctgtcatctccaagctgagtttcctcttctgaggcagaggctggagcagttctttttcagttctcatcctctccatcccaatccagtatatcaatcaactctaactcggagacgtctagctggcaatgtttctaaaactttcactggatttctttagacattgaagcaaacatttttttctaagaattgcttctcagatgatgatatcaaatgtatatgcttttgcaagtttgaaaagttcaaattaaccacttttgactaggtaagtctttctaaaaaccatttaaagctaactgggtcttagcatcctcctgtgtatggaagagacaggtgaccgctccaggttgggtgctcacagaacccttttcctgactctcatggaagatggtggaaggaaaatagactgtctcatcaaccctcctgtgtcctctgaagcaatctcagtttttattaaccacctcttctgtgtttctggtagctatttaacctgtatttaatctgtacttcctatgccagcctcaattttatttgatttttaaaattattctcttctaaccaatgaagtgtttgtcagtatgccccaaagcttgctcttttgtgctcccttttgaataactttctatccagaaaaagagattatttgggacttgagatttgcagtgataccaacttatagcaatgatgtactttaagggaactacccaactatgttgtgatagaagaaagagaaaccttcactttggcattttttttaatcactgtttatttttctgtttgcggcccaggaagcagtgggaggtggtggcagatatgctttgcatatggattgttatgtttttatttgggcaagtttaatcatggaaaactcaaaaagaaggggggaaatggtcagtttaagccaaaagaaactttctaaacaatgtataggtacacagcaaaattaaacaaatccaacaatttctgaagcttagtgtaattgagtggtggttgttattcaataaaattattcccaaaagtgtttctcctaagagtgcagttcccatgagtcacttcctgaacccattgaccaaaggtggacagagacaatcctgtagaccttgacattcagaaagatgtgagctgcttactgatcatatatgcatacgtttctttacagcagaggaaaccattgtccacaaaactgatgttcttttggggttttatgtacagacttgtccaatcatgtgtgtggttcctgcgagttgctgatgactccgcattgaagctctctgagttctttgattttaagttgggtttatggaattttttcaaatgttggaaggcgtgtggttcttcctgccctccctccccttttggaaatatgaaagcaaatgtttagaagaattccttttgaaaagctgtgtcgtgttccctgtgaaactgagcaggtgtgtgttggcgcgctaagtgccacatgcttgtgtgtagaggaggaggtggccctgccggctccgcgctgctgtgcctgtgatccctacctgctccccgctcctgttgccagcagcactcactgcactcctttgtcatatactctgcatcactgtcatactcacaacttcgtgaataaagttgtgtgctttattcgta

SEQ ID NO: 333719 - DNA, 6711 bp, Homo sapiens
aagaaaaattgaggccgggcgcggtggctcacgcctgtaatcccagcactttgggagagagcgtgcctgcccgccgcacacggggctggtttccggagtgcgtctctagagggatgcacgttgccttagccgagcttcggagagaagcctgatatgtaacccaggcaggtgggagcctcagtctgtcgggctgaggtctggcatctacaaagcctcttggccgtgttctgaacttgaagcctggaggagttctctgctcagcacagccaaggaacagaattagaagaaaaggaaccctggcctgaggcaggtgacaaacattaccaccccagctgtgcacgatgcagcagatgcaaccagatgttcacagaaggagaggaaatgtatcttcaaggctccaccgtttggcatcccgactgtaagcaatctacgaagaccgaggaaaagctgcgggcaaaagtagacaatgagatcctggattacaaggatttagcagccattccgaaggtcaaggcaatttatgacattgaacgtccagatcttattacctatgagcctttctacacttcgggctatgatgacaaacaggagagacagagccttggagagtctccgaggactttgtctcctactccatcagcagaagggtaccaggatgttcgggatcggatgatccatcggtccacgagccagggctccatcaactcccctgtgtacagccgccacagctacactccaaccacgtcccgctctccccagcatttccacagacctgatcaaggaatcaacatttaccgaaagccacccatctacaaacagcatgctgccttggcagcccagagcaagtcctcagaagatatcatcaagttttccaagttcccagcagcccaggcaccagaccccagcgagacaccaaagattgagacggaccactggcctggtcccccctcatttgctgtcgtaggacctgacatgaaacgcagatctagtggcagagaggaagatgatgaggaacttctgagacgtcggcagcttcaagaagagcaattaatgaagcttaactcaggcctgggacagttgatcttgaaagaagagatggagaaagagagccgggaaaggtcatctctgttagccagtcgctacgattctcccatcaactcagcttcacatattccatcatctaaaactgcatctctccctggctatggaagaaatgggcttcaccggcctgtttctaccgacttcgctcagtataacagctatggggatgtcagcgggggagtgcgagattaccagacactcccagatggccacatgcctgcaatgagaatggaccgaggagtgtctatgcccaacatgttggaaccaaagatatttccatatgaaatgctcatggtgaccaacagagggcgaaacaaaatcctcagagaggtggacagaaccaggctggagcgccacttagcccctgaagtgtttcgggaaatctttggaatgtccatacaggagtttgacaggttacctctttggagacgcaacgacatgaagaaaaaagcaaaactcttctaagtcccactcgtgaatggcaattagagaaaggactgacagtggcggtgccccataggatgtcatattgaggcccaaacttgattggagaatttgcaaactaccgtcgctcagcaacaccaaaaagagaaagtctggttaaaacaccatgagtcaaatgtcgggccagccaacagtaacacttgccaagaagcatggcgtagaaatttctatgttccgaaacacagagtagtgtccacatgtgaccttttcacattaccttatgtatacaacaggagctgcgttgttttcttctttttcttttcctttatctgttgtccaacaacagtgctgactgtccggataagagctggcaagtgcccttaggatgccgcatgggaaaaatcggttatcataatttcaaagtataaatatatttattatgtagcgctgcggctaagaaggaagagtgaggggtctgtccatggggtggcagtgatttcacacccgcctttcttgaatggcttcgtgttactcagccgtgccctggcaggaatggaactccatcagggaacagggcagctctgtttgaatggggtgaaaaacagcaaaattaattcttagcaagctccttgttctctactgttcaccgggacctggctggcaaatgacttagctattagtatatttaaaaactgttcaaaagcaaaagagaaggaacaggaatgaaaggaaaccttcccttaactctttctgcttcccatagcaggtctggttcctgctccccgcctaggacaggagctgtctggagctccacctttgcaaagaaaggaaaaacacaaattgcccccagattggcccagtggcatgccattaggtgattttgcgtaggggccatatcattcatggccaaaaaaaaccaaaaagcaaaaaacaaaaacaagtcccatgtcctactgactctagttcttccagtcgttatcctctgctgtctctctggcatcctatgaatcagatcaagcccatgctgttgttggtttttaaggtttctttcaataataggctaaggaaagacatgtttttctcttttaaatctctgcaactccaaagtagactccttcgaacgtatttaatttggccttttcagctttcttcttgcccagctctgtcgaattcatgggtgtgtgtgcacatgttggtttcactcacccagagtaattttgtgagcatgcatgtgctttttaatttctgcttgaatgtttgtcctgctgtgttgcagcttctaaagacattgtcaccgagtgtgtgtgactcaaagatcaagagtgaggctaaactgcgaccccaacatcacttccttcatggaaaggtgttggcgctgatgtagctcatggaaggatcagactgggaaccacagaggaaggatgaggtgggatgtggaggtcagagcatctcacgagagtccctcaggctctgcaacactagattcgaatatgagcctagggtttccccaacacgtgcgtgcatatgaaaccacatcatgattcccgacgtgagttagatgagggagagtttgtgtaactccacacccaggagggtaagccactttattatcatgctttggggctgtgcttaagaatttaagctctgttttaaagccgaagaagaaaacatttgaatttaccttcatatgccactaagaacaaaagctctgaagttcttcctgctggcaccaaatattaggattacaagctgtctctctgacaccagtggtaaaaaagcaagtagaatagtttctgagtctgtgttgcagcctctgacacgtggctcaccgctgtcatttgggggatggaatgaacagtcactgttctatagcatcctcctgtgctcttacctaaggaatctaaattgtcctagccttccattgctatgcactgaatgaggactactctcgtgtgtgtgtgtgtgtgtgtgtgtgtgtgtgtgtgtgtgtgtgtgtgttggatctactaacatgtttagcaaatggctctgacagggtggccatgagcagatgagaccagctcttgcttggttggaagccacactgcagtttgcagtttagcctttggtgtctcagtggcctcttgcttattccatgctttttctatcccatcctctctctgtgccctcctgcaatggcagccttggcacaatgcctgggtgtcctcatccttgctttactctggaaagtgtggggatggagaggatggtgcatttccagtgcttccttacctgtcaataacaatggtggccacctgggtcccagcacttggctggtggagagatttttttcattatggagctaataaagggtccctacgttttacattgattaatgaattatcacccagacatgtgcagatgaaatgtcaatataagaaaaatcaaggtatttgggaaacatgggcataatcaggtagttttgctaaaattcctcttccttggtctacataaagaagacatgggtctgtcatagaatggggacattagactgaaaactgggacaacccccttccttattttatagagactaggagttaaggggcctgcctaagattgcagtgataaagaactgaaccctaaatcagctcccactaatgaaaccctgctttccttgtatcttttaaactcagttctgcatccaacttgagaagaaaaaaagcttctttccatatcaagtaccatatgagttcatttaaactgcaccttgcagaaatgcattgccagaaagcaccagtagcctcctatctgcaagcagagtagtgctctgctctggggaggggtcattggaaaccataatgcagagtgggccccctactccatttcccagcaaaaggctccagctggagggatgggttgtggggcaacctggttcctgctaactgccagattgaatgtgtgggctagaatgcctgcacatttagttaaactgggctcagcatgcttgtcctcaaaatgtccatcctggtcacagcacacaagatggctattggtctgcttttaccctaccctgtactatacatgaaaattccagttattaacacactcaaactggtggagcttgttcaccctaggaaggggattgtatatatggcaggcttccctggtgccgatgtaaagggctacatttgggaacatttgacttccttgggactcttaagtgcatactgatggcatgaagtaaaaggggcctcaatgatgataggaaaatcagttcttttaaaatttcttcaagaaaatccaggctatcacatagtctttctgtgtgacttattaggagataggaagagcattgggaaacttgcacagctagctatgcatctacattttggtttggggttagttatgaaatgttcttaatatgacgtgttcaataacttcacataaacttcctgttctccaaaacctcaaagagatagagttaatgagttgttgtttttttttaaatgggggtagttttctatctgtcatgggctctagcatctactccgctacccaattctgtcatctccaagctgagtttcctcttctgaggcagaggctggagcagttctttttcagttctcatcctctccatcccaatccagtatatcaatcaactctaactcggagacgtctagctggcaatgtttctaaaactttcactggatttctttagacattgaagcaaacatttttttctaagaattgcttctcagatgatgatatcaaatgtatatgcttttgcaagtttgaaaagttcaaattaaccacttttgactaggtaagtctttctaaaaaccatttaaagctaactgggtcttagcatcctcctgtgtatggaagagacaggtgaccgctccaggttgggtgctcacagaacccttttcctgactctcatggaagatggtggaaggaaaatagactgtctcatcaaccctcctgtgtcctctgaagcaatctcagtttttattaaccacctcttctgtgtttctggtagctatttaacctgtatttaatctgtacttcctatgccagcctcaattttatttgatttttaaaattattctcttctaaccaatgaagtgtttgtcagtatgccccaaagcttgctcttttgtgctcccttttgaataactttctatccagaaaaagagattatttgggacttgagatttgcagtgataccaacttatagcaatgatgtactttaagggaactacccaactatgttgtgatagaagaaagagaaaccttcactttggcattttttttaatcactgtttatttttctgtttgcggcccaggaagcagtgggaggtggtggcagatatgctttgcatatggattgttatgtttttatttgggcaagtttaatcatggaaaactcaaaaagaaggggggaaatggtcagtttaagccaaaagaaactttctaaacaatgtataggtacacagcaaaattaaacaaatccaacaatttctgaagcttagtgtaattgagtggtggttgttattcaataaaattattcccaaaagtgtttctcctaagagtgcagttcccatgagtcacttcctgaacccattgaccaaaggtggacagagacaatcctgtagaccttgacattcagaaagatgtgagctgcttactgatcatatatgcatacgtttctttacagcagaggaaaccattgtccacaaaactgatgttcttttggggttttatgtacagacttgtccaatcatgtgtgtggttcctgcgagttgctgatgactccgcattgaagctctctgagttctttgattttaagttgggtttatggaattttttcaaatgttggaaggcgtgtggttcttcctgccctccctccccttttggaaatatgaaagcaaatgtttagaagaattccttttgaaaagctgtgtcgtgttccctgtgaaactgagcaggtgtgtgttggcgcgctaagtgccacatgcttgtgtgtagaggaggaggtggccctgccggctccgcgctgctgtgcctgtgatccctacctgctccccgctcctgttgccagcagcactcactgcactcctttgtcatatactctgcatcactgtcatactcacaacttcgtgaataaagttgtgtgctttattcgta

SEQ ID NO: 333720 - DNA, 7630 bp, Homo sapiens
  misc_feature (2)..(2): n is a, c, g, or t
  misc_feature (4)..(6): n is a, c, g, or t
  misc_feature (10)..(10): n is a, c, g, or t
  misc_feature (12)..(14): n is a, c, g, or t
  misc_feature (16)..(18): n is a, c, g, or t
tngnnnggcngnnngnnnaggtagacagtaaggagccaggggaacagagagaattgtggggcagcaccgctccttgggtccccactccccatttctcattgcttggaaatccatgccaagatgcctgccttccttggtctaaagtgtctggggaaattgtgcagctctgagaaaagcaaagtcacctcatctgagagaaccagtgccaggggctcgaacagaaagagactgattgttgaggaccggagggtctctgggacctccttcaccgctcataggcgtgccactatcactcatttgctgtatctctgtcccaaggactactgcccacgtgggcgtgtatgtaacagcgttgatccttttgtggcccaccctcaggaccctcaccacccatcagagaagcctgtcattcactgccataaatgtggggagccttgcaagggtgaagtgcttcgggtccagaccaaacatttccacatcaagtgtttcacctgcaaagtgtgtggctgtgacctggcacaagggggcttcttcataaagaacggagagtatctctgcaccctggactaccagcggatgtacgggacacgctgccatggctgtggggagttcgtggagggcgaagtggtgactgctctgggcaagacctaccatcccaattgctttgcttgtactatctgcaagcgcccgtttccacccggagaccgagtcacattcaatgggagagactgcctttgtcaactctgtgcacagccgatgtcgtccagtccgaaagaaaccaccttctccagcaattgtgccggctgcggaagagatatcaagaacgggcaggcgctgctggcgctggataagcagtggcacttggggtgctttaaatgcaagtcctgcgggaaggtcctcaccggggagtacatcagcaaggatggtgctccgtactgtgaaaaggactaccagggactctttggggtgaaatgtgaggcgtgtcaccagtttatcacagggaaagtcctggaggcaggtgacaaacattaccaccccagctgtgcacgatgcagcagatgcaaccagatgttcacagaaggagaggaaatgtatcttcaaggctccaccgtttggcatcccgactgtaagcaatctacgaagaccgaggaaaagctgcggcctaccaggacatcctcggaaagtatttattctaggccaggctccagtattcctggctcaccaggtcatactatctatgcaaaagtagacaatgagatcctggattacaaggatttagcagccattccgaaggtcaaggcaatttatgacattgaacgtccagatcttattacctatgagcctttctacacttcgggctatgatgacaaacaggagagacagagccttggagagtctccgaggactttgtctcctactccatcagcagaagggtaccaggatgttcgggatcggatgatccatcggtccacgagccagggctccatcaactcccctgtgtacagccgccacagctacactccaaccacgtcccgctctccccagcatttccacagacctggcaatgagccgtccagcggccggaactcccctctcccttaccggccagacagcctccctctaactccaacttacgctcaggcccctaaacatttccatgttccagatcaaggaatcaacatttaccgaaagccacccatctacaaacagcatgctgccttggcagcccagagcaagtcctcagaagatatcatcaagttttccaagttcccagcagcccaggcaccagaccccagcgagacaccaaagattgagacggaccactggcctggtcccccctcatttgctgtcgtaggacctgacatgaaacgcagatctagtggcagagaggaagatgatgaggaacttctgagacgtcggcagcttcaagaagagcaattaatgaagcttaactcaggcctgggacagttgatcttgaaagaagagatggagaaagagagccgggaaaggtcatctctgttagccagtcgctacgattctcccatcaactcagcttcacatattccatcatctaaaactgcatctctccctggctatggaagaaatgggcttcaccggcctgtttctaccgacttcgctcagtataacagctatggggatgtcagcgggggagtgcgagattaccagacactcccagatggccacatgcctgcaatgagaatggaccgaggagtgtctatgcccaacatgttggaaccaaagatatttccatatgaaatgctcatggtgaccaacagagggcgaaacaaaatcctcagagaggtggacagaaccaggctggagcgccacttagcccctgaagtgtttcgggaaatctttggaatgtccatacaggagtttgacaggttacctctttggagacgcaacgacatgaagaaaaaagcaaaactcttctaagtcccactcgtgaatggcaattagagaaaggactgacagtggcggtgccccataggatgtcatattgaggcccaaacttgattggagaatttgcaaactaccgtcgctcagcaacaccaaaaagagaaagtctggttaaaacaccatgagtcaaatgtcgggccagccaacagtaacacttgccaagaagcatggcgtagaaatttctatgttccgaaacacagagtagtgtccacatgtgaccttttcacattaccttatgtatacaacaggagctgcgttgttttcttctttttcttttcctttatctgttgtccaacaacagtgctgactgtccggataagagctggcaagtgcccttaggatgccgcatgggaaaaatcggttatcataatttcaaagtataaatatatttattatgtagcgctgcggctaagaaggaagagtgaggggtctgtccatggggtggcagtgatttcacacccgcctttcttgaatggcttcgtgttactcagccgtgccctggcaggaatggaactccatcagggaacagggcagctctgtttgaatggggtgaaaaacagcaaaattaattcttagcaagctccttgttctctactgttcaccgggacctggctggcaaatgacttagctattagtatatttaaaaactgttcaaaagcaaaagagaaggaacaggaatgaaaggaaaccttcccttaactctttctgcttcccatagcaggtctggttcctgctccccgcctaggacaggagctgtctggagctccacctttgcaaagaaaggaaaaacacaaattgcccccagattggcccagtggcatgccattaggtgattttgcgtaggggccatatcattcatggccaaaaaaaaccaaaaagcaaaaaacaaaaacaagtcccatgtcctactgactctagttcttccagtcgttatcctctgctgtctctctggcatcctatgaatcagatcaagcccatgctgttgttggtttttaaggtttctttcaataataggctaaggaaagacatgtttttctcttttaaatctctgcaactccaaagtagactccttcgaacgtatttaatttggccttttcagctttcttcttgcccagctctgtcgaattcatgggtgtgtgtgcacatgttggtttcactcacccagagtaattttgtgagcatgcatgtgctttttaatttctgcttgaatgtttgtcctgctgtgttgcagcttctaaagacattgtcaccgagtgtgtgtgactcaaagatcaagagtgaggctaaactgcgaccccaacatcacttccttcatggaaaggtgttggcgctgatgtagctcatggaaggatcagactgggaaccacagaggaaggatgaggtgggatgtggaggtcagagcatctcacgagagtccctcaggctctgcaacactagattcgaatatgagcctagggtttccccaacacgtgcgtgcatatgaaaccacatcatgattcccgacgtgagttagatgagggagagtttgtgtaactccacacccaggagggtaagccactttattatcatgctttggggctgtgcttaagaatttaagctctgttttaaagccgaagaagaaaacatttgaatttaccttcatatgccactaagaacaaaagctctgaagttcttcctgctggcaccaaatattaggattacaagctgtctctctgacaccagtggtaaaaaagcaagtagaatagtttctgagtctgtgttgcagcctctgacacgtggctcaccgctgtcatttgggggatggaatgaacagtcactgttctatagcatcctcctgtgctcttacctaaggaatctaaattgtcctagccttccattgctatgcactgaatgaggactactctcgtgtgtgtgtgtgtgtgtgtgtgtgtgtgtgtgtgtgtgtgtgtgtgttggatctactaacatgtttagcaaatggctctgacagggtggccatgagcagatgagaccagctcttgcttggttggaagccacactgcagtttgcagtttagcctttggtgtctcagtggcctcttgcttattccatgctttttctatcccatcctctctctgtgccctcctgcaatggcagccttggcacaatgcctgggtgtcctcatccttgctttactctggaaagtgtggggatggagaggatggtgcatttccagtgcttccttacctgtcaataacaatggtggccacctgggtcccagcacttggctggtggagagatttttttcattatggagctaataaagggtccctacgttttacattgattaatgaattatcacccagacatgtgcagatgaaatgtcaatataagaaaaatcaaggtatttgggaaacatgggcataatcaggtagttttgctaaaattcctcttccttggtctacataaagaagacatgggtctgtcatagaatggggacattagactgaaaactgggacaacccccttccttattttatagagactaggagttaaggggcctgcctaagattgcagtgataaagaactgaaccctaaatcagctcccactaatgaaaccctgctttccttgtatcttttaaactcagttctgcatccaacttgagaagaaaaaaagcttctttccatatcaagtaccatatgagttcatttaaactgcaccttgcagaaatgcattgccagaaagcaccagtagcctcctatctgcaagcagagtagtgctctgctctggggaggggtcattggaaaccataatgcagagtgggccccctactccatttcccagcaaaaggctccagctggagggatgggttgtggggcaacctggttcctgctaactgccagattgaatgtgtgggctagaatgcctgcacatttagttaaactgggctcagcatgcttgtcctcaaaatgtccatcctggtcacagcacacaagatggctattggtctgcttttaccctaccctgtactatacatgaaaattccagttattaacacactcaaactggtggagcttgttcaccctaggaaggggattgtatatatggcaggcttccctggtgccgatgtaaagggctacatttgggaacatttgacttccttgggactcttaagtgcatactgatggcatgaagtaaaaggggcctcaatgatgataggaaaatcagttcttttaaaatttcttcaagaaaatccaggctatcacatagtctttctgtgtgacttattaggagataggaagagcattgggaaacttgcacagctagctatgcatctacattttggtttggggttagttatgaaatgttcttaatatgacgtgttcaataacttcacataaacttcctgttctccaaaacctcaaagagatagagttaatgagttgttgtttttttttaaatgggggtagttttctatctgtcatgggctctagcatctactccgctacccaattctgtcatctccaagctgagtttcctcttctgaggcagaggctggagcagttctttttcagttctcatcctctccatcccaatccagtatatcaatcaactctaactcggagacgtctagctggcaatgtttctaaaactttcactggatttctttagacattgaagcaaacatttttttctaagaattgcttctcagatgatgatatcaaatgtatatgcttttgcaagtttgaaaagttcaaattaaccacttttgactaggtaagtctttctaaaaaccatttaaagctaactgggtcttagcatcctcctgtgtatggaagagacaggtgaccgctccaggttgggtgctcacagaacccttttcctgactctcatggaagatggtggaaggaaaatagactgtctcatcaaccctcctgtgtcctctgaagcaatctcagtttttattaaccacctcttctgtgtttctggtagctatttaacctgtatttaatctgtacttcctatgccagcctcaattttatttgatttttaaaattattctcttctaaccaatgaagtgtttgtcagtatgccccaaagcttgctcttttgtgctcccttttgaataactttctatccagaaaaagagattatttgggacttgagatttgcagtgataccaacttatagcaatgatgtactttaagggaactacccaactatgttgtgatagaagaaagagaaaccttcactttggcattttttttaatcactgtttatttttctgtttgcggcccaggaagcagtgggaggtggtggcagatatgctttgcatatggattgttatgtttttatttgggcaagtttaatcatggaaaactcaaaaagaaggggggaaatggtcagtttaagccaaaagaaactttctaaacaatgtataggtacacagcaaaattaaacaaatccaacaatttctgaagcttagtgtaattgagtggtggttgttattcaataaaattattcccaaaagtgtttctcctaagagtgcagttcccatgagtcacttcctgaacccattgaccaaaggtggacagagacaatcctgtagaccttgacattcagaaagatgtgagctgcttactgatcatatatgcatacgtttctttacagcagaggaaaccattgtccacaaaactgatgttcttttggggttttatgtacagacttgtccaatcatgtgtgtggttcctgcgagttgctgatgactccgcattgaagctctctgagttctttgattttaagttgggtttatggaattttttcaaatgttggaaggcgtgtggttcttcctgccctccctccccttttggaaatatgaaagcaaatgtttagaagaattccttttgaaaagctgtgtcgtgttccctgtgaaactgagcaggtgtgtgttggcgcgctaagtgccacatgcttgtgtgtagaggaggaggtggccctgccggctccgcgctgctgtgcctgtgatccctacctgctccccgctcctgttgccagcagcactcactgcactcctttgtcatatactctgcatcactgtcatactcacaacttcgtgaataaagttgtgtgctttattcgtaaaaaaaaaaacacacaatacaaaaaaac

SEQ ID NO: 333721 - DNA, 6810 bp, Homo sapiens
aagaaaaattgaggccgggcgcggtggctcacgcctgtaatcccagcactttgggagagagcgtgcctgcccgccgcacacggggctggtttccggagtgcgtctctagagggatgcacgttgccttagccgagcttcggagagaagcctgatatgtaacccaggcaggtgggagcctcagtctgtcgggctgaggtctggcatctacaaagcctcttggccgtgttctgaacttgaagcctggaggagttctctgctcagcacagccaaggaacagaattagaagaaaaggaaccctggcctgaggtaaagcggacattgcacaaggcaggtgacaaacattaccaccccagctgtgcacgatgcagcagatgcaaccagatgttcacagaaggagaggaaatgtatcttcaaggctccaccgtttggcatcccgactgtaagcaatctacgaagaccgaggaaaagctgcggcctaccaggacatcctcggaaagtatttattctaggccaggctccagtattcctggctcaccaggtcatactatctatgcaaaagtagacaatgagatcctggattacaaggatttagcagccattccgaaggtcaaggcaatttatgacattgaacgtccagatcttattacctatgagcctttctacacttcgggctatgatgacaaacaggagagacagagccttggagagtctccgaggactttgtctcctactccatcagcagaagggtaccaggatgttcgggatcggatgatccatcggtccacgagccagggctccatcaactcccctgtgtacagccgccacagctacactccaaccacgtcccgctctccccagcatttccacagacctgatcaaggaatcaacatttaccgaaagccacccatctacaaacagcatgctgccttggcagcccagagcaagtcctcagaagatatcatcaagttttccaagttcccagcagcccaggcaccagaccccagcgagacaccaaagattgagacggaccactggcctggtcccccctcatttgctgtcgtaggacctgacatgaaacgcagatctagtggcagagaggaagatgatgaggaacttctgagacgtcggcagcttcaagaagagcaattaatgaagcttaactcaggcctgggacagttgatcttgaaagaagagatggagaaagagagccgggaaaggtcatctctgttagccagtcgctacgattctcccatcaactcagcttcacatattccatcatctaaaactgcatctctccctggctatggaagaaatgggcttcaccggcctgtttctaccgacttcgctcagtataacagctatggggatgtcagcgggggagtgcgagattaccagacactcccagatggccacatgcctgcaatgagaatggaccgaggagtgtctatgcccaacatgttggaaccaaagatatttccatatgaaatgctcatggtgaccaacagagggcgaaacaaaatcctcagagaggtggacagaaccaggctggagcgccacttagcccctgaagtgtttcgggaaatctttggaatgtccatacaggagtttgacaggttacctctttggagacgcaacgacatgaagaaaaaagcaaaactcttctaagtcccactcgtgaatggcaattagagaaaggactgacagtggcggtgccccataggatgtcatattgaggcccaaacttgattggagaatttgcaaactaccgtcgctcagcaacaccaaaaagagaaagtctggttaaaacaccatgagtcaaatgtcgggccagccaacagtaacacttgccaagaagcatggcgtagaaatttctatgttccgaaacacagagtagtgtccacatgtgaccttttcacattaccttatgtatacaacaggagctgcgttgttttcttctttttcttttcctttatctgttgtccaacaacagtgctgactgtccggataagagctggcaagtgcccttaggatgccgcatgggaaaaatcggttatcataatttcaaagtataaatatatttattatgtagcgctgcggctaagaaggaagagtgaggggtctgtccatggggtggcagtgatttcacacccgcctttcttgaatggcttcgtgttactcagccgtgccctggcaggaatggaactccatcagggaacagggcagctctgtttgaatggggtgaaaaacagcaaaattaattcttagcaagctccttgttctctactgttcaccgggacctggctggcaaatgacttagctattagtatatttaaaaactgttcaaaagcaaaagagaaggaacaggaatgaaaggaaaccttcccttaactctttctgcttcccatagcaggtctggttcctgctccccgcctaggacaggagctgtctggagctccacctttgcaaagaaaggaaaaacacaaattgcccccagattggcccagtggcatgccattaggtgattttgcgtaggggccatatcattcatggccaaaaaaaaccaaaaagcaaaaaacaaaaacaagtcccatgtcctactgactctagttcttccagtcgttatcctctgctgtctctctggcatcctatgaatcagatcaagcccatgctgttgttggtttttaaggtttctttcaataataggctaaggaaagacatgtttttctcttttaaatctctgcaactccaaagtagactccttcgaacgtatttaatttggccttttcagctttcttcttgcccagctctgtcgaattcatgggtgtgtgtgcacatgttggtttcactcacccagagtaattttgtgagcatgcatgtgctttttaatttctgcttgaatgtttgtcctgctgtgttgcagcttctaaagacattgtcaccgagtgtgtgtgactcaaagatcaagagtgaggctaaactgcgaccccaacatcacttccttcatggaaaggtgttggcgctgatgtagctcatggaaggatcagactgggaaccacagaggaaggatgaggtgggatgtggaggtcagagcatctcacgagagtccctcaggctctgcaacactagattcgaatatgagcctagggtttccccaacacgtgcgtgcatatgaaaccacatcatgattcccgacgtgagttagatgagggagagtttgtgtaactccacacccaggagggtaagccactttattatcatgctttggggctgtgcttaagaatttaagctctgttttaaagccgaagaagaaaacatttgaatttaccttcatatgccactaagaacaaaagctctgaagttcttcctgctggcaccaaatattaggattacaagctgtctctctgacaccagtggtaaaaaagcaagtagaatagtttctgagtctgtgttgcagcctctgacacgtggctcaccgctgtcatttgggggatggaatgaacagtcactgttctatagcatcctcctgtgctcttacctaaggaatctaaattgtcctagccttccattgctatgcactgaatgaggactactctcgtgtgtgtgtgtgtgtgtgtgtgtgtgtgtgtgtgtgtgtgtgtgtgttggatctactaacatgtttagcaaatggctctgacagggtggccatgagcagatgagaccagctcttgcttggttggaagccacactgcagtttgcagtttagcctttggtgtctcagtggcctcttgcttattccatgctttttctatcccatcctctctctgtgccctcctgcaatggcagccttggcacaatgcctgggtgtcctcatccttgctttactctggaaagtgtggggatggagaggatggtgcatttccagtgcttccttacctgtcaataacaatggtggccacctgggtcccagcacttggctggtggagagatttttttcattatggagctaataaagggtccctacgttttacattgattaatgaattatcacccagacatgtgcagatgaaatgtcaatataagaaaaatcaaggtatttgggaaacatgggcataatcaggtagttttgctaaaattcctcttccttggtctacataaagaagacatgggtctgtcatagaatggggacattagactgaaaactgggacaacccccttccttattttatagagactaggagttaaggggcctgcctaagattgcagtgataaagaactgaaccctaaatcagctcccactaatgaaaccctgctttccttgtatcttttaaactcagttctgcatccaacttgagaagaaaaaaagcttctttccatatcaagtaccatatgagttcatttaaactgcaccttgcagaaatgcattgccagaaagcaccagtagcctcctatctgcaagcagagtagtgctctgctctggggaggggtcattggaaaccataatgcagagtgggccccctactccatttcccagcaaaaggctccagctggagggatgggttgtggggcaacctggttcctgctaactgccagattgaatgtgtgggctagaatgcctgcacatttagttaaactgggctcagcatgcttgtcctcaaaatgtccatcctggtcacagcacacaagatggctattggtctgcttttaccctaccctgtactatacatgaaaattccagttattaacacactcaaactggtggagcttgttcaccctaggaaggggattgtatatatggcaggcttccctggtgccgatgtaaagggctacatttgggaacatttgacttccttgggactcttaagtgcatactgatggcatgaagtaaaaggggcctcaatgatgataggaaaatcagttcttttaaaatttcttcaagaaaatccaggctatcacatagtctttctgtgtgacttattaggagataggaagagcattgggaaacttgcacagctagctatgcatctacattttggtttggggttagttatgaaatgttcttaatatgacgtgttcaataacttcacataaacttcctgttctccaaaacctcaaagagatagagttaatgagttgttgtttttttttaaatgggggtagttttctatctgtcatgggctctagcatctactccgctacccaattctgtcatctccaagctgagtttcctcttctgaggcagaggctggagcagttctttttcagttctcatcctctccatcccaatccagtatatcaatcaactctaactcggagacgtctagctggcaatgtttctaaaactttcactggatttctttagacattgaagcaaacatttttttctaagaattgcttctcagatgatgatatcaaatgtatatgcttttgcaagtttgaaaagttcaaattaaccacttttgactaggtaagtctttctaaaaaccatttaaagctaactgggtcttagcatcctcctgtgtatggaagagacaggtgaccgctccaggttgggtgctcacagaacccttttcctgactctcatggaagatggtggaaggaaaatagactgtctcatcaaccctcctgtgtcctctgaagcaatctcagtttttattaaccacctcttctgtgtttctggtagctatttaacctgtatttaatctgtacttcctatgccagcctcaattttatttgatttttaaaattattctcttctaaccaatgaagtgtttgtcagtatgccccaaagcttgctcttttgtgctcccttttgaataactttctatccagaaaaagagattatttgggacttgagatttgcagtgataccaacttatagcaatgatgtactttaagggaactacccaactatgttgtgatagaagaaagagaaaccttcactttggcattttttttaatcactgtttatttttctgtttgcggcccaggaagcagtgggaggtggtggcagatatgctttgcatatggattgttatgtttttatttgggcaagtttaatcatggaaaactcaaaaagaaggggggaaatggtcagtttaagccaaaagaaactttctaaacaatgtataggtacacagcaaaattaaacaaatccaacaatttctgaagcttagtgtaattgagtggtggttgttattcaataaaattattcccaaaagtgtttctcctaagagtgcagttcccatgagtcacttcctgaacccattgaccaaaggtggacagagacaatcctgtagaccttgacattcagaaagatgtgagctgcttactgatcatatatgcatacgtttctttacagcagaggaaaccattgtccacaaaactgatgttcttttggggttttatgtacagacttgtccaatcatgtgtgtggttcctgcgagttgctgatgactccgcattgaagctctctgagttctttgattttaagttgggtttatggaattttttcaaatgttggaaggcgtgtggttcttcctgccctccctccccttttggaaatatgaaagcaaatgtttagaagaattccttttgaaaagctgtgtcgtgttccctgtgaaactgagcaggtgtgtgttggcgcgctaagtgccacatgcttgtgtgtagaggaggaggtggccctgccggctccgcgctgctgtgcctgtgatccctacctgctccccgctcctgttgccagcagcactcactgcactcctttgtcatatactctgcatcactgtcatactcacaacttcgtgaataaagttgtgtgctttattcgta

SEQ ID NO: 333722 - DNA, 6875 bp, Homo sapiens
ctcccagtgggtgtgcagacactggagagacccagtggcccaccctcaggaccctcaccacccatcagagaagcctgtcattcactgccataaatgtggggagccttgcaagggtgaagtgcttcgggtccagaccaaacatttccacatcaagtgtttcacctgcaaagtgtgtggctgtgacctggcacaagggggcttcttcataaagaacggagagtatctctgcaccctggactaccagcggatgtacgggacacgctgccatggctgtggggagttcgtggagggcgaagtggtgactgctctgggcaagacctaccatcccaattgctttgcttgtactatctgcaagcgcccgtttccacccggagaccgagtcacattcaatgggagagactgcctttgtcaactctgtgcacagccgatgtcgtccagtccgaaagaaaccaccttctccagcaattgtgccggctgcggaagagatatcaagaacgggcaggcgctgctggcgctggataagcagtggcacttggggtgctttaaatgcaagtcctgcgggaaggtcctcaccggggagtacatcagcaaggatggtgctccgtactgtgaaaaggactaccagggactctttggggtgaaatgtgaggcgtgtcaccagtttatcacagggaaagtcctggaggcaggtgacaaacattaccaccccagctgtgcacgatgcagcagatgcaaccagatgttcacagaaggagaggaaatgtatcttcaagtctccgaggactttgtctcctactccatcagcagaagggtaccaggatgttcgggatcggatgatccatcggtccacgagccagggctccatcaactcccctgtgtacagccgccacagctacactccaaccacgtcccgctctccccagcatttccacagacctgatcaaggaatcaacatttaccgaaagccacccatctacaaacagcatgctgccttggcagcccagagcaagtcctcagaagatatcatcaagttttccaagttcccagcagcccaggcaccagaccccagcgagacaccaaagattgagacggaccactggcctggtcccccctcatttgctgtcgtaggacctgacatgaaacgcagatctagtggcagagaggaagatgatgaggaacttctgagacgtcggcagcttcaagaagagcaattaatgaagcttaactcaggcctgggacagttgatcttgaaagaagagatggagaaagagagccgggaaaggtcatctctgttagccagtcgctacgattctcccatcaactcagcttcacatattccatcatctaaaactgcatctctccctggctatggaagaaatgggcttcaccggcctgtttctaccgacttcgctcagtataacagctatggggatgtcagcgggggagtgcgagattaccagacactcccagatggccacatgcctgcaatgagaatggaccgaggagtgtctatgcccaacatgttggaaccaaagatatttccatatgaaatgctcatggtgaccaacagagggcgaaacaaaatcctcagagaggtggacagaaccaggctggagcgccacttagcccctgaagtgtttcgggaaatctttggaatgtccatacaggagtttgacaggttacctctttggagacgcaacgacatgaagaaaaaagcaaaactcttctaagtcccactcgtgaatggcaattagagaaaggactgacagtggcggtgccccataggatgtcatattgaggcccaaacttgattggagaatttgcaaactaccgtcgctcagcaacaccaaaaagagaaagtctggttaaaacaccatgagtcaaatgtcgggccagccaacagtaacacttgccaagaagcatggcgtagaaatttctatgttccgaaacacagagtagtgtccacatgtgaccttttcacattaccttatgtatacaacaggagctgcgttgttttcttctttttcttttcctttatctgttgtccaacaacagtgctgactgtccggataagagctggcaagtgcccttaggatgccgcatgggaaaaatcggttatcataatttcaaagtataaatatatttattatgtagcgctgcggctaagaaggaagagtgaggggtctgtccatggggtggcagtgatttcacacccgcctttcttgaatggcttcgtgttactcagccgtgccctggcaggaatggaactccatcagggaacagggcagctctgtttgaatggggtgaaaaacagcaaaattaattcttagcaagctccttgttctctactgttcaccgggacctggctggcaaatgacttagctattagtatatttaaaaactgttcaaaagcaaaagagaaggaacaggaatgaaaggaaaccttcccttaactctttctgcttcccatagcaggtctggttcctgctccccgcctaggacaggagctgtctggagctccacctttgcaaagaaaggaaaaacacaaattgcccccagattggcccagtggcatgccattaggtgattttgcgtaggggccatatcattcatggccaaaaaaaaccaaaaagcaaaaaacaaaaacaagtcccatgtcctactgactctagttcttccagtcgttatcctctgctgtctctctggcatcctatgaatcagatcaagcccatgctgttgttggtttttaaggtttctttcaataataggctaaggaaagacatgtttttctcttttaaatctctgcaactccaaagtagactccttcgaacgtatttaatttggccttttcagctttcttcttgcccagctctgtcgaattcatgggtgtgtgtgcacatgttggtttcactcacccagagtaattttgtgagcatgcatgtgctttttaatttctgcttgaatgtttgtcctgctgtgttgcagcttctaaagacattgtcaccgagtgtgtgtgactcaaagatcaagagtgaggctaaactgcgaccccaacatcacttccttcatggaaaggtgttggcgctgatgtagctcatggaaggatcagactgggaaccacagaggaaggatgaggtgggatgtggaggtcagagcatctcacgagagtccctcaggctctgcaacactagattcgaatatgagcctagggtttccccaacacgtgcgtgcatatgaaaccacatcatgattcccgacgtgagttagatgagggagagtttgtgtaactccacacccaggagggtaagccactttattatcatgctttggggctgtgcttaagaatttaagctctgttttaaagccgaagaagaaaacatttgaatttaccttcatatgccactaagaacaaaagctctgaagttcttcctgctggcaccaaatattaggattacaagctgtctctctgacaccagtggtaaaaaagcaagtagaatagtttctgagtctgtgttgcagcctctgacacgtggctcaccgctgtcatttgggggatggaatgaacagtcactgttctatagcatcctcctgtgctcttacctaaggaatctaaattgtcctagccttccattgctatgcactgaatgaggactactctcgtgtgtgtgtgtgtgtgtgtgtgtgtgtgtgtgtgtgtgtgtgtgtgttggatctactaacatgtttagcaaatggctctgacagggtggccatgagcagatgagaccagctcttgcttggttggaagccacactgcagtttgcagtttagcctttggtgtctcagtggcctcttgcttattccatgctttttctatcccatcctctctctgtgccctcctgcaatggcagccttggcacaatgcctgggtgtcctcatccttgctttactctggaaagtgtggggatggagaggatggtgcatttccagtgcttccttacctgtcaataacaatggtggccacctgggtcccagcacttggctggtggagagatttttttcattatggagctaataaagggtccctacgttttacattgattaatgaattatcacccagacatgtgcagatgaaatgtcaatataagaaaaatcaaggtatttgggaaacatgggcataatcaggtagttttgctaaaattcctcttccttggtctacataaagaagacatgggtctgtcatagaatggggacattagactgaaaactgggacaacccccttccttattttatagagactaggagttaaggggcctgcctaagattgcagtgataaagaactgaaccctaaatcagctcccactaatgaaaccctgctttccttgtatcttttaaactcagttctgcatccaacttgagaagaaaaaaagcttctttccatatcaagtaccatatgagttcatttaaactgcaccttgcagaaatgcattgccagaaagcaccagtagcctcctatctgcaagcagagtagtgctctgctctggggaggggtcattggaaaccataatgcagagtgggccccctactccatttcccagcaaaaggctccagctggagggatgggttgtggggcaacctggttcctgctaactgccagattgaatgtgtgggctagaatgcctgcacatttagttaaactgggctcagcatgcttgtcctcaaaatgtccatcctggtcacagcacacaagatggctattggtctgcttttaccctaccctgtactatacatgaaaattccagttattaacacactcaaactggtggagcttgttcaccctaggaaggggattgtatatatggcaggcttccctggtgccgatgtaaagggctacatttgggaacatttgacttccttgggactcttaagtgcatactgatggcatgaagtaaaaggggcctcaatgatgataggaaaatcagttcttttaaaatttcttcaagaaaatccaggctatcacatagtctttctgtgtgacttattaggagataggaagagcattgggaaacttgcacagctagctatgcatctacattttggtttggggttagttatgaaatgttcttaatatgacgtgttcaataacttcacataaacttcctgttctccaaaacctcaaagagatagagttaatgagttgttgtttttttttaaatgggggtagttttctatctgtcatgggctctagcatctactccgctacccaattctgtcatctccaagctgagtttcctcttctgaggcagaggctggagcagttctttttcagttctcatcctctccatcccaatccagtatatcaatcaactctaactcggagacgtctagctggcaatgtttctaaaactttcactggatttctttagacattgaagcaaacatttttttctaagaattgcttctcagatgatgatatcaaatgtatatgcttttgcaagtttgaaaagttcaaattaaccacttttgactaggtaagtctttctaaaaaccatttaaagctaactgggtcttagcatcctcctgtgtatggaagagacaggtgaccgctccaggttgggtgctcacagaacccttttcctgactctcatggaagatggtggaaggaaaatagactgtctcatcaaccctcctgtgtcctctgaagcaatctcagtttttattaaccacctcttctgtgtttctggtagctatttaacctgtatttaatctgtacttcctatgccagcctcaattttatttgatttttaaaattattctcttctaaccaatgaagtgtttgtcagtatgccccaaagcttgctcttttgtgctcccttttgaataactttctatccagaaaaagagattatttgggacttgagatttgcagtgataccaacttatagcaatgatgtactttaagggaactacccaactatgttgtgatagaagaaagagaaaccttcactttggcattttttttaatcactgtttatttttctgtttgcggcccaggaagcagtgggaggtggtggcagatatgctttgcatatggattgttatgtttttatttgggcaagtttaatcatggaaaactcaaaaagaaggggggaaatggtcagtttaagccaaaagaaactttctaaacaatgtataggtacacagcaaaattaaacaaatccaacaatttctgaagcttagtgtaattgagtggtggttgttattcaataaaattattcccaaaagtgtttctcctaagagtgcagttcccatgagtcacttcctgaacccattgaccaaaggtggacagagacaatcctgtagaccttgacattcagaaagatgtgagctgcttactgatcatatatgcatacgtttctttacagcagaggaaaccattgtccacaaaactgatgttcttttggggttttatgtacagacttgtccaatcatgtgtgtggttcctgcgagttgctgatgactccgcattgaagctctctgagttctttgattttaagttgggtttatggaattttttcaaatgttggaaggcgtgtggttcttcctgccctccctccccttttggaaatatgaaagcaaatgtttagaagaattccttttgaaaagctgtgtcgtgttccctgtgaaactgagcaggtgtgtgttggcgcgctaagtgccacatgcttgtgtgtagaggaggaggtggccctgccggctccgcgctgctgtgcctgtgatccctacctgctccccgctcctgttgccagcagcactcactgcactcctttgtcatatactctgcatcactgtcatactcacaacttcgtgaataaagttgtgtgctttattcgta

SEQ ID NO: 333723 - DNA, 6028 bp, Homo sapiens
gccatggataatggtaataaacagaactttctggaactgaaacttttgccagagaacaagaaaactatgtaagtggggttgtaccgccattgtcttacagaccaatagctaagcaacccctgattcccatctagatgcagctgccttggcagcccagagcaagtcctcagaagatatcatcaagttttccaagttcccagcagcccaggcaccagaccccagcgagacaccaaagattgagacggaccactggcctggtcccccctcatttgctgtcgtaggacctgacatgaaacgcagatctagtggcagagaggaagatgatgaggaacttctgagacgtcggcagcttcaagaagagcaattaatgaagcttaactcaggcctgggacagttgatcttgaaagaagagatggagaaagagagccgggaaaggtcatctctgttagccagtcgctacgattctcccatcaactcagcttcacatattccatcatctaaaactgcatctctccctggctatggaagaaatgggcttcaccggcctgtttctaccgacttcgctcagtataacagctatggggatgtcagcgggggagtgcgagattaccagacactcccagatggccacatgcctgcaatgagaatggaccgaggagtgtctatgcccaacatgttggaaccaaagatatttccatatgaaatgctcatggtgaccaacagagggcgaaacaaaatcctcagagaggtggacagaaccaggctggagcgccacttagcccctgaagtgtttcgggaaatctttggaatgtccatacaggagtttgacaggttacctctttggagacgcaacgacatgaagaaaaaagcaaaactcttctaagtcccactcgtgaatggcaattagagaaaggactgacagtggcggtgccccataggatgtcatattgaggcccaaacttgattggagaatttgcaaactaccgtcgctcagcaacaccaaaaagagaaagtctggttaaaacaccatgagtcaaatgtcgggccagccaacagtaacacttgccaagaagcatggcgtagaaatttctatgttccgaaacacagagtagtgtccacatgtgaccttttcacattaccttatgtatacaacaggagctgcgttgttttcttctttttcttttcctttatctgttgtccaacaacagtgctgactgtccggataagagctggcaagtgcccttaggatgccgcatgggaaaaatcggttatcataatttcaaagtataaatatatttattatgtagcgctgcggctaagaaggaagagtgaggggtctgtccatggggtggcagtgatttcacacccgcctttcttgaatggcttcgtgttactcagccgtgccctggcaggaatggaactccatcagggaacagggcagctctgtttgaatggggtgaaaaacagcaaaattaattcttagcaagctccttgttctctactgttcaccgggacctggctggcaaatgacttagctattagtatatttaaaaactgttcaaaagcaaaagagaaggaacaggaatgaaaggaaaccttcccttaactctttctgcttcccatagcaggtctggttcctgctccccgcctaggacaggagctgtctggagctccacctttgcaaagaaaggaaaaacacaaattgcccccagattggcccagtggcatgccattaggtgattttgcgtaggggccatatcattcatggccaaaaaaaaccaaaaagcaaaaaacaaaaacaagtcccatgtcctactgactctagttcttccagtcgttatcctctgctgtctctctggcatcctatgaatcagatcaagcccatgctgttgttggtttttaaggtttctttcaataataggctaaggaaagacatgtttttctcttttaaatctctgcaactccaaagtagactccttcgaacgtatttaatttggccttttcagctttcttcttgcccagctctgtcgaattcatgggtgtgtgtgcacatgttggtttcactcacccagagtaattttgtgagcatgcatgtgctttttaatttctgcttgaatgtttgtcctgctgtgttgcagcttctaaagacattgtcaccgagtgtgtgtgactcaaagatcaagagtgaggctaaactgcgaccccaacatcacttccttcatggaaaggtgttggcgctgatgtagctcatggaaggatcagactgggaaccacagaggaaggatgaggtgggatgtggaggtcagagcatctcacgagagtccctcaggctctgcaacactagattcgaatatgagcctagggtttccccaacacgtgcgtgcatatgaaaccacatcatgattcccgacgtgagttagatgagggagagtttgtgtaactccacacccaggagggtaagccactttattatcatgctttggggctgtgcttaagaatttaagctctgttttaaagccgaagaagaaaacatttgaatttaccttcatatgccactaagaacaaaagctctgaagttcttcctgctggcaccaaatattaggattacaagctgtctctctgacaccagtggtaaaaaagcaagtagaatagtttctgagtctgtgttgcagcctctgacacgtggctcaccgctgtcatttgggggatggaatgaacagtcactgttctatagcatcctcctgtgctcttacctaaggaatctaaattgtcctagccttccattgctatgcactgaatgaggactactctcgtgtgtgtgtgtgtgtgtgtgtgtgtgtgtgtgtgtgtgtgtgtgtgttggatctactaacatgtttagcaaatggctctgacagggtggccatgagcagatgagaccagctcttgcttggttggaagccacactgcagtttgcagtttagcctttggtgtctcagtggcctcttgcttattccatgctttttctatcccatcctctctctgtgccctcctgcaatggcagccttggcacaatgcctgggtgtcctcatccttgctttactctggaaagtgtggggatggagaggatggtgcatttccagtgcttccttacctgtcaataacaatggtggccacctgggtcccagcacttggctggtggagagatttttttcattatggagctaataaagggtccctacgttttacattgattaatgaattatcacccagacatgtgcagatgaaatgtcaatataagaaaaatcaaggtatttgggaaacatgggcataatcaggtagttttgctaaaattcctcttccttggtctacataaagaagacatgggtctgtcatagaatggggacattagactgaaaactgggacaacccccttccttattttatagagactaggagttaaggggcctgcctaagattgcagtgataaagaactgaaccctaaatcagctcccactaatgaaaccctgctttccttgtatcttttaaactcagttctgcatccaacttgagaagaaaaaaagcttctttccatatcaagtaccatatgagttcatttaaactgcaccttgcagaaatgcattgccagaaagcaccagtagcctcctatctgcaagcagagtagtgctctgctctggggaggggtcattggaaaccataatgcagagtgggccccctactccatttcccagcaaaaggctccagctggagggatgggttgtggggcaacctggttcctgctaactgccagattgaatgtgtgggctagaatgcctgcacatttagttaaactgggctcagcatgcttgtcctcaaaatgtccatcctggtcacagcacacaagatggctattggtctgcttttaccctaccctgtactatacatgaaaattccagttattaacacactcaaactggtggagcttgttcaccctaggaaggggattgtatatatggcaggcttccctggtgccgatgtaaagggctacatttgggaacatttgacttccttgggactcttaagtgcatactgatggcatgaagtaaaaggggcctcaatgatgataggaaaatcagttcttttaaaatttcttcaagaaaatccaggctatcacatagtctttctgtgtgacttattaggagataggaagagcattgggaaacttgcacagctagctatgcatctacattttggtttggggttagttatgaaatgttcttaatatgacgtgttcaataacttcacataaacttcctgttctccaaaacctcaaagagatagagttaatgagttgttgtttttttttaaatgggggtagttttctatctgtcatgggctctagcatctactccgctacccaattctgtcatctccaagctgagtttcctcttctgaggcagaggctggagcagttctttttcagttctcatcctctccatcccaatccagtatatcaatcaactctaactcggagacgtctagctggcaatgtttctaaaactttcactggatttctttagacattgaagcaaacatttttttctaagaattgcttctcagatgatgatatcaaatgtatatgcttttgcaagtttgaaaagttcaaattaaccacttttgactaggtaagtctttctaaaaaccatttaaagctaactgggtcttagcatcctcctgtgtatggaagagacaggtgaccgctccaggttgggtgctcacagaacccttttcctgactctcatggaagatggtggaaggaaaatagactgtctcatcaaccctcctgtgtcctctgaagcaatctcagtttttattaaccacctcttctgtgtttctggtagctatttaacctgtatttaatctgtacttcctatgccagcctcaattttatttgatttttaaaattattctcttctaaccaatgaagtgtttgtcagtatgccccaaagcttgctcttttgtgctcccttttgaataactttctatccagaaaaagagattatttgggacttgagatttgcagtgataccaacttatagcaatgatgtactttaagggaactacccaactatgttgtgatagaagaaagagaaaccttcactttggcattttttttaatcactgtttatttttctgtttgcggcccaggaagcagtgggaggtggtggcagatatgctttgcatatggattgttatgtttttatttgggcaagtttaatcatggaaaactcaaaaagaaggggggaaatggtcagtttaagccaaaagaaactttctaaacaatgtataggtacacagcaaaattaaacaaatccaacaatttctgaagcttagtgtaattgagtggtggttgttattcaataaaattattcccaaaagtgtttctcctaagagtgcagttcccatgagtcacttcctgaacccattgaccaaaggtggacagagacaatcctgtagaccttgacattcagaaagatgtgagctgcttactgatcatatatgcatacgtttctttacagcagaggaaaccattgtccacaaaactgatgttcttttggggttttatgtacagacttgtccaatcatgtgtgtggttcctgcgagttgctgatgactccgcattgaagctctctgagttctttgattttaagttgggtttatggaattttttcaaatgttggaaggcgtgtggttcttcctgccctccctccccttttggaaatatgaaagcaaatgtttagaagaattccttttgaaaagctgtgtcgtgttccctgtgaaactgagcaggtgtgtgttggcgcgctaagtgccacatgcttgtgtgtagaggaggaggtggccctgccggctccgcgctgctgtgcctgtgatccctacctgctccccgctcctgttgccagcagcactcactgcactcctttgtcatatactctgcatcactgtcatactcacaacttcgtgaataaagttgtgtgctttattcgta

SEQ ID NO: 333724 - DNA, 5660 bp, Homo sapiens
tgcctgtaatttccattatcttctaatgtttaccttcatcccaatacatagtaagttagtgttctgccactcaacaaagcccccctaaggctcagtgctacctgagacactggtggaaagttgagaatgtctaagattctgtccctgtcccctggaaactggagcttccactggccttgcagaaggaagacccatcactcgaattctgtcatgacagtctcttggaagctctatcttgggagtactagcgtttaggtggattctgcttgttaataaaatggactgtggtgttctagaagaggtgttttctttcttctcagatatttccatatgaaatgctcatggtgaccaacagagggcgaaacaaaatcctcagagaggtggacagaaccaggctggagcgccacttagcccctgaagtgtttcgggaaatctttggaatgtccatacaggagtttgacaggttacctctttggagacgcaacgacatgaagaaaaaagcaaaactcttctaagtcccactcgtgaatggcaattagagaaaggactgacagtggcggtgccccataggatgtcatattgaggcccaaacttgattggagaatttgcaaactaccgtcgctcagcaacaccaaaaagagaaagtctggttaaaacaccatgagtcaaatgtcgggccagccaacagtaacacttgccaagaagcatggcgtagaaatttctatgttccgaaacacagagtagtgtccacatgtgaccttttcacattaccttatgtatacaacaggagctgcgttgttttcttctttttcttttcctttatctgttgtccaacaacagtgctgactgtccggataagagctggcaagtgcccttaggatgccgcatgggaaaaatcggttatcataatttcaaagtataaatatatttattatgtagcgctgcggctaagaaggaagagtgaggggtctgtccatggggtggcagtgatttcacacccgcctttcttgaatggcttcgtgttactcagccgtgccctggcaggaatggaactccatcagggaacagggcagctctgtttgaatggggtgaaaaacagcaaaattaattcttagcaagctccttgttctctactgttcaccgggacctggctggcaaatgacttagctattagtatatttaaaaactgttcaaaagcaaaagagaaggaacaggaatgaaaggaaaccttcccttaactctttctgcttcccatagcaggtctggttcctgctccccgcctaggacaggagctgtctggagctccacctttgcaaagaaaggaaaaacacaaattgcccccagattggcccagtggcatgccattaggtgattttgcgtaggggccatatcattcatggccaaaaaaaaccaaaaagcaaaaaacaaaaacaagtcccatgtcctactgactctagttcttccagtcgttatcctctgctgtctctctggcatcctatgaatcagatcaagcccatgctgttgttggtttttaaggtttctttcaataataggctaaggaaagacatgtttttctcttttaaatctctgcaactccaaagtagactccttcgaacgtatttaatttggccttttcagctttcttcttgcccagctctgtcgaattcatgggtgtgtgtgcacatgttggtttcactcacccagagtaattttgtgagcatgcatgtgctttttaatttctgcttgaatgtttgtcctgctgtgttgcagcttctaaagacattgtcaccgagtgtgtgtgactcaaagatcaagagtgaggctaaactgcgaccccaacatcacttccttcatggaaaggtgttggcgctgatgtagctcatggaaggatcagactgggaaccacagaggaaggatgaggtgggatgtggaggtcagagcatctcacgagagtccctcaggctctgcaacactagattcgaatatgagcctagggtttccccaacacgtgcgtgcatatgaaaccacatcatgattcccgacgtgagttagatgagggagagtttgtgtaactccacacccaggagggtaagccactttattatcatgctttggggctgtgcttaagaatttaagctctgttttaaagccgaagaagaaaacatttgaatttaccttcatatgccactaagaacaaaagctctgaagttcttcctgctggcaccaaatattaggattacaagctgtctctctgacaccagtggtaaaaaagcaagtagaatagtttctgagtctgtgttgcagcctctgacacgtggctcaccgctgtcatttgggggatggaatgaacagtcactgttctatagcatcctcctgtgctcttacctaaggaatctaaattgtcctagccttccattgctatgcactgaatgaggactactctcgtgtgtgtgtgtgtgtgtgtgtgtgtgtgtgtgtgtgtgtgtgtgtgttggatctactaacatgtttagcaaatggctctgacagggtggccatgagcagatgagaccagctcttgcttggttggaagccacactgcagtttgcagtttagcctttggtgtctcagtggcctcttgcttattccatgctttttctatcccatcctctctctgtgccctcctgcaatggcagccttggcacaatgcctgggtgtcctcatccttgctttactctggaaagtgtggggatggagaggatggtgcatttccagtgcttccttacctgtcaataacaatggtggccacctgggtcccagcacttggctggtggagagatttttttcattatggagctaataaagggtccctacgttttacattgattaatgaattatcacccagacatgtgcagatgaaatgtcaatataagaaaaatcaaggtatttgggaaacatgggcataatcaggtagttttgctaaaattcctcttccttggtctacataaagaagacatgggtctgtcatagaatggggacattagactgaaaactgggacaacccccttccttattttatagagactaggagttaaggggcctgcctaagattgcagtgataaagaactgaaccctaaatcagctcccactaatgaaaccctgctttccttgtatcttttaaactcagttctgcatccaacttgagaagaaaaaaagcttctttccatatcaagtaccatatgagttcatttaaactgcaccttgcagaaatgcattgccagaaagcaccagtagcctcctatctgcaagcagagtagtgctctgctctggggaggggtcattggaaaccataatgcagagtgggccccctactccatttcccagcaaaaggctccagctggagggatgggttgtggggcaacctggttcctgctaactgccagattgaatgtgtgggctagaatgcctgcacatttagttaaactgggctcagcatgcttgtcctcaaaatgtccatcctggtcacagcacacaagatggctattggtctgcttttaccctaccctgtactatacatgaaaattccagttattaacacactcaaactggtggagcttgttcaccctaggaaggggattgtatatatggcaggcttccctggtgccgatgtaaagggctacatttgggaacatttgacttccttgggactcttaagtgcatactgatggcatgaagtaaaaggggcctcaatgatgataggaaaatcagttcttttaaaatttcttcaagaaaatccaggctatcacatagtctttctgtgtgacttattaggagataggaagagcattgggaaacttgcacagctagctatgcatctacattttggtttggggttagttatgaaatgttcttaatatgacgtgttcaataacttcacataaacttcctgttctccaaaacctcaaagagatagagttaatgagttgttgtttttttttaaatgggggtagttttctatctgtcatgggctctagcatctactccgctacccaattctgtcatctccaagctgagtttcctcttctgaggcagaggctggagcagttctttttcagttctcatcctctccatcccaatccagtatatcaatcaactctaactcggagacgtctagctggcaatgtttctaaaactttcactggatttctttagacattgaagcaaacatttttttctaagaattgcttctcagatgatgatatcaaatgtatatgcttttgcaagtttgaaaagttcaaattaaccacttttgactaggtaagtctttctaaaaaccatttaaagctaactgggtcttagcatcctcctgtgtatggaagagacaggtgaccgctccaggttgggtgctcacagaacccttttcctgactctcatggaagatggtggaaggaaaatagactgtctcatcaaccctcctgtgtcctctgaagcaatctcagtttttattaaccacctcttctgtgtttctggtagctatttaacctgtatttaatctgtacttcctatgccagcctcaattttatttgatttttaaaattattctcttctaaccaatgaagtgtttgtcagtatgccccaaagcttgctcttttgtgctcccttttgaataactttctatccagaaaaagagattatttgggacttgagatttgcagtgataccaacttatagcaatgatgtactttaagggaactacccaactatgttgtgatagaagaaagagaaaccttcactttggcattttttttaatcactgtttatttttctgtttgcggcccaggaagcagtgggaggtggtggcagatatgctttgcatatggattgttatgtttttatttgggcaagtttaatcatggaaaactcaaaaagaaggggggaaatggtcagtttaagccaaaagaaactttctaaacaatgtataggtacacagcaaaattaaacaaatccaacaatttctgaagcttagtgtaattgagtggtggttgttattcaataaaattattcccaaaagtgtttctcctaagagtgcagttcccatgagtcacttcctgaacccattgaccaaaggtggacagagacaatcctgtagaccttgacattcagaaagatgtgagctgcttactgatcatatatgcatacgtttctttacagcagaggaaaccattgtccacaaaactgatgttcttttggggttttatgtacagacttgtccaatcatgtgtgtggttcctgcgagttgctgatgactccgcattgaagctctctgagttctttgattttaagttgggtttatggaattttttcaaatgttggaaggcgtgtggttcttcctgccctccctccccttttggaaatatgaaagcaaatgtttagaagaattccttttgaaaagctgtgtcgtgttccctgtgaaactgagcaggtgtgtgttggcgcgctaagtgccacatgcttgtgtgtagaggaggaggtggccctgccggctccgcgctgctgtgcctgtgatccctacctgctccccgctcctgttgccagcagcactcactgcactcctttgtcatatactctgcatcactgtcatactcacaacttcgtgaataaagttgtgtgctttattcgta

SEQ ID NO: 333725 - DNA, 3682 bp, Homo sapiens
tatgcttcgcgttaatggtttcatatgcacgcacgtgttggggaaaccacatcatgattcccgacgtgagttagatgagggagagtttgtgtaactccacacccaggagggtaagccactttattatcatgctttggggctgtgcttaagaatttaagctctgttttaaagccgaagaagaaaacatttgaatttaccttcatatgccactaagaacaaaagctctgaagttcttcctgctggcaccaaatattaggattacaagctgtctctctgacaccagtggtaaaaaagcaagtagaatagtttctgagtctgtgttgcagcctctgacacgtggctcaccgctgtcatttgggggatggaatgaacagtcactgttctatagcatcctcctgtgctcttacctaaggaatctaaattgtcctagccttccattgctatgcactgaatgaggactactctcgtgtgtgtgtgtgtgtgtgtgtgtgtgtgtgtgtgtgtgtgtgtgtgttggatctactaacatgtttagcaaatggctctgacagggtggccatgagcagatgagaccagctcttgcttggttggaagccacactgcagtttgcagtttagcctttggtgtctcagtggcctcttgcttattccatgctttttctatcccatcctctctctgtgccctcctgcaatggcagccttggcacaatgcctgggtgtcctcatccttgctttactctggaaagtgtggggatggagaggatggtgcatttccagtgcttccttacctgtcaataacaatggtggccacctgggtcccagcacttggctggtggagagatttttttcattatggagctaataaagggtccctacgttttacattgattaatgaattatcacccagacatgtgcagatgaaatgtcaatataagaaaaatcaaggtatttgggaaacatgggcataatcaggtagttttgctaaaattcctcttccttggtctacataaagaagacatgggtctgtcatagaatggggacattagactgaaaactgggacaacccccttccttattttatagagactaggagttaaggggcctgcctaagattgcagtgataaagaactgaaccctaaatcagctcccactaatgaaaccctgctttccttgtatcttttaaactcagttctgcatccaacttgagaagaaaaaaagcttctttccatatcaagtaccatatgagttcatttaaactgcaccttgcagaaatgcattgccagaaagcaccagtagcctcctatctgcaagcagagtagtgctctgctctggggaggggtcattggaaaccataatgcagagtgggccccctactccatttcccagcaaaaggctccagctggagggatgggttgtggggcaacctggttcctgctaactgccagattgaatgtgtgggctagaatgcctgcacatttagttaaactgggctcagcatgcttgtcctcaaaatgtccatcctggtcacagcacacaagatggctattggtctgcttttaccctaccctgtactatacatgaaaattccagttattaacacactcaaactggtggagcttgttcaccctaggaaggggattgtatatatggcaggcttccctggtgccgatgtaaagggctacatttgggaacatttgacttccttgggactcttaagtgcatactgatggcatgaagtaaaaggggcctcaatgatgataggaaaatcagttcttttaaaatttcttcaagaaaatccaggctatcacatagtctttctgtgtgacttattaggagataggaagagcattgggaaacttgcacagctagctatgcatctacattttggtttggggttagttatgaaatgttcttaatatgacgtgttcaataacttcacataaacttcctgttctccaaaacctcaaagagatagagttaatgagttgttgtttttttttaaatgggggtagttttctatctgtcatgggctctagcatctactccgctacccaattctgtcatctccaagctgagtttcctcttctgaggcagaggctggagcagttctttttcagttctcatcctctccatcccaatccagtatatcaatcaactctaactcggagacgtctagctggcaatgtttctaaaactttcactggatttctttagacattgaagcaaacatttttttctaagaattgcttctcagatgatgatatcaaatgtatatgcttttgcaagtttgaaaagttcaaattaaccacttttgactaggtaagtctttctaaaaaccatttaaagctaactgggtcttagcatcctcctgtgtatggaagagacaggtgaccgctccaggttgggtgctcacagaacccttttcctgactctcatggaagatggtggaaggaaaatagactgtctcatcaaccctcctgtgtcctctgaagcaatctcagtttttattaaccacctcttctgtgtttctggtagctatttaacctgtatttaatctgtacttcctatgccagcctcaattttatttgatttttaaaattattctcttctaaccaatgaagtgtttgtcagtatgccccaaagcttgctcttttgtgctcccttttgaataactttctatccagaaaaagagattatttgggacttgagatttgcagtgataccaacttatagcaatgatgtactttaagggaactacccaactatgttgtgatagaagaaagagaaaccttcactttggcattttttttaatcactgtttatttttctgtttgcggcccaggaagcagtgggaggtggtggcagatatgctttgcatatggattgttatgtttttatttgggcaagtttaatcatggaaaactcaaaaagaaggggggaaatggtcagtttaagccaaaagaaactttctaaacaatgtataggtacacagcaaaattaaacaaatccaacaatttctgaagcttagtgtaattgagtggtggttgttattcaataaaattattcccaaaagtgtttctcctaagagtgcagttcccatgagtcacttcctgaacccattgaccaaaggtggacagagacaatcctgtagaccttgacattcagaaagatgtgagctgcttactgatcatatatgcatacgtttctttacagcagaggaaaccattgtccacaaaactgatgttcttttggggttttatgtacagacttgtccaatcatgtgtgtggttcctgcgagttgctgatgactccgcattgaagctctctgagttctttgattttaagttgggtttatggaattttttcaaatgttggaaggcgtgtggttcttcctgccctccctccccttttggaaatatgaaagcaaatgtttagaagaattccttttgaaaagctgtgtcgtgttccctgtgaaactgagcaggtgtgtgttggcgcgctaagtgccacatgcttgtgtgtagaggaggaggtggccctgccggctccgcgctgctgtgcctgtgatccctacctgctccccgctcctgttgccagcagcactcactgcactcctttgtcatatactctgcatcactgtcatactcacaacttcgtgaataaagttgtgtgctttattcgta

SEQ ID NO: 333726 - DNA, 2822 bp, Homo sapiens
gtcattgagctgatgtgcttttgcaaggggtctctttagaagtggtaggggcagggtcgagagaagaaggggatgcagaatctgtacatgaggaaggagccagagtcactcaggaaactcctcattcttcctgcgctggctgtggcacacccaccggtggcacacccctccctcgggtccagttcagcccacagactcctgggaggagagccagggccccagcctctcctttgaggagtgttgcagcctttctgtgtgccagatgcctagtgaagaaaagctgaaaccctggagctttgtgcatgttaatgaccttggaaatgactgagctcacggaccctcatcacaccatgggagactacaaagtggcccaccctcaggaccctcaccacccatcagagaagcctgtcattcactgccataaatgtggggagccttgcaagggtgaagtgcttcgggtccagaccaaacatttccacatcaagtgtttcacctgcaaagtgtgtggctgtgacctggcacaagggggcttcttcataaagaacggagagtatctctgcaccctggttcctgctaactgccagattgaatgtgtgggctagaatgcctgcacatttagttaaactgggctcagcatgcttgtcctcaaaatgtccatcctggtcacagcacacaagatggctattggtctgcttttaccctaccctgtactatacatgaaaattccagttattaacacactcaaactggtggagcttgttcaccctaggaaggggattgtatatatggcaggcttccctggtgccgatgtaaagggctacatttgggaacatttgacttccttgggactcttaagtgcatactgatggcatgaagtaaaaggggcctcaatgatgataggaaaatcagttcttttaaaatttcttcaagaaaatccaggctatcacatagtctttctgtgtgacttattaggagataggaagagcattgggaaacttgcacagctagctatgcatctacattttggtttggggttagttatgaaatgttcttaatatgacgtgttcaataacttcacataaacttcctgttctccaaaacctcaaagagatagagttaatgagttgttgtttttttttaaatgggggtagttttctatctgtcatgggctctagcatctactccgctacccaattctgtcatctccaagctgagtttcctcttctgaggcagaggctggagcagttctttttcagttctcatcctctccatcccaatccagtatatcaatcaactctaactcggagacgtctagctggcaatgtttctaaaactttcactggatttctttagacattgaagcaaacatttttttctaagaattgcttctcagatgatgatatcaaatgtatatgcttttgcaagtttgaaaagttcaaattaaccacttttgactaggtaagtctttctaaaaaccatttaaagctaactgggtcttagcatcctcctgtgtatggaagagacaggtgaccgctccaggttgggtgctcacagaacccttttcctgactctcatggaagatggtggaaggaaaatagactgtctcatcaaccctcctgtgtcctctgaagcaatctcagtttttattaaccacctcttctgtgtttctggtagctatttaacctgtatttaatctgtacttcctatgccagcctcaattttatttgatttttaaaattattctcttctaaccaatgaagtgtttgtcagtatgccccaaagcttgctcttttgtgctcccttttgaataactttctatccagaaaaagagattatttgggacttgagatttgcagtgataccaacttatagcaatgatgtactttaagggaactacccaactatgttgtgatagaagaaagagaaaccttcactttggcattttttttaatcactgtttatttttctgtttgcggcccaggaagcagtgggaggtggtggcagatatgctttgcatatggattgttatgtttttatttgggcaagtttaatcatggaaaactcaaaaagaaggggggaaatggtcagtttaagccaaaagaaactttctaaacaatgtataggtacacagcaaaattaaacaaatccaacaatttctgaagcttagtgtaattgagtggtggttgttattcaataaaattattcccaaaagtgtttctcctaagagtgcagttcccatgagtcacttcctgaacccattgaccaaaggtggacagagacaatcctgtagaccttgacattcagaaagatgtgagctgcttactgatcatatatgcatacgtttctttacagcagaggaaaccattgtccacaaaactgatgttcttttggggttttatgtacagacttgtccaatcatgtgtgtggttcctgcgagttgctgatgactccgcattgaagctctctgagttctttgattttaagttgggtttatggaattttttcaaatgttggaaggcgtgtggttcttcctgccctccctccccttttggaaatatgaaagcaaatgtttagaagaattccttttgaaaagctgtgtcgtgttccctgtgaaactgagcaggtgtgtgttggcgcgctaagtgccacatgcttgtgtgtagaggaggaggtggccctgccggctccgcgctgctgtgcctgtgatccctacctgctccccgctcctgttgccagcagcactcactgcactcctttgtcatatactctgcatcactgtcatactcacaacttcgtgaataaagttgtgtgctttattcgta

SEQ ID NO: 333727 - DNA, 6802 bp, Homo sapiens
  misc_feature (2)..(2): n is a, c, g, or t
  misc_feature (4)..(6): n is a, c, g, or t
  misc_feature (10)..(10): n is a, c, g, or t
  misc_feature (12)..(14): n is a, c, g, or t
  misc_feature (16)..(18): n is a, c, g, or t
tngnnnggcngnnngnnnaggtagacagtaaggagccaggggaacagagagaattgtggggcagcaccgctccttgggtccccactccccatttctcattgcttggaaatccatgccaagatgcctgccttccttggtctaaagtgtctggggaaattgtgcagctctgagaaaagcaaagtcacctcatctgagagaaccagtgccaggggctcgaacagaaagagactgattgttgaggaccggagggtctctgggacctccttcaccgctcataggcgtgccactatcactcatttgctgtatctctgtcccaaggactactgcccacgtgggcgtgtatgtaacagcgttgatccttttgtggcccaccctcaggaccctcaccacccatcagagaagcctgtcattcactgccataaatgtggggagccttgcaagggtgaagtgcttcgggtccagaccaaacatttccacatcaagtgtttcacctgcaaagtgtgtggctgtgacctggcacaagggggcttcttcataaagaacggagagtatctctgcaccctggactaccagcggatgtacgggacacgctgccatggctgtggggagttcgtggagggcgaagtggtgactgctctgggcaagacctaccatcccaattgctttgcttgtactatctgcaagcgcccgtttccacccggagaccgagtcacattcaatgggagagactgcctttgtcaactctgtgcacagccgatgtcgtccagtccgaaagaaaccaccttctccagcaattgtgccggctgcggaagagatatcaagaacgggcaggcgctgctggcgctggataagcagtggcacttggggtgctttaaatgcaagtcctgcgggaaggtcctcaccggggagtacatcagcaaggatggtgctccgtactgtgaaaaggactaccagggactctttggggtgaaatgtgaggcgtgtcaccagtttatcacagggaaagtcctggaggcaggtgacaaacattaccaccccagctgtgcacgatgcagcagatgcaaccagatgttcacagaaggagaggaaatgtatcttcaaggctccaccgtttggcatcccgactgtaagcaatctacgaagaccgaggaaaagctgcggcctaccaggacatcctcggaaagtatttattctaggccaggctccagtattcctggctcaccaggtcatactatctatgcaaaagtagacaatgagatcctggattacaaggatttagcagccattccgaaggtcaaggcaatttatgacattgaacgtccagatcttattacctatgagcctttctacacttcgggctatgatgacaaacaggagagacagagccttggagagtctccgaggactttgtctcctactccatcagcagaagggtaccaggatgttcgggatcggatgatccatcggtccacgagccagggctccatcaactcccctgtgtacagccgccacagctacactccaaccacgtcccgctctccccagcatttccacagacctggcaatgagccgtccagcggccggaactcccctctcccttaccggccagacagcctccctctaactccaacttacgctcaggcccctaaacatttccatgttccagatcaaggaatcaacatttaccgaaagccacccatctacaaacagcatgctgccttggcagcccagagcaagtcctcagaagatatcatcaagttttccaagttcccagcagcccaggcaccagaccccagcgagacaccaaagattgagacggaccactggcctggtcccccctcatttgctgtcgtaggacctgacatgaaacgcagatctagtggcagagaggaagatgatgaggaacttctgagacgtcggcagcttcaagaagagcaattaatgaagcttaactcaggcctgggacagttgatcttgaaagaagagatggagaaagagagccgggaaaggtcatctctgttagccagtcgctacgattctcccatcaactcagcttcacatattccatcatctaaaactgcatctctccctggctatggaagaaatgggcttcaccggcctgtttctaccgacttcgctcagtataacagctatggggatgtcagcgggggagtgcgagattaccagacactcccagatggccacatgcctgcaatgagaatggaccgaggagtgtctatgcccaacatgttggaaccaaagatatttccatatgaaatgctcatggtgaccaacagagggcgaaacaaaatcctcagagaggtggacagaaccaggctggagcgccacttagcccctgaagtgtttcgggaaatctttggaatgtccatacaggagtttgacaggttacctctttggagacgcaacgacatgaagaaaaaagcaaaactcttctaagtcccactcgtgaatggcaattagagaaaggactgacagtggcggtgccccataggatgtcatattgaggcccaaacttgattggagaatttgcaaactaccgtcgctcagcaacaccaaaaagagaaagtctggttaaaacaccatgagtcaaatgtcgggccagccaacagtaacacttgccaagaagcatggcgtagaaatttctatgttccgaaacacagagtagtgtccacatgtgaccttttcacattaccttatgtatacaacaggagctgcgttgttttcttctttttcttttcctttatctgttgtccaacaacagtgctgactgtccggataagagctggcaagtgcccttaggatgccgcatgggaaaaatcggttatcataatttcaaagtataaatatatttattatgtagcgctgcggctaagaaggaagagtgaggggtctgtccatggggtggcagtgatttcacacccgcctttcttgaatggcttcgtgttactcagccgtgccctggcaggaatggaactccatcagggaacagggcagctctgtttgaatggggtgaaaaacagcaaaattaattcttagcaagctccttgttctctactgttcaccgggacctggctggcaaatgacttagctattagtatatttaaaaactgttcaaaagcaaaagagaaggaacaggaatgaaaggaaaccttcccttaactctttctgcttcccatagcaggtctggttcctgctccccgcctaggacaggagctgtctggagctccacctttgcaaagaaaggaaaaacacaaattgcccccagattggcccagtggcatgccattaggtgattttgcgtaggggccatatcattcatggccaaaaaaaaccaaaaagcaaaaaacaaaaacaagtcccatgtcctactgactctagttcttccagtcgttatcctctgctgtctctctggcatcctatgaatcagatcaagcccatgctgttgttggtttttaaggtttctttcaataataggctaaggaaagacatgtttttctcttttaaatctctgcaactccaaagtagactccttcgaacgtatttaatttggccttttcagctttcttcttgcccagctctgtcgaattcatgggtgtgtgtgcacatgttggtttcactcacccagagtaattttgtgagcatgcatgtgctttttaatttctgcttgaatgtttgtcctgctgtgttgcagcttctaaagacattgtcaccgagtgtgtgtgactcaaagatcaagagtgaggctaaactgcgaccccaacatcacttccttcatggaaaggtgttggcgctgatgtagctcatggaaggatcagactgggaaccacagaggaaggatgaggtgggatgtggaggtcagagcatctcacgagagtccctcaggctctgcaacactagattcgaatatgagcctagggtttccccaacacgtgcgtgcatatgaaaccacatcatgattcccgacgtgagttagatgagggagagtttgtgtaactccacacccaggagggtaagccactttattatcatgctttggggctgtgcttaagaatttaagctctgttttaaagccgaagaagaaaacatttgaatttaccttcatatgccactaagaacaaaagctctgaagttcttcctgctggcaccaaatattaggattacaagctgtctctctgacaccagtggtaaaaaagcaagtagaatagtttctgagtctgtgttgcagcctctgacacgtggctcaccgctgtcatttgggggatggaatgaacagtcactgttctatagcatcctcctgtgctcttacctaaggaatctaaattgtcctagccttccattgctatgcactgaatgaggactactctcgtgtgtgtgtgtgtgtgtgtgtgtgtgtgtgtgtgtgtgtgtgtgtgttggatctactaacatgtttagcaaatggctctgacagggtggccatgagcagatgagaccagctcttgcttggttggaagccacactgcagtttgcagtttagcctttggtgtctcagtggcctcttgcttattccatgctttttctatcccatcctctctctgtgccctcctgcaatggcagccttggcacaatgcctgggtgtcctcatccttgctttactctggaaagtgtggggatggagaggatggtgcatttccagtgcttccttacctgtcaataacaatggtggccacctgggtcccagcacttggctggtggagagatttttttcattatggagctaataaagggtccctacgttttacattgattaatgaattatcacccagacatgtgcagatgaaatgtcaatataagaaaaatcaaggtatttgggaaacatgggcataatcaggtagttttgctaaaattcctcttccttggtctacataaagaagacatgggtctgtcatagaatggggacattagactgaaaactgggacaacccccttccttattttatagagactaggagttaaggggcctgcctaagattgcagtgataaagaactgaaccctaaatcagctcccactaatgaaaccctgctttccttgtatcttttaaactcagttctgcatccaacttgagaagaaaaaaagcttctttccatatcaagtaccatatgagttcatttaaactgcaccttgcagaaatgcattgccagaaagcaccagtagcctcctatctgcaagcagagtagtgctctgctctggggaggggtcattggaaaccataatgcagagtgggccccctactccatttcccagcaaaaggctccagctggagggatgggttgtggggcaacctggttcctgctaactgccagattgaatgtgtgggctagaatgcctgcacatttagttaaactgggctcagcatgcttgtcctcaaaatgtccatcctggtcacagcacacaagatggctattggtctgcttttaccctaccctgtactatacatgaaaattccagttattaacacactcaaactggtggagcttgttcaccctaggaaggggattgtatatatggcaggcttccctggtgccgatgtaaagggctacatttgggaacatttgacttccttgggactcttaagtgcatactgatggcatgaagtaaaaggggcctcaatgatgataggaaaatcagttcttttaaaatttcttcaagaaaatccaggctatcacatagtctttctgtgtgacttattaggagataggaagagcattgggaaacttgcacagctagctatgcatctacattttggtttggggttagttatgaaatgttcttaatatgacgtgttcaataacttcacataaacttcctgttctccaaaacctcaaagagatagagttaatgagttgttgtttttttttaaatgggggtagttttctatctgtcatgggctctagcatctactccgctacccaattctgtcatctccaagctgagtttcctcttctgaggcagaggctggagcagttctttttcagttctcatcctctccatcccaatccagtatatcaatcaactctaactcggagacgtctagctggcaatgtttctaaaactttcactggatttctttagacattgaagcaaacatttttttctaagaattgcttctcagatgatgatatcaaatgtatatgcttttgcaagtttgaaaagttcaaattaaccacttttgactaggtaagtctttctaaaaaccatttaaagctaactgggtcttagcatcctcctgtgtatggaagagacaggtgaccgctccaggttgggtgctcacagaacccttttcctgactctcatggaagatggtggaaggaaaatagactgtctcatcaaccctcctgtgtcctctgaagcaatctcagtttttattaaccacctcttctgtgtttctggtagctatttaacctgtatttaatctgtacttcctatgccagcctcaattttatttgatttttaaaattattctcttctaaccaatgaagtgtttgtcagtatgccccaaagcttgctcttttgtgctcccttttgaataactttctatccagaaaaagagattatttgggacttgagatttgcagtgataccaacttatagcaatgatgtactttaagggaactacccaactatgttgtgatagaagaaagagaaaccttcactttggcattttttttaatcactgtttatttttctgtttgcggcccaggaagcagtgggtacagattaaatacaggttaaatagctacc

SEQ ID NO: 333728 - DNA, 4438 bp, Homo sapiens
  misc_feature (2)..(2): n is a, c, g, or t
  misc_feature (4)..(6): n is a, c, g, or t
  misc_feature (10)..(10): n is a, c, g, or t
  misc_feature (12)..(14): n is a, c, g, or t
  misc_feature (16)..(18): n is a, c, g, or t
tngnnnggcngnnngnnnaggtagacagtaaggagccaggggaacagagagaattgtggggcagcaccgctccttgggtccccactccccatttctcattgcttggaaatccatgccaagatgcctgccttccttggtctaaagtgtctggggaaattgtgcagctctgagaaaagcaaagtcacctcatctgagagaaccagtgccaggggctcgaacagaaagagactgattgttgaggaccggagggtctctgggacctccttcaccgctcataggcgtgccactatcactcatttgctgtatctctgtcccaaggactactgcccacgtgggcgtgtatgtaacagcgttgatccttttgtggcccaccctcaggaccctcaccacccatcagagaagcctgtcattcactgccataaatgtggggagccttgcaagggtgaagtgcttcgggtccagaccaaacatttccacatcaagtgtttcacctgcaaagtgtgtggctgtgacctggcacaagggggcttcttcataaagaacggagagtatctctgcaccctggactaccagcggatgtacgggacacgctgccatggctgtggggagttcgtggagggcgaagtggtgactgctctgggcaagacctaccatcccaattgctttgcttgtactatctgcaagcgcccgtttccacccggagaccgagtcacattcaatgggagagactgcctttgtcaactctgtgcacagccgatgtcgtccagtccgaaagaaaccaccttctccagcaattgtgccggctgcggaagagatatcaagaacgggcaggcgctgctggcgctggataagcagtggcacttggggtgctttaaatgcaagtcctgcgggaaggtcctcaccggggagtacatcagcaaggatggtgctccgtactgtgaaaaggactaccagggactctttggggtgaaatgtgaggcgtgtcaccagtttatcacagggaaagtcctggaggcaggtgacaaacattaccaccccagctgtgcacgatgcagcagatgcaaccagatgttcacagaaggagaggaaatgtatcttcaaggctccaccgtttggcatcccgactgtaagcaatctacgaagaccgaggaaaagctgcggcctaccaggacatcctcggaaagtatttattctaggccaggctccagtattcctggctcaccaggtcatactatctatgcaaaagtagacaatgagatcctggattacaaggatttagcagccattccgaaggtcaaggcaatttatgacattgaacgtccagatcttattacctatgagcctttctacacttcgggctatgatgacaaacaggagagacagagccttggagagtctccgaggactttgtctcctactccatcagcagaagggtaccaggatgttcgggatcggatgatccatcggtccacgagccagggctccatcaactcccctgtgtacagccgccacagctacactccaaccacgtcccgctctccccagcatttccacagacctggcaatgagccgtccagcggccggaactcccctctcccttaccggccagacagcctccctctaactccaacttacgctcaggcccctaaacatttccatgttccagatcaaggaatcaacatttaccgaaagccacccatctacaaacagcatgctgccttggcagcccagagcaagtcctcagaagatatcatcaagttttccaagttcccagcagcccaggcaccagaccccagcgagacaccaaagattgagacggaccactggcctggtcccccctcatttgctgtcgtaggacctgacatgaaacgcagatctagtggcagagaggaagatgatgaggaacttctgagacgtcggcagcttcaagaagagcaattaatgaagcttaactcaggcctgggacagttgatcttgaaagaagagatggagaaagagagccgggaaaggtcatctctgttagccagtcgctacgattctcccatcaactcagcttcacatattccatcatctaaaactgcatctctccctggctatggaagaaatgggcttcaccggcctgtttctaccgacttcgctcagtataacagctatggggatgtcagcgggggagtgcgagattaccagacactcccagatggccacatgcctgcaatgagaatggaccgaggagtgtctatgcccaacatgttggaaccaaagatatttccatatgaaatgctcatggtgaccaacagagggcgaaacaaaatcctcagagaggtggacagaaccaggctggagcgccacttagcccctgaagtgtttcgggaaatctttggaatgtccatacaggagtttgacaggttacctctttggagacgcaacgacatgaagaaaaaagcaaaactcttctaagtcccactcgtgaatggcaattagagaaaggactgacagtggcggtgccccataggatgtcatattgaggcccaaacttgattggagaatttgcaaactaccgtcgctcagcaacaccaaaaagagaaagtctggttaaaacaccatgagtcaaatgtcgggccagccaacagtaacacttgccaagaagcatggcgtagaaatttctatgttccgaaacacagagtagtgtccacatgtgaccttttcacattaccttatgtatacaacaggagctgcgttgttttcttctttttcttttcctttatctgttgtccaacaacagtgctgactgtccggataagagctggcaagtgcccttaggatgccgcatgggaaaaatcggttatcataatttcaaagtataaatatatttattatgtagcgctgcggctaagaaggaagagtgaggggtctgtccatggggtggcagtgatttcacacccgcctttcttgaatggcttcgtgttactcagccgtgccctggcaggaatggaactccatcagggaacagggcagctctgtttgaatggggtgaaaaacagcaaaattaattcttagcaagctccttgttctctactgttcaccgggacctggctggcaaatgacttagctattagtatatttaaaaactgttcaaaagcaaaagagaaggaacaggaatgaaaggaaaccttcccttaactctttctgcttcccatagcaggtctggttcctgctccccgcctaggacaggagctgtctggagctccacctttgcaaagaaaggaaaaacacaaattgcccccagattggcccagtggcatgccattaggtgattttgcgtaggggccatatcattcatggccaaaaaaaaccaaaaagcaaaaaacaaaaacaagtcccatgtcctactgactctagttcttccagtcgttatcctctgctgtctctctggcatcctatgaatcagatcaagcccatgctgttgttggtttttaaggtttctttcaataataggctaaggaaagacatgtttttctcttttaaatctctgcaactccaaagtagactccttcgaacgtatttaatttggccttttcagctttcttcttgcccagctctgtcgaattcatgggtgtgtgtgcacatgttggtttcactcacccagagtaattttgtgagcatgcatgtgctttttaatttctgcttgaatgtttgtcctgctgtgttgcagcttctaaagacattgtcaccgagtgtgtgtgactcaaagatcaagagtgaggctaaactgcgaccccaacatcacttccttcatggaaaggtgttggcgctgatgtagctcatggaaggatcagactgggaaccacagaggaaggatgaggtgggatgtggaggtcagagcatctcacgagagtccctcaggctctgcaacactagattcgaatatgagcctagggtttccccaacacgtgcgtgcatatgaaaccacatcatgattcccgacgtgagttagatgagggagagtttgtgtaactccacacccaggagggtaagccactttattatcatgctttggggctgtgcttaagaatttaagctctgttttaaagccgaagaagaaaacatttgaatttaccttcatatgccactaagaacaaaagctctgaagttcttcctgctggcaccaaatattaggattacaagctgtctctctgacaccagtggtaaaaaagcaagtagaatagtttctgagtctgtgttgcagcctctgacacgtggctcaccgctgtcatttgggggatggaatgaacagtcactgttctatagcatcctcctgtgctcttacctaaggaatctaaattgtcctagccttccattgctatgcatcctttgtcatatactctgcatcactgtcatactcacaacttcgtgaataaagttgtgtgctttattcgta

SEQ ID NO: 333729 - DNA, 968 bp, Homo sapiens
aagaaaaattgaggccgggcgcggtggctcacgcctgtaatcccagcactttgggagagagcgtgcctgcccgccgcacacggggctggtttccggagtgcgtctctagagggatgcacgttgccttagccgagcttcggagagaagcctgatatgtaacccaggcaggtgggagcctcagtctgtcgggctgaggtctggcatctacaaagcctcttggccgtgttctgaacttgaagcctggaggagttctctgctcagcacagccaaggaacagaattagaagaaaaggaaccctggcctgaggcaggtgacaaacattaccaccccagctgtgcacgatgcagcagatgcaaccagatgttcacagaaggagaggaaatgtatcttcaaggctccaccgtttggcatcccgactgtaagcaatctacgaagaccgaggaaaagctgcggcctaccaggacatcctcggaaagtatttattctaggccaggctccagtattcctggctcaccaggtcatactatctatgcaaaagtagacaatgagatcctggattacaaggatttagcagccattccgaaggtcaaggcaatttatgacattgaacgtccagatcttattacctatgagcctttctacacttcgggctatgatgacaaacaggagagacagagccttggagagtctccgaggactttgtctcctactccatcagcagaagggtaccaggatgttcgggatcggatgatccatcggtccacgagccagggctccatcaactcccctgtgtacagccgccacagctacactccaaccacgtcccgctctccccagcatttccacagacctgatcaaggaatcaacatttaccgaaagccacccatctacaaacagcatgtactgtttgaagtcatccttttgttgttaatttaagaataaaattctcagcatttgaaaaaaaaaaa

SEQ ID NO: 333730 - DNA, 1348 bp, Homo sapiens
aagaaaaattgaggccgggcgcggtggctcacgcctgtaatcccagcactttgggagagagcgtgcctgcccgccgcacacggggctggtttccggagtgcgtctctagagggatgcacgttgccttagccgagcttcggagagaagcctgatatgtaacccaggcaggtgggagcctcagtctgtcgggctgaggtctggcatctacaaagcctcttggccgtgttctgaacttgaagcctggaggagttctctgctcagcacagccaaggaacagaattagaagaaaaggaaccctggcctgaggcaggtgacaaacattaccaccccagctgtgcacgatgcagcagatgcaaccagatgttcacagaaggagaggaaatgtatcttcaaggctccaccgtttggcatcccgactgtaagcaatctacgaagaccgaggaaaagctgcggcctaccaggacatcctcggaaagtatttattctaggccaggctccagtattcctggctcaccaggtcatactatctatgcaaaagtagacaatgagatcctggattacaaggatttagcagccattccgaaggtcaaggcaatttatgacattgaacgtccagatcttattacctatgagcctttctacacttcgggctatgatgacaaacaggagagacagagccttggagagtctccgaggactttgtctcctactccatcagcagaagggtaccaggatgttcgggatcggatgatccatcggtccacgagccagggctccatcaactcccctgtgtacagccgccacagctacactccaaccacgtcccgctctccccagcatttccacagacctgatcaaggaatcaacatttaccgaaagccacccatctacaaacagcatgctgccttggcagcccagagcaagtcctcagaagatatcatcaagttttccaagttcccagcagcccaggcaccagaccccagcgagacaccaaagattgagacggaccactggcctggtcccccctcatttgctgtcgtaggacctgacatgaaacgcagatctagtggcagagaggaagatgatgaggaacttctgagacgtcggcagcttcaagaagagcaattaatgaagaaaaaacctacagtgtctaagaatgaagaaagctaaagtctgatgggcacactggaactgaagctgtagggcccaaagggttctggatctcagataagcatctgagattacagttctgttgcctcacataaattttaggagataagatctcagaatcatgggaggcagcagctctagaagtgacactcttacaaagaaactccagagcttacag

SEQ ID NO: 333731 - DNA, 942 bp, Homo sapiens
aagaaaaattgaggccgggcgcggtggctcacgcctgtaatcccagcactttgggagagagcgtgcctgcccgccgcacacggggctggtttccggagtgcgtctctagagggatgcacgttgccttagccgagcttcggagagaagcctgatatgtaacccaggcaggtgggagcctcagtctgtcgggctgaggtctggcatctacaaagcctcttggccgtgttctgaacttgaagcctggaggagttctctgctcagcacagccaaggaacagaattagaagaaaaggaaccctggcctgaggcaggtgacaaacattaccaccccagctgtgcacgatgcagcagatgcaaccagatgttcacagaaggagaggaaatgtatcttcaaggctccaccgtttggcatcccgactgtaagcaatctacgaagaccgaggaaaagctgcggcctaccaggacatcctcggaaagtatttattctaggccaggctccagtattcctggctcaccaggtcatactatctatgcaaaagtagacaatgagatcctggattacaaggatttagcagccattccgaaggtcaaggcaatttatgacattgaacgtccagatcttattacctatgagcctttctacacttcgggctatgatgacaaacaggagagacagagccttggagagtctccgaggactttgtctcctactccatcagcagaagggtaccaggatgttcgggatcggatgatccatcggtccacgagccagggctccatcaactcccctgtgtacagccgccacagctacactccaaccacgtcccgctctccccagcatttccacagacctgttaaatttccgggcgcccttttaacaggtgggctctaagtgagcgctctctgtgcgcgggcttttgcgctcttttgcgtcgctctaact

SEQ ID NO: 333732 - DNA, 1106 bp, Homo sapiens
aagaaaaattgaggccgggcgcggtggctcacgcctgtaatcccagcactttgggagagagcgtgcctgcccgccgcacacggggctggtttccggagtgcgtctctagagggatgcacgttgccttagccgagcttcggagagaagcctgatatgtaacccaggcaggtgggagcctcagtctgtcgggctgaggtctggcatctacaaagcctcttggccgtgttctgaacttgaagcctggaggagttctctgctcagcacagccaaggaacagaattagaagaaaaggaaccctggcctgaggtaaagcggacattgcacaaggcaggtgacaaacattaccaccccagctgtgcacgatgcagcagatgcaaccagatgttcacagaaggagaggaaatgtatcttcaaggctccaccgtttggcatcccgactgtaagcaatctacgaagaccgaggaaaagctgcggcctaccaggacatcctcggaaagtatttattctaggccaggctccagtattcctggctcaccaggtcatactatctatgcaaaagtagacaatgagatcctggattacaaggatttagcagccattccgaaggtcaaggcaatttatgacattgaacgtccagatcttattacctatgagcctttctacacttcgggctatgatgacaaacaggagagacagagccttggagagtctccgaggactttgtctcctactccatcagcagaagggtaccaggatgttcgggatcggatgatccatcggtccacgagccagggctccatcaactcccctgtgtacagccgccacagctacactccaaccacgtcccgctctccccagcatttccacagacctgtaagggtgactgttcctggattcactctatataacaaactatgtttctgtgattttttcccctactattgatagcacattgaaaaatcaacgactaaacatttccatccctctcccagagcaaaatgaaaactggtatccaactatattttatgctctatcttttcttgaaacatcagtcatcctaagcctgtgttcattttgatttattaaataattatattttgacagcg

SEQ ID NO: 333733 - DNA, 1765 bp, Homo sapiens
ctcccagtgggtgtgcagacactggagagacccagtggcccaccctcaggaccctcaccacccatcagagaagcctgtcattcactgccataaatgtggggagccttgcaagggtgaagtgcttcgggtccagaccaaacatttccacatcaagtgtttcacctgcaaagtgtgtggctgtgacctggcacaagggggcttcttcataaagaacggagagtatctctgcaccctggactaccagcggatgtacgggacacgctgccatggctgtggggagttcgtggagggcgaagtggtgactgctctgggcaagacctaccatcccaattgctttgcttgtactatctgcaagcgcccgtttccacccggagaccgagtcacattcaatgggagagactgcctttgtcaactctgtgcacagccgatgtcgtccagtccgaaagaaaccaccttctccagcaattgtgccggctgcggaagagatatcaagaacgggcaggcgctgctggcgctggataagcagtggcacttggggtgctttaaatgcaagtcctgcgggaaggtcctcaccggggagtacatcagcaaggatggtgctccgtactgtgaaaaggactaccagggactctttggggtgaaatgtgaggcgtgtcaccagtttatcacagggaaagtcctggaggcaggtgacaaacattaccaccccagctgtgcacgatgcagcagatgcaaccagatgttcacagaaggagaggaaatgtatcttcaaggcaacttaggaaagtctacagaaaggattcttgagtattaaagcaaagcctggctactctccccttaaaaaaggctagctacatgagaaattgacaacccaaacttctttttggctttagaatgatcactctgaaaaactgtgattaaaaacatcacggaattttgaaaggccttatgaaggcaagtgacaagcacccgcatctgtggcctcatgcgggatttatatgacacgttttcccaaggacaacaggccttacatctgcagtggcaataggcaggtgtcactttgcatttctcagcacaaagcagatttattctttatttggtctgtgggcttagattttagcatgtcaattctagcactcaaaagcaaagacacaggagtgccaatcaaccctgtctctgctagaaacagactcagaggctccgggtgcagctctgcaattcagagtggttctggaggctggagagagaaggtttcaagcagtgcacaaatgcagcacattcgggctacaaataaatggctatctgttgaggctgcatttggaattccagggattgctctaaaccttctggagttgtgcttccgtagcctttgtgtgccctctcggcacatctttgaagaaagagcagtttcatcttcttcagcatctgatgttctgtccgagtcacattccttgtgtgcctgacctctggagaacaatagtgccattgtgcgcagacccggtgtcctggccagtgactcctgctcagcagaaccttcacggcgaatgcttctcctgagcctgcacctgacccctgggccctctgcattcagaggatttcctgtgctttgtagttagcctttgagccagagttagtgctgaagggacctatacgtctgtctgctttttgtttgatttttttgtttgtttattttggccctgggttaagaagatggaaaaaatgattgttaaataaggattaaagtattatgctgatataaaatgta

SEQ ID NO: 333734 - DNA, 489 bp, Homo sapiens
gcactgagccatgattgcatcactgtactccagcctgggcaacagagtgaaaccttgtctcaaaaaagaaaggaaaaaggaaattcacttcaaagacatcaaaataacaactggagatgcccttccatttactaaagtgatctctgaccagtgaacttagactaagttgcaaacccagttctaatggagcagggaggcctaaattcaggccttccttgcattgcacgttgacctggcttgtcacacagggccattttcttgagaaaccagccagtagtgctgagttggtggcaggcatttttgttttctcttgtattgtttacttaaaagtgttaaagaccgttgctgaccttgccagcctaacaaactgaacacagatggactagcccgttaagattcccttgtcttggggctgatgtgagaagttgtctttgctgtggaattaggacctgacatgaaacgcagatctagtggcagagaggaagatga

SEQ ID NO: 333735 - DNA, 1145 bp, Homo sapiens
ccactatactgcccgccactccccccccacccaccaaaacatatacattgttaggcgaggacaacgcaggtgacaaacattaccaccccagctgtgcacgatgcagcagatgcaaccagatgttcacagaaggagaggaaatgtatcttcaaggcaacttaggaaagtctacagaaaggattcttgagtattaaagcaaagcctggctactctccccttaaaaaaggctagctacatgagaaattgacaacccaaacttctttttggctttagaatgatcactctgaaaaactgtgattaaaaacatcacggaattttgaaaggccttatgaaggcaagtgacaagcacccgcatctgtggcctcatgcgggatttatatgacacgttttcccaaggacaacaggccttacatctgcagtggcaataggcaggtgtcactttgcatttctcagcacaaagcagatttattctttatttggtctgtgggcttagattttagcatgtcaattctagcactcaaaagcaaagacacaggagtgccaatcaaccctgtctctgctagaaacagactcagaggctccgggtgcagctctgcaattcagagtggttctggaggctggagagagaaggtttcaagcagtgcacaaatgcagcacattcgggctacaaataaatggctatctgttgaggctgcatttggaattccagggattgctctaaaccttctggagttgtgcttccgtagcctttgtgtgccctctcggcacatctttgaagaaagagcagtttcatcttcttcagcatctgatgttctgtccgagtcacattccttgtgtgcctgacctctggagaacaatagtgccattgtgcgcagacccggtgtcctggccagtgactcctgctcagcagaaccttcacggcgaatgcttctcctgagcctgcacctgacccctgggccctctgcattcagaggatttcctgtgctttgtagttagcctttgagccagagttagtgctgaagggacctatacgtctgtctgctttttgtttgatttttttgtttgtttattttggccctgggttaagaagatggaaaaaatgattgttaaataaggattaaagtattatgctgatataaaatgta

SEQ ID NO: 333736 - DNA, 7273 bp, Homo sapiens
ctcccagtgggtgtgcagacactggagagacccagtggcccaccctcaggaccctcaccacccatcagagaagcctgtcattcactgccataaatgtggggagccttgcaagggtgaagtgcttcgggtccagaccaaacatttccacatcaagtgtttcacctgcaaagtgtgtggctgtgacctggcacaagggggcttcttcataaagaacggagagtatctctgcaccctggactaccagcggatgtacgggacacgctgccatggctgtggggagttcgtggagggcgaagtggtgactgctctgggcaagacctaccatcccaattgctttgcttgtactatctgcaagcgcccgtttccacccggagaccgagtcacattcaatgggagagactgcctttgtcaactctgtgcacagccgatgtcgtccagtccgaaagaaaccaccttctccagcaattgtgccggctgcggaagagatatcaagaacgggcaggcgctgctggcgctggataagcagtggcacttggggtgctttaaatgcaagtcctgcgggaaggtcctcaccggggagtacatcagcaaggatggtgctccgtactgtgaaaaggactaccagggactctttggggtgaaatgtgaggcgtgtcaccagtttatcacagggaaagtcctggaggcaggtgacaaacattaccaccccagctgtgcacgatgcagcagatgcaaccagatgttcacagaaggagaggaaatgtatcttcaaggctccaccgtttggcatcccgactgtaagcaatctacgaagaccgaggaaaagctgcggcctaccaggacatcctcggaaagtatttattctaggccaggctccagtattcctggctcaccaggtcatactatctatgcaaaagtagacaatgagatcctggattacaaggatttagcagccattccgaaggtcaaggcaatttatgacattgaacgtccagatcttattacctatgagcctttctacacttcgggctatgatgacaaacaggagagacagagccttggagagtctccgaggactttgtctcctactccatcagcagaagggtaccaggatgttcgggatcggatgatccatcggtccacgagccagggctccatcaactcccctgtgtacagccgccacagctacactccaaccacgtcccgctctccccagcatttccacagacctggcaatgagccgtccagcggccggaactcccctctcccttaccggccagacagcctccctctaactccaacttacgctcaggcccctaaacatttccatgttccagatcaaggaatcaacatttaccgaaagccacccatctacaaacagcatgctgccttggcagcccagagcaagtcctcagaagatatcatcaagttttccaagttcccagcagcccaggcaccagaccccagcgagacaccaaagattgagacggaccactggcctggtcccccctcatttgctgtcgtaggacctgacatgaaacgcagatctagtggcagagaggaagatgatgaggaacttctgagacgtcggcagcttcaagaagagcaattaatgaagcttaactcaggcctgggacagttgatcttgaaagaagagatggagaaagagagccgggaaaggtcatctctgttagccagtcgctacgattctcccatcaactcagcttcacatattccatcatctaaaactgcatctctccctggctatggaagaaatgggcttcaccggcctgtttctaccgacttcgctcagtataacagctatggggatgtcagcgggggagtgcgagattaccagacactcccagatggccacatgcctgcaatgagaatggaccgaggagtgtctatgcccaacatgttggaaccaaagatatttccatatgaaatgctcatggtgaccaacagagggcgaaacaaaatcctcagagaggtggacagaaccaggctggagcgccacttagcccctgaagtgtttcgggaaatctttggaatgtccatacaggagtttgacaggttacctctttggagacgcaacgacatgaagaaaaaagcaaaactcttctaagtcccactcgtgaatggcaattagagaaaggactgacagtggcggtgccccataggatgtcatattgaggcccaaacttgattggagaatttgcaaactaccgtcgctcagcaacaccaaaaagagaaagtctggttaaaacaccatgagtcaaatgtcgggccagccaacagtaacacttgccaagaagcatggcgtagaaatttctatgttccgaaacacagagtagtgtccacatgtgaccttttcacattaccttatgtatacaacaggagctgcgttgttttcttctttttcttttcctttatctgttgtccaacaacagtgctgactgtccggataagagctggcaagtgcccttaggatgccgcatgggaaaaatcggttatcataatttcaaagtataaatatatttattatgtagcgctgcggctaagaaggaagagtgaggggtctgtccatggggtggcagtgatttcacacccgcctttcttgaatggcttcgtgttactcagccgtgccctggcaggaatggaactccatcagggaacagggcagctctgtttgaatggggtgaaaaacagcaaaattaattcttagcaagctccttgttctctactgttcaccgggacctggctggcaaatgacttagctattagtatatttaaaaactgttcaaaagcaaaagagaaggaacaggaatgaaaggaaaccttcccttaactctttctgcttcccatagcaggtctggttcctgctccccgcctaggacaggagctgtctggagctccacctttgcaaagaaaggaaaaacacaaattgcccccagattggcccagtggcatgccattaggtgattttgcgtaggggccatatcattcatggccaaaaaaaaccaaaaagcaaaaaacaaaaacaagtcccatgtcctactgactctagttcttccagtcgttatcctctgctgtctctctggcatcctatgaatcagatcaagcccatgctgttgttggtttttaaggtttctttcaataataggctaaggaaagacatgtttttctcttttaaatctctgcaactccaaagtagactccttcgaacgtatttaatttggccttttcagctttcttcttgcccagctctgtcgaattcatgggtgtgtgtgcacatgttggtttcactcacccagagtaattttgtgagcatgcatgtgctttttaatttctgcttgaatgtttgtcctgctgtgttgcagcttctaaagacattgtcaccgagtgtgtgtgactcaaagatcaagagtgaggctaaactgcgaccccaacatcacttccttcatggaaaggtgttggcgctgatgtagctcatggaaggatcagactgggaaccacagaggaaggatgaggtgggatgtggaggtcagagcatctcacgagagtccctcaggctctgcaacactagattcgaatatgagcctagggtttccccaacacgtgcgtgcatatgaaaccacatcatgattcccgacgtgagttagatgagggagagtttgtgtaactccacacccaggagggtaagccactttattatcatgctttggggctgtgcttaagaatttaagctctgttttaaagccgaagaagaaaacatttgaatttaccttcatatgccactaagaacaaaagctctgaagttcttcctgctggcaccaaatattaggattacaagctgtctctctgacaccagtggtaaaaaagcaagtagaatagtttctgagtctgtgttgcagcctctgacacgtggctcaccgctgtcatttgggggatggaatgaacagtcactgttctatagcatcctcctgtgctcttacctaaggaatctaaattgtcctagccttccattgctatgcactgaatgaggactactctcgtgtgtgtgtgtgtgtgtgtgtgtgtgtgtgtgtgtgtgtgtgtgtgttggatctactaacatgtttagcaaatggctctgacagggtggccatgagcagatgagaccagctcttgcttggttggaagccacactgcagtttgcagtttagcctttggtgtctcagtggcctcttgcttattccatgctttttctatcccatcctctctctgtgccctcctgcaatggcagccttggcacaatgcctgggtgtcctcatccttgctttactctggaaagtgtggggatggagaggatggtgcatttccagtgcttccttacctgtcaataacaatggtggccacctgggtcccagcacttggctggtggagagatttttttcattatggagctaataaagggtccctacgttttacattgattaatgaattatcacccagacatgtgcagatgaaatgtcaatataagaaaaatcaaggtatttgggaaacatgggcataatcaggtagttttgctaaaattcctcttccttggtctacataaagaagacatgggtctgtcatagaatggggacattagactgaaaactgggacaacccccttccttattttatagagactaggagttaaggggcctgcctaagattgcagtgataaagaactgaaccctaaatcagctcccactaatgaaaccctgctttccttgtatcttttaaactcagttctgcatccaacttgagaagaaaaaaagcttctttccatatcaagtaccatatgagttcatttaaactgcaccttgcagaaatgcattgccagaaagcaccagtagcctcctatctgcaagcagagtagtgctctgctctggggaggggtcattggaaaccataatgcagagtgggccccctactccatttcccagcaaaaggctccagctggagggatgggttgtggggcaacctggttcctgctaactgccagattgaatgtgtgggctagaatgcctgcacatttagttaaactgggctcagcatgcttgtcctcaaaatgtccatcctggtcacagcacacaagatggctattggtctgcttttaccctaccctgtactatacatgaaaattccagttattaacacactcaaactggtggagcttgttcaccctaggaaggggattgtatatatggcaggcttccctggtgccgatgtaaagggctacatttgggaacatttgacttccttgggactcttaagtgcatactgatggcatgaagtaaaaggggcctcaatgatgataggaaaatcagttcttttaaaatttcttcaagaaaatccaggctatcacatagtctttctgtgtgacttattaggagataggaagagcattgggaaacttgcacagctagctatgcatctacattttggtttggggttagttatgaaatgttcttaatatgacgtgttcaataacttcacataaacttcctgttctccaaaacctcaaagagatagagttaatgagttgttgtttttttttaaatgggggtagttttctatctgtcatgggctctagcatctactccgctacccaattctgtcatctccaagctgagtttcctcttctgaggcagaggctggagcagttctttttcagttctcatcctctccatcccaatccagtatatcaatcaactctaactcggagacgtctagctggcaatgtttctaaaactttcactggatttctttagacattgaagcaaacatttttttctaagaattgcttctcagatgatgatatcaaatgtatatgcttttgcaagtttgaaaagttcaaattaaccacttttgactaggtaagtctttctaaaaaccatttaaagctaactgggtcttagcatcctcctgtgtatggaagagacaggtgaccgctccaggttgggtgctcacagaacccttttcctgactctcatggaagatggtggaaggaaaatagactgtctcatcaaccctcctgtgtcctctgaagcaatctcagtttttattaaccacctcttctgtgtttctggtagctatttaacctgtatttaatctgtacttcctatgccagcctcaattttatttgatttttaaaattattctcttctaaccaatgaagtgtttgtcagtatgccccaaagcttgctcttttgtgctcccttttgaataactttctatccagaaaaagagattatttgggacttgagatttgcagtgataccaacttatagcaatgatgtactttaagggaactacccaactatgttgtgatagaagaaagagaaaccttcactttggcattttttttaatcactgtttatttttctgtttgcggcccaggaagcagtgggaggtggtggcagatatgctttgcatatggattgttatgtttttatttgggcaagtttaatcatggaaaactcaaaaagaaggggggaaatggtcagtttaagccaaaagaaactttctaaacaatgtataggtacacagcaaaattaaacaaatccaacaatttctgaagcttagtgtaattgagtggtggttgttattcaataaaattattcccaaaagtgtttctcctaagagtgcagttcccatgagtcacttcctgaacccattgaccaaaggtggacagagacaatcctgtagaccttgacattcagaaagatgtgagctgcttactgatcatatatgcatacgtttctttacagcagaggaaaccattgtccacaaaactgatgttcttttggggttttatgtacagacttgtccaatcatgtgtgtggttcctgcgagttgctgatgactccgcattgaagctctctgagttctttgattttaagttgggtttatggaattttttcaaatgttggaaggcgtgtggttcttcctgccctccctccccttttggaaatatgaaagcaaatgtttagaagaattccttttgaaaagctgtgtcgtgttccctgtgaaactgagcaggtgtgtgttggcgcgctaagtgccacatgcttgtgtgtagaggaggaggtggccctgccggctccgcgctgctgtgcctgtgatccctacctgctccccgctcctgttgccagcagcactcactgcactcctttgtcatatactctgcatcactgtcatactcacaacttcgtgaataaagttgtgtgctttattcgta

SEQ ID NO: 333737 - DNA, 7174 bp, Homo sapiens
tattactcctaggctatgaagctgtatagcatgttactggacagaattttgtaggcaattgtaacccaatgtgtgtggctgtgacctggcacaagggggcttcttcataaagaacggagagtatctctgcaccctggactaccagcggatgtacgggacacgctgccatggctgtggggagttcgtggagggcgaagtggtgactgctctgggcaagacctaccatcccaattgctttgcttgtactatctgcaagcgcccgtttccacccggagaccgagtcacattcaatgggagagactgcctttgtcaactctgtgcacagccgatgtcgtccagtccgaaagaaaccaccttctccagcaattgtgccggctgcggaagagatatcaagaacgggcaggcgctgctggcgctggataagcagtggcacttggggtgctttaaatgcaagtcctgcgggaaggtcctcaccggggagtacatcagcaaggatggtgctccgtactgtgaaaaggactaccagggactctttggggtgaaatgtgaggcgtgtcaccagtttatcacagggaaagtcctggaggcaggtgacaaacattaccaccccagctgtgcacgatgcagcagatgcaaccagatgttcacagaaggagaggaaatgtatcttcaaggctccaccgtttggcatcccgactgtaagcaatctacgaagaccgaggaaaagctgcggcctaccaggacatcctcggaaagtatttattctaggccaggctccagtattcctggctcaccaggtcatactatctatgcaaaagtagacaatgagatcctggattacaaggatttagcagccattccgaaggtcaaggcaatttatgacattgaacgtccagatcttattacctatgagcctttctacacttcgggctatgatgacaaacaggagagacagagccttggagagtctccgaggactttgtctcctactccatcagcagaagggtaccaggatgttcgggatcggatgatccatcggtccacgagccagggctccatcaactcccctgtgtacagccgccacagctacactccaaccacgtcccgctctccccagcatttccacagacctggcaatgagccgtccagcggccggaactcccctctcccttaccggccagacagcctccctctaactccaacttacgctcaggcccctaaacatttccatgttccagatcaaggaatcaacatttaccgaaagccacccatctacaaacagcatgctgccttggcagcccagagcaagtcctcagaagatatcatcaagttttccaagttcccagcagcccaggcaccagaccccagcgagacaccaaagattgagacggaccactggcctggtcccccctcatttgctgtcgtaggacctgacatgaaacgcagatctagtggcagagaggaagatgatgaggaacttctgagacgtcggcagcttcaagaagagcaattaatgaagcttaactcaggcctgggacagttgatcttgaaagaagagatggagaaagagagccgggaaaggtcatctctgttagccagtcgctacgattctcccatcaactcagcttcacatattccatcatctaaaactgcatctctccctggctatggaagaaatgggcttcaccggcctgtttctaccgacttcgctcagtataacagctatggggatgtcagcgggggagtgcgagattaccagacactcccagatggccacatgcctgcaatgagaatggaccgaggagtgtctatgcccaacatgttggaaccaaagatatttccatatgaaatgctcatggtgaccaacagagggcgaaacaaaatcctcagagaggtggacagaaccaggctggagcgccacttagcccctgaagtgtttcgggaaatctttggaatgtccatacaggagtttgacaggttacctctttggagacgcaacgacatgaagaaaaaagcaaaactcttctaagtcccactcgtgaatggcaattagagaaaggactgacagtggcggtgccccataggatgtcatattgaggcccaaacttgattggagaatttgcaaactaccgtcgctcagcaacaccaaaaagagaaagtctggttaaaacaccatgagtcaaatgtcgggccagccaacagtaacacttgccaagaagcatggcgtagaaatttctatgttccgaaacacagagtagtgtccacatgtgaccttttcacattaccttatgtatacaacaggagctgcgttgttttcttctttttcttttcctttatctgttgtccaacaacagtgctgactgtccggataagagctggcaagtgcccttaggatgccgcatgggaaaaatcggttatcataatttcaaagtataaatatatttattatgtagcgctgcggctaagaaggaagagtgaggggtctgtccatggggtggcagtgatttcacacccgcctttcttgaatggcttcgtgttactcagccgtgccctggcaggaatggaactccatcagggaacagggcagctctgtttgaatggggtgaaaaacagcaaaattaattcttagcaagctccttgttctctactgttcaccgggacctggctggcaaatgacttagctattagtatatttaaaaactgttcaaaagcaaaagagaaggaacaggaatgaaaggaaaccttcccttaactctttctgcttcccatagcaggtctggttcctgctccccgcctaggacaggagctgtctggagctccacctttgcaaagaaaggaaaaacacaaattgcccccagattggcccagtggcatgccattaggtgattttgcgtaggggccatatcattcatggccaaaaaaaaccaaaaagcaaaaaacaaaaacaagtcccatgtcctactgactctagttcttccagtcgttatcctctgctgtctctctggcatcctatgaatcagatcaagcccatgctgttgttggtttttaaggtttctttcaataataggctaaggaaagacatgtttttctcttttaaatctctgcaactccaaagtagactccttcgaacgtatttaatttggccttttcagctttcttcttgcccagctctgtcgaattcatgggtgtgtgtgcacatgttggtttcactcacccagagtaattttgtgagcatgcatgtgctttttaatttctgcttgaatgtttgtcctgctgtgttgcagcttctaaagacattgtcaccgagtgtgtgtgactcaaagatcaagagtgaggctaaactgcgaccccaacatcacttccttcatggaaaggtgttggcgctgatgtagctcatggaaggatcagactgggaaccacagaggaaggatgaggtgggatgtggaggtcagagcatctcacgagagtccctcaggctctgcaacactagattcgaatatgagcctagggtttccccaacacgtgcgtgcatatgaaaccacatcatgattcccgacgtgagttagatgagggagagtttgtgtaactccacacccaggagggtaagccactttattatcatgctttggggctgtgcttaagaatttaagctctgttttaaagccgaagaagaaaacatttgaatttaccttcatatgccactaagaacaaaagctctgaagttcttcctgctggcaccaaatattaggattacaagctgtctctctgacaccagtggtaaaaaagcaagtagaatagtttctgagtctgtgttgcagcctctgacacgtggctcaccgctgtcatttgggggatggaatgaacagtcactgttctatagcatcctcctgtgctcttacctaaggaatctaaattgtcctagccttccattgctatgcactgaatgaggactactctcgtgtgtgtgtgtgtgtgtgtgtgtgtgtgtgtgtgtgtgtgtgtgtgttggatctactaacatgtttagcaaatggctctgacagggtggccatgagcagatgagaccagctcttgcttggttggaagccacactgcagtttgcagtttagcctttggtgtctcagtggcctcttgcttattccatgctttttctatcccatcctctctctgtgccctcctgcaatggcagccttggcacaatgcctgggtgtcctcatccttgctttactctggaaagtgtggggatggagaggatggtgcatttccagtgcttccttacctgtcaataacaatggtggccacctgggtcccagcacttggctggtggagagatttttttcattatggagctaataaagggtccctacgttttacattgattaatgaattatcacccagacatgtgcagatgaaatgtcaatataagaaaaatcaaggtatttgggaaacatgggcataatcaggtagttttgctaaaattcctcttccttggtctacataaagaagacatgggtctgtcatagaatggggacattagactgaaaactgggacaacccccttccttattttatagagactaggagttaaggggcctgcctaagattgcagtgataaagaactgaaccctaaatcagctcccactaatgaaaccctgctttccttgtatcttttaaactcagttctgcatccaacttgagaagaaaaaaagcttctttccatatcaagtaccatatgagttcatttaaactgcaccttgcagaaatgcattgccagaaagcaccagtagcctcctatctgcaagcagagtagtgctctgctctggggaggggtcattggaaaccataatgcagagtgggccccctactccatttcccagcaaaaggctccagctggagggatgggttgtggggcaacctggttcctgctaactgccagattgaatgtgtgggctagaatgcctgcacatttagttaaactgggctcagcatgcttgtcctcaaaatgtccatcctggtcacagcacacaagatggctattggtctgcttttaccctaccctgtactatacatgaaaattccagttattaacacactcaaactggtggagcttgttcaccctaggaaggggattgtatatatggcaggcttccctggtgccgatgtaaagggctacatttgggaacatttgacttccttgggactcttaagtgcatactgatggcatgaagtaaaaggggcctcaatgatgataggaaaatcagttcttttaaaatttcttcaagaaaatccaggctatcacatagtctttctgtgtgacttattaggagataggaagagcattgggaaacttgcacagctagctatgcatctacattttggtttggggttagttatgaaatgttcttaatatgacgtgttcaataacttcacataaacttcctgttctccaaaacctcaaagagatagagttaatgagttgttgtttttttttaaatgggggtagttttctatctgtcatgggctctagcatctactccgctacccaattctgtcatctccaagctgagtttcctcttctgaggcagaggctggagcagttctttttcagttctcatcctctccatcccaatccagtatatcaatcaactctaactcggagacgtctagctggcaatgtttctaaaactttcactggatttctttagacattgaagcaaacatttttttctaagaattgcttctcagatgatgatatcaaatgtatatgcttttgcaagtttgaaaagttcaaattaaccacttttgactaggtaagtctttctaaaaaccatttaaagctaactgggtcttagcatcctcctgtgtatggaagagacaggtgaccgctccaggttgggtgctcacagaacccttttcctgactctcatggaagatggtggaaggaaaatagactgtctcatcaaccctcctgtgtcctctgaagcaatctcagtttttattaaccacctcttctgtgtttctggtagctatttaacctgtatttaatctgtacttcctatgccagcctcaattttatttgatttttaaaattattctcttctaaccaatgaagtgtttgtcagtatgccccaaagcttgctcttttgtgctcccttttgaataactttctatccagaaaaagagattatttgggacttgagatttgcagtgataccaacttatagcaatgatgtactttaagggaactacccaactatgttgtgatagaagaaagagaaaccttcactttggcattttttttaatcactgtttatttttctgtttgcggcccaggaagcagtgggaggtggtggcagatatgctttgcatatggattgttatgtttttatttgggcaagtttaatcatggaaaactcaaaaagaaggggggaaatggtcagtttaagccaaaagaaactttctaaacaatgtataggtacacagcaaaattaaacaaatccaacaatttctgaagcttagtgtaattgagtggtggttgttattcaataaaattattcccaaaagtgtttctcctaagagtgcagttcccatgagtcacttcctgaacccattgaccaaaggtggacagagacaatcctgtagaccttgacattcagaaagatgtgagctgcttactgatcatatatgcatacgtttctttacagcagaggaaaccattgtccacaaaactgatgttcttttggggttttatgtacagacttgtccaatcatgtgtgtggttcctgcgagttgctgatgactccgcattgaagctctctgagttctttgattttaagttgggtttatggaattttttcaaatgttggaaggcgtgtggttcttcctgccctccctccccttttggaaatatgaaagcaaatgtttagaagaattccttttgaaaagctgtgtcgtgttccctgtgaaactgagcaggtgtgtgttggcgcgctaagtgccacatgcttgtgtgtagaggaggaggtggccctgccggctccgcgctgctgtgcctgtgatccctacctgctccccgctcctgttgccagcagcactcactgcactcctttgtcatatactctgcatcactgtcatactcacaacttcgtgaataaagttgtgtgctttattcgta

SEQ ID NO: 333738 - DNA, 7368 bp, Homo sapiens
agcaaacattggcaatggatttaaatgctcagattttgaagaaatcaacgactgcaggtgaaatggctttgctaactttaaaatatattattattcaacattgaaacaggaaatcccacatgagcacatgtggcccaccctcaggaccctcaccacccatcagagaagcctgtcattcactgccataaatgtggggagccttgcaagggtgaagtgcttcgggtccagaccaaacatttccacatcaagtgtttcacctgcaaagtgtgtggctgtgacctggcacaagggggcttcttcataaagaacggagagtatctctgcaccctggactaccagcggatgtacgggacacgctgccatggctgtggggagttcgtggagggcgaagtggtgactgctctgggcaagacctaccatcccaattgctttgcttgtactatctgcaagcgcccgtttccacccggagaccgagtcacattcaatgggagagactgcctttgtcaactctgtgcacagccgatgtcgtccagtccgaaagaaaccaccttctccagcaattgtgccggctgcggaagagatatcaagaacgggcaggcgctgctggcgctggataagcagtggcacttggggtgctttaaatgcaagtcctgcgggaaggtcctcaccggggagtacatcagcaaggatggtgctccgtactgtgaaaaggactaccagggactctttggggtgaaatgtgaggcgtgtcaccagtttatcacagggaaagtcctggaggcaggtgacaaacattaccaccccagctgtgcacgatgcagcagatgcaaccagatgttcacagaaggagaggaaatgtatcttcaaggctccaccgtttggcatcccgactgtaagcaatctacgaagaccgaggaaaagctgcggcctaccaggacatcctcggaaagtatttattctaggccaggctccagtattcctggctcaccaggtcatactatctatgcaaaagtagacaatgagatcctggattacaaggatttagcagccattccgaaggtcaaggcaatttatgacattgaacgtccagatcttattacctatgagcctttctacacttcgggctatgatgacaaacaggagagacagagccttggagagtctccgaggactttgtctcctactccatcagcagaagggtaccaggatgttcgggatcggatgatccatcggtccacgagccagggctccatcaactcccctgtgtacagccgccacagctacactccaaccacgtcccgctctccccagcatttccacagacctggcaatgagccgtccagcggccggaactcccctctcccttaccggccagacagcctccctctaactccaacttacgctcaggcccctaaacatttccatgttccagatcaaggaatcaacatttaccgaaagccacccatctacaaacagcatgctgccttggcagcccagagcaagtcctcagaagatatcatcaagttttccaagttcccagcagcccaggcaccagaccccagcgagacaccaaagattgagacggaccactggcctggtcccccctcatttgctgtcgtaggacctgacatgaaacgcagatctagtggcagagaggaagatgatgaggaacttctgagacgtcggcagcttcaagaagagcaattaatgaagcttaactcaggcctgggacagttgatcttgaaagaagagatggagaaagagagccgggaaaggtcatctctgttagccagtcgctacgattctcccatcaactcagcttcacatattccatcatctaaaactgcatctctccctggctatggaagaaatgggcttcaccggcctgtttctaccgacttcgctcagtataacagctatggggatgtcagcgggggagtgcgagattaccagacactcccagatggccacatgcctgcaatgagaatggaccgaggagtgtctatgcccaacatgttggaaccaaagatatttccatatgaaatgctcatggtgaccaacagagggcgaaacaaaatcctcagagaggtggacagaaccaggctggagcgccacttagcccctgaagtgtttcgggaaatctttggaatgtccatacaggagtttgacaggttacctctttggagacgcaacgacatgaagaaaaaagcaaaactcttctaagtcccactcgtgaatggcaattagagaaaggactgacagtggcggtgccccataggatgtcatattgaggcccaaacttgattggagaatttgcaaactaccgtcgctcagcaacaccaaaaagagaaagtctggttaaaacaccatgagtcaaatgtcgggccagccaacagtaacacttgccaagaagcatggcgtagaaatttctatgttccgaaacacagagtagtgtccacatgtgaccttttcacattaccttatgtatacaacaggagctgcgttgttttcttctttttcttttcctttatctgttgtccaacaacagtgctgactgtccggataagagctggcaagtgcccttaggatgccgcatgggaaaaatcggttatcataatttcaaagtataaatatatttattatgtagcgctgcggctaagaaggaagagtgaggggtctgtccatggggtggcagtgatttcacacccgcctttcttgaatggcttcgtgttactcagccgtgccctggcaggaatggaactccatcagggaacagggcagctctgtttgaatggggtgaaaaacagcaaaattaattcttagcaagctccttgttctctactgttcaccgggacctggctggcaaatgacttagctattagtatatttaaaaactgttcaaaagcaaaagagaaggaacaggaatgaaaggaaaccttcccttaactctttctgcttcccatagcaggtctggttcctgctccccgcctaggacaggagctgtctggagctccacctttgcaaagaaaggaaaaacacaaattgcccccagattggcccagtggcatgccattaggtgattttgcgtaggggccatatcattcatggccaaaaaaaaccaaaaagcaaaaaacaaaaacaagtcccatgtcctactgactctagttcttccagtcgttatcctctgctgtctctctggcatcctatgaatcagatcaagcccatgctgttgttggtttttaaggtttctttcaataataggctaaggaaagacatgtttttctcttttaaatctctgcaactccaaagtagactccttcgaacgtatttaatttggccttttcagctttcttcttgcccagctctgtcgaattcatgggtgtgtgtgcacatgttggtttcactcacccagagtaattttgtgagcatgcatgtgctttttaatttctgcttgaatgtttgtcctgctgtgttgcagcttctaaagacattgtcaccgagtgtgtgtgactcaaagatcaagagtgaggctaaactgcgaccccaacatcacttccttcatggaaaggtgttggcgctgatgtagctcatggaaggatcagactgggaaccacagaggaaggatgaggtgggatgtggaggtcagagcatctcacgagagtccctcaggctctgcaacactagattcgaatatgagcctagggtttccccaacacgtgcgtgcatatgaaaccacatcatgattcccgacgtgagttagatgagggagagtttgtgtaactccacacccaggagggtaagccactttattatcatgctttggggctgtgcttaagaatttaagctctgttttaaagccgaagaagaaaacatttgaatttaccttcatatgccactaagaacaaaagctctgaagttcttcctgctggcaccaaatattaggattacaagctgtctctctgacaccagtggtaaaaaagcaagtagaatagtttctgagtctgtgttgcagcctctgacacgtggctcaccgctgtcatttgggggatggaatgaacagtcactgttctatagcatcctcctgtgctcttacctaaggaatctaaattgtcctagccttccattgctatgcactgaatgaggactactctcgtgtgtgtgtgtgtgtgtgtgtgtgtgtgtgtgtgtgtgtgtgtgtgttggatctactaacatgtttagcaaatggctctgacagggtggccatgagcagatgagaccagctcttgcttggttggaagccacactgcagtttgcagtttagcctttggtgtctcagtggcctcttgcttattccatgctttttctatcccatcctctctctgtgccctcctgcaatggcagccttggcacaatgcctgggtgtcctcatccttgctttactctggaaagtgtggggatggagaggatggtgcatttccagtgcttccttacctgtcaataacaatggtggccacctgggtcccagcacttggctggtggagagatttttttcattatggagctaataaagggtccctacgttttacattgattaatgaattatcacccagacatgtgcagatgaaatgtcaatataagaaaaatcaaggtatttgggaaacatgggcataatcaggtagttttgctaaaattcctcttccttggtctacataaagaagacatgggtctgtcatagaatggggacattagactgaaaactgggacaacccccttccttattttatagagactaggagttaaggggcctgcctaagattgcagtgataaagaactgaaccctaaatcagctcccactaatgaaaccctgctttccttgtatcttttaaactcagttctgcatccaacttgagaagaaaaaaagcttctttccatatcaagtaccatatgagttcatttaaactgcaccttgcagaaatgcattgccagaaagcaccagtagcctcctatctgcaagcagagtagtgctctgctctggggaggggtcattggaaaccataatgcagagtgggccccctactccatttcccagcaaaaggctccagctggagggatgggttgtggggcaacctggttcctgctaactgccagattgaatgtgtgggctagaatgcctgcacatttagttaaactgggctcagcatgcttgtcctcaaaatgtccatcctggtcacagcacacaagatggctattggtctgcttttaccctaccctgtactatacatgaaaattccagttattaacacactcaaactggtggagcttgttcaccctaggaaggggattgtatatatggcaggcttccctggtgccgatgtaaagggctacatttgggaacatttgacttccttgggactcttaagtgcatactgatggcatgaagtaaaaggggcctcaatgatgataggaaaatcagttcttttaaaatttcttcaagaaaatccaggctatcacatagtctttctgtgtgacttattaggagataggaagagcattgggaaacttgcacagctagctatgcatctacattttggtttggggttagttatgaaatgttcttaatatgacgtgttcaataacttcacataaacttcctgttctccaaaacctcaaagagatagagttaatgagttgttgtttttttttaaatgggggtagttttctatctgtcatgggctctagcatctactccgctacccaattctgtcatctccaagctgagtttcctcttctgaggcagaggctggagcagttctttttcagttctcatcctctccatcccaatccagtatatcaatcaactctaactcggagacgtctagctggcaatgtttctaaaactttcactggatttctttagacattgaagcaaacatttttttctaagaattgcttctcagatgatgatatcaaatgtatatgcttttgcaagtttgaaaagttcaaattaaccacttttgactaggtaagtctttctaaaaaccatttaaagctaactgggtcttagcatcctcctgtgtatggaagagacaggtgaccgctccaggttgggtgctcacagaacccttttcctgactctcatggaagatggtggaaggaaaatagactgtctcatcaaccctcctgtgtcctctgaagcaatctcagtttttattaaccacctcttctgtgtttctggtagctatttaacctgtatttaatctgtacttcctatgccagcctcaattttatttgatttttaaaattattctcttctaaccaatgaagtgtttgtcagtatgccccaaagcttgctcttttgtgctcccttttgaataactttctatccagaaaaagagattatttgggacttgagatttgcagtgataccaacttatagcaatgatgtactttaagggaactacccaactatgttgtgatagaagaaagagaaaccttcactttggcattttttttaatcactgtttatttttctgtttgcggcccaggaagcagtgggaggtggtggcagatatgctttgcatatggattgttatgtttttatttgggcaagtttaatcatggaaaactcaaaaagaaggggggaaatggtcagtttaagccaaaagaaactttctaaacaatgtataggtacacagcaaaattaaacaaatccaacaatttctgaagcttagtgtaattgagtggtggttgttattcaataaaattattcccaaaagtgtttctcctaagagtgcagttcccatgagtcacttcctgaacccattgaccaaaggtggacagagacaatcctgtagaccttgacattcagaaagatgtgagctgcttactgatcatatatgcatacgtttctttacagcagaggaaaccattgtccacaaaactgatgttcttttggggttttatgtacagacttgtccaatcatgtgtgtggttcctgcgagttgctgatgactccgcattgaagctctctgagttctttgattttaagttgggtttatggaattttttcaaatgttggaaggcgtgtggttcttcctgccctccctccccttttggaaatatgaaagcaaatgtttagaagaattccttttgaaaagctgtgtcgtgttccctgtgaaactgagcaggtgtgtgttggcgcgctaagtgccacatgcttgtgtgtagaggaggaggtggccctgccggctccgcgctgctgtgcctgtgatccctacctgctccccgctcctgttgccagcagcactcactgcactcctttgtcatatactctgcatcactgtcatactcacaacttcgtgaataaagttgtgtgctttattcgta

SEQ ID NO: 333739 - DNA, 6789 bp, Homo sapiens
aagaaaaattgaggccgggcgcggtggctcacgcctgtaatcccagcactttgggagagagcgtgcctgcccgccgcacacggggctggtttccggagtgcgtctctagagggatgcacgttgccttagccgagcttcggagagaagcctgatatgtaacccaggcaggtgggagcctcagtctgtcgggctgaggtctggcatctacaaagcctcttggccgtgttctgaacttgaagcctggaggagttctctgctcagcacagccaaggaacagaattagaagaaaaggaaccctggcctgaggcaggtgacaaacattaccaccccagctgtgcacgatgcagcagatgcaaccagatgttcacagaaggagaggaaatgtatcttcaaggctccaccgtttggcatcccgactgtaagcaatctacgaagaccgaggaaaagctgcggcctaccaggacatcctcggaaagtatttattctaggccaggctccagtattcctggctcaccaggtcatactatctatgcaaaagtagacaatgagatcctggattacaaggatttagcagccattccgaaggtcaaggcaatttatgacattgaacgtccagatcttattacctatgagcctttctacacttcgggctatgatgacaaacaggagagacagagccttggagagtctccgaggactttgtctcctactccatcagcagaagggtaccaggatgttcgggatcggatgatccatcggtccacgagccagggctccatcaactcccctgtgtacagccgccacagctacactccaaccacgtcccgctctccccagcatttccacagacctgatcaaggaatcaacatttaccgaaagccacccatctacaaacagcatgctgccttggcagcccagagcaagtcctcagaagatatcatcaagttttccaagttcccagcagcccaggcaccagaccccagcgagacaccaaagattgagacggaccactggcctggtcccccctcatttgctgtcgtaggacctgacatgaaacgcagatctagtggcagagaggaagatgatgaggaacttctgagacgtcggcagcttcaagaagagcaattaatgaagcttaactcaggcctgggacagttgatcttgaaagaagagatggagaaagagagccgggaaaggtcatctctgttagccagtcgctacgattctcccatcaactcagcttcacatattccatcatctaaaactgcatctctccctggctatggaagaaatgggcttcaccggcctgtttctaccgacttcgctcagtataacagctatggggatgtcagcgggggagtgcgagattaccagacactcccagatggccacatgcctgcaatgagaatggaccgaggagtgtctatgcccaacatgttggaaccaaagatatttccatatgaaatgctcatggtgaccaacagagggcgaaacaaaatcctcagagaggtggacagaaccaggctggagcgccacttagcccctgaagtgtttcgggaaatctttggaatgtccatacaggagtttgacaggttacctctttggagacgcaacgacatgaagaaaaaagcaaaactcttctaagtcccactcgtgaatggcaattagagaaaggactgacagtggcggtgccccataggatgtcatattgaggcccaaacttgattggagaatttgcaaactaccgtcgctcagcaacaccaaaaagagaaagtctggttaaaacaccatgagtcaaatgtcgggccagccaacagtaacacttgccaagaagcatggcgtagaaatttctatgttccgaaacacagagtagtgtccacatgtgaccttttcacattaccttatgtatacaacaggagctgcgttgttttcttctttttcttttcctttatctgttgtccaacaacagtgctgactgtccggataagagctggcaagtgcccttaggatgccgcatgggaaaaatcggttatcataatttcaaagtataaatatatttattatgtagcgctgcggctaagaaggaagagtgaggggtctgtccatggggtggcagtgatttcacacccgcctttcttgaatggcttcgtgttactcagccgtgccctggcaggaatggaactccatcagggaacagggcagctctgtttgaatggggtgaaaaacagcaaaattaattcttagcaagctccttgttctctactgttcaccgggacctggctggcaaatgacttagctattagtatatttaaaaactgttcaaaagcaaaagagaaggaacaggaatgaaaggaaaccttcccttaactctttctgcttcccatagcaggtctggttcctgctccccgcctaggacaggagctgtctggagctccacctttgcaaagaaaggaaaaacacaaattgcccccagattggcccagtggcatgccattaggtgattttgcgtaggggccatatcattcatggccaaaaaaaaccaaaaagcaaaaaacaaaaacaagtcccatgtcctactgactctagttcttccagtcgttatcctctgctgtctctctggcatcctatgaatcagatcaagcccatgctgttgttggtttttaaggtttctttcaataataggctaaggaaagacatgtttttctcttttaaatctctgcaactccaaagtagactccttcgaacgtatttaatttggccttttcagctttcttcttgcccagctctgtcgaattcatgggtgtgtgtgcacatgttggtttcactcacccagagtaattttgtgagcatgcatgtgctttttaatttctgcttgaatgtttgtcctgctgtgttgcagcttctaaagacattgtcaccgagtgtgtgtgactcaaagatcaagagtgaggctaaactgcgaccccaacatcacttccttcatggaaaggtgttggcgctgatgtagctcatggaaggatcagactgggaaccacagaggaaggatgaggtgggatgtggaggtcagagcatctcacgagagtccctcaggctctgcaacactagattcgaatatgagcctagggtttccccaacacgtgcgtgcatatgaaaccacatcatgattcccgacgtgagttagatgagggagagtttgtgtaactccacacccaggagggtaagccactttattatcatgctttggggctgtgcttaagaatttaagctctgttttaaagccgaagaagaaaacatttgaatttaccttcatatgccactaagaacaaaagctctgaagttcttcctgctggcaccaaatattaggattacaagctgtctctctgacaccagtggtaaaaaagcaagtagaatagtttctgagtctgtgttgcagcctctgacacgtggctcaccgctgtcatttgggggatggaatgaacagtcactgttctatagcatcctcctgtgctcttacctaaggaatctaaattgtcctagccttccattgctatgcactgaatgaggactactctcgtgtgtgtgtgtgtgtgtgtgtgtgtgtgtgtgtgtgtgtgtgtgtgttggatctactaacatgtttagcaaatggctctgacagggtggccatgagcagatgagaccagctcttgcttggttggaagccacactgcagtttgcagtttagcctttggtgtctcagtggcctcttgcttattccatgctttttctatcccatcctctctctgtgccctcctgcaatggcagccttggcacaatgcctgggtgtcctcatccttgctttactctggaaagtgtggggatggagaggatggtgcatttccagtgcttccttacctgtcaataacaatggtggccacctgggtcccagcacttggctggtggagagatttttttcattatggagctaataaagggtccctacgttttacattgattaatgaattatcacccagacatgtgcagatgaaatgtcaatataagaaaaatcaaggtatttgggaaacatgggcataatcaggtagttttgctaaaattcctcttccttggtctacataaagaagacatgggtctgtcatagaatggggacattagactgaaaactgggacaacccccttccttattttatagagactaggagttaaggggcctgcctaagattgcagtgataaagaactgaaccctaaatcagctcccactaatgaaaccctgctttccttgtatcttttaaactcagttctgcatccaacttgagaagaaaaaaagcttctttccatatcaagtaccatatgagttcatttaaactgcaccttgcagaaatgcattgccagaaagcaccagtagcctcctatctgcaagcagagtagtgctctgctctggggaggggtcattggaaaccataatgcagagtgggccccctactccatttcccagcaaaaggctccagctggagggatgggttgtggggcaacctggttcctgctaactgccagattgaatgtgtgggctagaatgcctgcacatttagttaaactgggctcagcatgcttgtcctcaaaatgtccatcctggtcacagcacacaagatggctattggtctgcttttaccctaccctgtactatacatgaaaattccagttattaacacactcaaactggtggagcttgttcaccctaggaaggggattgtatatatggcaggcttccctggtgccgatgtaaagggctacatttgggaacatttgacttccttgggactcttaagtgcatactgatggcatgaagtaaaaggggcctcaatgatgataggaaaatcagttcttttaaaatttcttcaagaaaatccaggctatcacatagtctttctgtgtgacttattaggagataggaagagcattgggaaacttgcacagctagctatgcatctacattttggtttggggttagttatgaaatgttcttaatatgacgtgttcaataacttcacataaacttcctgttctccaaaacctcaaagagatagagttaatgagttgttgtttttttttaaatgggggtagttttctatctgtcatgggctctagcatctactccgctacccaattctgtcatctccaagctgagtttcctcttctgaggcagaggctggagcagttctttttcagttctcatcctctccatcccaatccagtatatcaatcaactctaactcggagacgtctagctggcaatgtttctaaaactttcactggatttctttagacattgaagcaaacatttttttctaagaattgcttctcagatgatgatatcaaatgtatatgcttttgcaagtttgaaaagttcaaattaaccacttttgactaggtaagtctttctaaaaaccatttaaagctaactgggtcttagcatcctcctgtgtatggaagagacaggtgaccgctccaggttgggtgctcacagaacccttttcctgactctcatggaagatggtggaaggaaaatagactgtctcatcaaccctcctgtgtcctctgaagcaatctcagtttttattaaccacctcttctgtgtttctggtagctatttaacctgtatttaatctgtacttcctatgccagcctcaattttatttgatttttaaaattattctcttctaaccaatgaagtgtttgtcagtatgccccaaagcttgctcttttgtgctcccttttgaataactttctatccagaaaaagagattatttgggacttgagatttgcagtgataccaacttatagcaatgatgtactttaagggaactacccaactatgttgtgatagaagaaagagaaaccttcactttggcattttttttaatcactgtttatttttctgtttgcggcccaggaagcagtgggaggtggtggcagatatgctttgcatatggattgttatgtttttatttgggcaagtttaatcatggaaaactcaaaaagaaggggggaaatggtcagtttaagccaaaagaaactttctaaacaatgtataggtacacagcaaaattaaacaaatccaacaatttctgaagcttagtgtaattgagtggtggttgttattcaataaaattattcccaaaagtgtttctcctaagagtgcagttcccatgagtcacttcctgaacccattgaccaaaggtggacagagacaatcctgtagaccttgacattcagaaagatgtgagctgcttactgatcatatatgcatacgtttctttacagcagaggaaaccattgtccacaaaactgatgttcttttggggttttatgtacagacttgtccaatcatgtgtgtggttcctgcgagttgctgatgactccgcattgaagctctctgagttctttgattttaagttgggtttatggaattttttcaaatgttggaaggcgtgtggttcttcctgccctccctccccttttggaaatatgaaagcaaatgtttagaagaattccttttgaaaagctgtgtcgtgttccctgtgaaactgagcaggtgtgtgttggcgcgctaagtgccacatgcttgtgtgtagaggaggaggtggccctgccggctccgcgctgctgtgcctgtgatccctacctgctccccgctcctgttgccagcagcactcactgcactcctttgtcatatactctgcatcactgtcatactcacaacttcgtgaataaagttgtgtgctttattcgta

SEQ ID NO: 333740 - DNA, 7548 bp, Homo sapiens
  misc_feature (2)..(2): n is a, c, g, or t
  misc_feature (4)..(6): n is a, c, g, or t
  misc_feature (10)..(10): n is a, c, g, or t
  misc_feature (12)..(14): n is a, c, g, or t
  misc_feature (16)..(18): n is a, c, g, or t
tngnnnggcngnnngnnnaggtagacagtaaggagccaggggaacagagagaattgtggggcagcaccgctccttgggtccccactccccatttctcattgcttggaaatccatgccaagatgcctgccttccttggtctaaagtgtctggggaaattgtgcagctctgagaaaagcaaagtcacctcatctgagagaaccagtgccaggggctcgaacagaaagagactgattgttgaggaccggagggtctctgggacctccttcaccgctcataggcgtgccactatcactcatttgctgtatctctgtcccaaggactactgcccacgtgggcgtgtatgtaacagcgttgatccttttgtggcccaccctcaggaccctcaccacccatcagagaagcctgtcattcactgccataaatgtggggagccttgcaagggtgaagtgcttcgggtccagaccaaacatttccacatcaagtgtttcacctgcaaagtgtgtggctgtgacctggcacaagggggcttcttcataaagaacggagagtatctctgcaccctggactaccagcggatgtacgggacacgctgccatggctgtggggagttcgtggagggcgaagtggtgactgctctgggcaagacctaccatcccaattgctttgcttgtactatctgcaagcgcccgtttccacccggagaccgagtcacattcaatgggagagactgcctttgtcaactctgtgcacagccgatgtcgtccagtccgaaagaaaccaccttctccagcaattgtgccggctgcggaagagatatcaagaacgggcaggcgctgctggcgctggataagcagtggcacttggggtgctttaaatgcaagtcctgcgggaaggtcctcaccggggagtacatcagcaaggatggtgctccgtactgtgaaaaggactaccagggactctttggggtgaaatgtgaggcgtgtcaccagtttatcacagggaaagtcctggaggcaggtgacaaacattaccaccccagctgtgcacgatgcagcagatgcaaccagatgttcacagaaggagaggaaatgtatcttcaaggctccaccgtttggcatcccgactgtaagcaatctacgaagaccgaggaaaagctgcggcctaccaggacatcctcggaaagtatttattctaggccaggctccagtattcctggctcaccaggtcatactatctatgcaaaagtagacaatgagatcctggattacaaggatttagcagccattccgaaggtcaaggcaatttatgacattgaacgtccagatcttattacctatgagcctttctacacttcgggctatgatgacaaacaggagagacagagccttggagagtctccgaggactttgtctcctactccatcagcagaagggtaccaggatgttcgggatcggatgatccatcggtccacgagccagggctccatcaactcccctgtgtacagccgccacagctacactccaaccacgtcccgctctccccagcatttccacagacctggcaatgagccgtccagcggccggaactcccctctcccttaccggccagacagcctccctctaactccaacttacgctcaggcccctaaacatttccatgttccagatcaaggaatcaacatttaccgaaagccacccatctacaaacagcatgctgccttggcagcccagagcaagtcctcagaagatatcatcaagttttccaagttcccagcagcccaggcaccagaccccagcgagacaccaaagattgagacggaccactggcctggtcccccctcatttgctgtcgtaggacctgacatgaaacgcagatctagtggcagagaggaagatgatgaggaacttctgagacgtcggcagcttcaagaagagcaattaatgaagcttaactcaggcctgggacagttgatcttgaaagaagagatggagaaagagagccgggaaaggtcatctctgttagccagtcgctacgattctcccatcaactcagcttcacatattccatcatctaaaactgcatctctccctggctatggaagaaatgggcttcaccggcctgtttctaccgacttcgctcagtataacagctatggggatgtcagcgggggagtgcgagattaccagacactcccagatggccacatgcctgcaatgagaatggaccgaggagtgtctatgcccaacatgttggaaccaaagatatttccatatgaaatgctcatggtgaccaacagagggcgaaacaaaatcctcagagaggtggacagaaccaggctggagcgccacttagcccctgaagtgtttcgggaaatctttggaatgtccatacaggagtttgacaggttacctctttggagacgcaacgacatgaagaaaaaagcaaaactcttctaagtcccactcgtgaatggcaattagagaaaggactgacagtggcggtgccccataggatgtcatattgaggcccaaacttgattggagaatttgcaaactaccgtcgctcagcaacaccaaaaagagaaagtctggttaaaacaccatgagtcaaatgtcgggccagccaacagtaacacttgccaagaagcatggcgtagaaatttctatgttccgaaacacagagtagtgtccacatgtgaccttttcacattaccttatgtatacaacaggagctgcgttgttttcttctttttcttttcctttatctgttgtccaacaacagtgctgactgtccggataagagctggcaagtgcccttaggatgccgcatgggaaaaatcggttatcataatttcaaagtataaatatatttattatgtagcgctgcggctaagaaggaagagtgaggggtctgtccatggggtggcagtgatttcacacccgcctttcttgaatggcttcgtgttactcagccgtgccctggcaggaatggaactccatcagggaacagggcagctctgtttgaatggggtgaaaaacagcaaaattaattcttagcaagctccttgttctctactgttcaccgggacctggctggcaaatgacttagctattagtatatttaaaaactgttcaaaagcaaaagagaaggaacaggaatgaaaggaaaccttcccttaactctttctgcttcccatagcaggtctggttcctgctccccgcctaggacaggagctgtctggagctccacctttgcaaagaaaggaaaaacacaaattgcccccagattggcccagtggcatgccattaggtgattttgcgtaggggccatatcattcatggccaaaaaaaaccaaaaagcaaaaaacaaaaacaagtcccatgtcctactgactctagttcttccagtcgttatcctctgctgtctctctggcatcctatgaatcagatcaagcccatgctgttgttggtttttaaggtttctttcaataataggctaaggaaagacatgtttttctcttttaaatctctgcaactccaaagtagactccttcgaacgtatttaatttggccttttcagctttcttcttgcccagctctgtcgaattcatgggtgtgtgtgcacatgttggtttcactcacccagagtaattttgtgagcatgcatgtgctttttaatttctgcttgaatgtttgtcctgctgtgttgcagcttctaaagacattgtcaccgagtgtgtgtgactcaaagatcaagagtgaggctaaactgcgaccccaacatcacttccttcatggaaaggtgttggcgctgatgtagctcatggaaggatcagactgggaaccacagaggaaggatgaggtgggatgtggaggtcagagcatctcacgagagtccctcaggctctgcaacactagattcgaatatgagcctagggtttccccaacacgtgcgtgcatatgaaaccacatcatgattcccgacgtgagttagatgagggagagtttgtgtaactccacacccaggagggtaagccactttattatcatgctttggggctgtgcttaagaatttaagctctgttttaaagccgaagaagaaaacatttgaatttaccttcatatgccactaagaacaaaagctctgaagttcttcctgctggcaccaaatattaggattacaagctgtctctctgacaccagtggtaaaaaagcaagtagaatagtttctgagtctgtgttgcagcctctgacacgtggctcaccgctgtcatttgggggatggaatgaacagtcactgttctatagcatcctcctgtgctcttacctaaggaatctaaattgtcctagccttccattgctatgcactgaatgaggactactctcgtgtgtgtgtgtgtgtgtgtgtgtgtgtgtgtgtgtgtgtgtgtgtgttggatctactaacatgtttagcaaatggctctgacagggtggccatgagcagatgagaccagctcttgcttggttggaagccacactgcagtttgcagtttagcctttggtgtctcagtggcctcttgcttattccatgctttttctatcccatcctctctctgtgccctcctgcaatggcagccttggcacaatgcctgggtgtcctcatccttgctttactctggaaagtgtggggatggagaggatggtgcatttccagtgcttccttacctgtcaataacaatggtggccacctgggtcccagcacttggctggtggagagatttttttcattatggagctaataaagggtccctacgttttacattgattaatgaattatcacccagacatgtgcagatgaaatgtcaatataagaaaaatcaaggtatttgggaaacatgggcataatcaggtagttttgctaaaattcctcttccttggtctacataaagaagacatgggtctgtcatagaatggggacattagactgaaaactgggacaacccccttccttattttatagagactaggagttaaggggcctgcctaagattgcagtgataaagaactgaaccctaaatcagctcccactaatgaaaccctgctttccttgtatcttttaaactcagttctgcatccaacttgagaagaaaaaaagcttctttccatatcaagtaccatatgagttcatttaaactgcaccttgcagaaatgcattgccagaaagcaccagtagcctcctatctgcaagcagagtagtgctctgctctggggaggggtcattggaaaccataatgcagagtgggccccctactccatttcccagcaaaaggctccagctggagggatgggttgtggggcaacctggttcctgctaactgccagattgaatgtgtgggctagaatgcctgcacatttagttaaactgggctcagcatgcttgtcctcaaaatgtccatcctggtcacagcacacaagatggctattggtctgcttttaccctaccctgtactatacatgaaaattccagttattaacacactcaaactggtggagcttgttcaccctaggaaggggattgtatatatggcaggcttccctggtgccgatgtaaagggctacatttgggaacatttgacttccttgggactcttaagtgcatactgatggcatgaagtaaaaggggcctcaatgatgataggaaaatcagttcttttaaaatttcttcaagaaaatccaggctatcacatagtctttctgtgtgacttattaggagataggaagagcattgggaaacttgcacagctagctatgcatctacattttggtttggggttagttatgaaatgttcttaatatgacgtgttcaataacttcacataaacttcctgttctccaaaacctcaaagagatagagttaatgagttgttgtttttttttaaatgggggtagttttctatctgtcatgggctctagcatctactccgctacccaattctgtcatctccaagctgagtttcctcttctgaggcagaggctggagcagttctttttcagttctcatcctctccatcccaatccagtatatcaatcaactctaactcggagacgtctagctggcaatgtttctaaaactttcactggatttctttagacattgaagcaaacatttttttctaagaattgcttctcagatgatgatatcaaatgtatatgcttttgcaagtttgaaaagttcaaattaaccacttttgactaggtaagtctttctaaaaaccatttaaagctaactgggtcttagcatcctcctgtgtatggaagagacaggtgaccgctccaggttgggtgctcacagaacccttttcctgactctcatggaagatggtggaaggattaaccacctcttctgtgtttctggtagctatttaacctgtatttaatctgtacttcctatgccagcctcaattttatttgatttttaaaattattctcttctaaccaatgaagtgtttgtcagtatgccccaaagcttgctcttttgtgctcccttttgaataactttctatccagaaaaagagattatttgggacttgagatttgcagtgataccaacttatagcaatgatgtactttaagggaactacccaactatgttgtgatagaagaaagagaaaccttcactttggcattttttttaatcactgtttatttttctgtttgcggcccaggaagcagtgggaggtggtggcagatatgctttgcatatggattgttatgtttttatttgggcaagtttaatcatggaaaactcaaaaagaaggggggaaatggtcagtttaagccaaaagaaactttctaaacaatgtataggtacacagcaaaattaaacaaatccaacaatttctgaagcttagtgtaattgagtggtggttgttattcaataaaattattcccaaaagtgtttctcctaagagtgcagttcccatgagtcacttcctgaacccattgaccaaaggtggacagagacaatcctgtagaccttgacattcagaaagatgtgagctgcttactgatcatatatgcatacgtttctttacagcagaggaaaccattgtccacaaaactgatgttcttttggggttttatgtacagacttgtccaatcatgtgtgtggttcctgcgagttgctgatgactccgcattgaagctctctgagttctttgattttaagttgggtttatggaattttttcaaatgttggaaggcgtgtggttcttcctgccctccctccccttttggaaatatgaaagcaaatgtttagaagaattccttttgaaaagctgtgtcgtgttccctgtgaaactgagcaggtgtgtgttggcgcgctaagtgccacatgcttgtgtgtagaggaggaggtggccctgccggctccgcgctgctgtgcctgtgatccctacctgctccccgctcctgttgccagcagcactcactgcactcctttgtcatatactctgcatcactgtcatactcacaacttcgtgaataaagttgtgtgctttattcgta

SEQ ID NO: 333741 - DNA, 5521 bp, Homo sapiens
tcactacgagcgcatcctgtgactgtcaggactctgggttcctgctctgttctggggtccaaaccttggtctccctttggtcctgctgggagctccccctgcctctttcccctacttagctccttagcaaagagaccctggcctccactttgcccctttgggtacaaagaaggaatagatgattccgtggccttgggggcaggagagagacactctccatgaacacttctccagccacctcatacccccttcccagggtaagcgccacttagcccctgaagtgtttcgggaaatctttggaatgtccatacaggagtttgacaggttacctctttggagacgcaacgacatgaagaaaaaagcaaaactcttctaagtcccactcgtgaatggcaattagagaaaggactgacagtggcggtgccccataggatgtcatattgaggcccaaacttgattggagaatttgcaaactaccgtcgctcagcaacaccaaaaagagaaagtctggttaaaacaccatgagtcaaatgtcgggccagccaacagtaacacttgccaagaagcatggcgtagaaatttctatgttccgaaacacagagtagtgtccacatgtgaccttttcacattaccttatgtatacaacaggagctgcgttgttttcttctttttcttttcctttatctgttgtccaacaacagtgctgactgtccggataagagctggcaagtgcccttaggatgccgcatgggaaaaatcggttatcataatttcaaagtataaatatatttattatgtagcgctgcggctaagaaggaagagtgaggggtctgtccatggggtggcagtgatttcacacccgcctttcttgaatggcttcgtgttactcagccgtgccctggcaggaatggaactccatcagggaacagggcagctctgtttgaatggggtgaaaaacagcaaaattaattcttagcaagctccttgttctctactgttcaccgggacctggctggcaaatgacttagctattagtatatttaaaaactgttcaaaagcaaaagagaaggaacaggaatgaaaggaaaccttcccttaactctttctgcttcccatagcaggtctggttcctgctccccgcctaggacaggagctgtctggagctccacctttgcaaagaaaggaaaaacacaaattgcccccagattggcccagtggcatgccattaggtgattttgcgtaggggccatatcattcatggccaaaaaaaaccaaaaagcaaaaaacaaaaacaagtcccatgtcctactgactctagttcttccagtcgttatcctctgctgtctctctggcatcctatgaatcagatcaagcccatgctgttgttggtttttaaggtttctttcaataataggctaaggaaagacatgtttttctcttttaaatctctgcaactccaaagtagactccttcgaacgtatttaatttggccttttcagctttcttcttgcccagctctgtcgaattcatgggtgtgtgtgcacatgttggtttcactcacccagagtaattttgtgagcatgcatgtgctttttaatttctgcttgaatgtttgtcctgctgtgttgcagcttctaaagacattgtcaccgagtgtgtgtgactcaaagatcaagagtgaggctaaactgcgaccccaacatcacttccttcatggaaaggtgttggcgctgatgtagctcatggaaggatcagactgggaaccacagaggaaggatgaggtgggatgtggaggtcagagcatctcacgagagtccctcaggctctgcaacactagattcgaatatgagcctagggtttccccaacacgtgcgtgcatatgaaaccacatcatgattcccgacgtgagttagatgagggagagtttgtgtaactccacacccaggagggtaagccactttattatcatgctttggggctgtgcttaagaatttaagctctgttttaaagccgaagaagaaaacatttgaatttaccttcatatgccactaagaacaaaagctctgaagttcttcctgctggcaccaaatattaggattacaagctgtctctctgacaccagtggtaaaaaagcaagtagaatagtttctgagtctgtgttgcagcctctgacacgtggctcaccgctgtcatttgggggatggaatgaacagtcactgttctatagcatcctcctgtgctcttacctaaggaatctaaattgtcctagccttccattgctatgcactgaatgaggactactctcgtgtgtgtgtgtgtgtgtgtgtgtgtgtgtgtgtgtgtgtgtgtgtgttggatctactaacatgtttagcaaatggctctgacagggtggccatgagcagatgagaccagctcttgcttggttggaagccacactgcagtttgcagtttagcctttggtgtctcagtggcctcttgcttattccatgctttttctatcccatcctctctctgtgccctcctgcaatggcagccttggcacaatgcctgggtgtcctcatccttgctttactctggaaagtgtggggatggagaggatggtgcatttccagtgcttccttacctgtcaataacaatggtggccacctgggtcccagcacttggctggtggagagatttttttcattatggagctaataaagggtccctacgttttacattgattaatgaattatcacccagacatgtgcagatgaaatgtcaatataagaaaaatcaaggtatttgggaaacatgggcataatcaggtagttttgctaaaattcctcttccttggtctacataaagaagacatgggtctgtcatagaatggggacattagactgaaaactgggacaacccccttccttattttatagagactaggagttaaggggcctgcctaagattgcagtgataaagaactgaaccctaaatcagctcccactaatgaaaccctgctttccttgtatcttttaaactcagttctgcatccaacttgagaagaaaaaaagcttctttccatatcaagtaccatatgagttcatttaaactgcaccttgcagaaatgcattgccagaaagcaccagtagcctcctatctgcaagcagagtagtgctctgctctggggaggggtcattggaaaccataatgcagagtgggccccctactccatttcccagcaaaaggctccagctggagggatgggttgtggggcaacctggttcctgctaactgccagattgaatgtgtgggctagaatgcctgcacatttagttaaactgggctcagcatgcttgtcctcaaaatgtccatcctggtcacagcacacaagatggctattggtctgcttttaccctaccctgtactatacatgaaaattccagttattaacacactcaaactggtggagcttgttcaccctaggaaggggattgtatatatggcaggcttccctggtgccgatgtaaagggctacatttgggaacatttgacttccttgggactcttaagtgcatactgatggcatgaagtaaaaggggcctcaatgatgataggaaaatcagttcttttaaaatttcttcaagaaaatccaggctatcacatagtctttctgtgtgacttattaggagataggaagagcattgggaaacttgcacagctagctatgcatctacattttggtttggggttagttatgaaatgttcttaatatgacgtgttcaataacttcacataaacttcctgttctccaaaacctcaaagagatagagttaatgagttgttgtttttttttaaatgggggtagttttctatctgtcatgggctctagcatctactccgctacccaattctgtcatctccaagctgagtttcctcttctgaggcagaggctggagcagttctttttcagttctcatcctctccatcccaatccagtatatcaatcaactctaactcggagacgtctagctggcaatgtttctaaaactttcactggatttctttagacattgaagcaaacatttttttctaagaattgcttctcagatgatgatatcaaatgtatatgcttttgcaagtttgaaaagttcaaattaaccacttttgactaggtaagtctttctaaaaaccatttaaagctaactgggtcttagcatcctcctgtgtatggaagagacaggtgaccgctccaggttgggtgctcacagaacccttttcctgactctcatggaagatggtggaaggaaaatagactgtctcatcaaccctcctgtgtcctctgaagcaatctcagtttttattaaccacctcttctgtgtttctggtagctatttaacctgtatttaatctgtacttcctatgccagcctcaattttatttgatttttaaaattattctcttctaaccaatgaagtgtttgtcagtatgccccaaagcttgctcttttgtgctcccttttgaataactttctatccagaaaaagagattatttgggacttgagatttgcagtgataccaacttatagcaatgatgtactttaagggaactacccaactatgttgtgatagaagaaagagaaaccttcactttggcattttttttaatcactgtttatttttctgtttgcggcccaggaagcagtgggaggtggtggcagatatgctttgcatatggattgttatgtttttatttgggcaagtttaatcatggaaaactcaaaaagaaggggggaaatggtcagtttaagccaaaagaaactttctaaacaatgtataggtacacagcaaaattaaacaaatccaacaatttctgaagcttagtgtaattgagtggtggttgttattcaataaaattattcccaaaagtgtttctcctaagagtgcagttcccatgagtcacttcctgaacccattgaccaaaggtggacagagacaatcctgtagaccttgacattcagaaagatgtgagctgcttactgatcatatatgcatacgtttctttacagcagaggaaaccattgtccacaaaactgatgttcttttggggttttatgtacagacttgtccaatcatgtgtgtggttcctgcgagttgctgatgactccgcattgaagctctctgagttctttgattttaagttgggtttatggaattttttcaaatgttggaaggcgtgtggttcttcctgccctccctccccttttggaaatatgaaagcaaatgtttagaagaattccttttgaaaagctgtgtcgtgttccctgtgaaactgagcaggtgtgtgttggcgcgctaagtgccacatgcttgtgtgtagaggaggaggtggccctgccggctccgcgctgctgtgcctgtgatccctacctgctccccgctcctgttgccagcagcactcactgcactcctttgtcatatactctgcatcactgtcatactcacaacttcgtgaataaagttgtgtgctttattcgta

SEQ ID NO: 333742 - DNA, 7458 bp, Homo sapiens
  misc_feature (2)..(2): n is a, c, g, or t
  misc_feature (4)..(6): n is a, c, g, or t
  misc_feature (10)..(10): n is a, c, g, or t
  misc_feature (12)..(14): n is a, c, g, or t
  misc_feature (16)..(18): n is a, c, g, or t
tngnnnggcngnnngnnnaggtagacagtaaggagccaggggaacagagagaattgtggggcagcaccgctccttgggtccccactccccatttctcattgcttggaaatccatgccaagatgcctgccttccttggtctaaagtgtctggggaaattgtgcagctctgagaaaagcaaagtcacctcatctgagagaaccagtgccaggggctcgaacagaaagagactgattgttgaggaccggagggtctctgggacctccttcaccgctcataggcgtgccactatcactcatttgctgtatctctgtcccaaggactactgcccacgtgggcgtgtatgtaacagcgttgatccttttgtggcccaccctcaggaccctcaccacccatcagagaagcctgtcattcactgccataaatgtggggagccttgcaagggtgaagtgcttcgggtccagaccaaacatttccacatcaagtgtttcacctgcaaagtgtgtggctgtgacctggcacaagggggcttcttcataaagaacggagagtatctctgcaccctggactaccagcggatgtacgggacacgctgccatggctgtggggagttcgtggagggcgaagtggtgactgctctgggcaagacctaccatcccaattgctttgcttgtactatctgcaagcgcccgtttccacccggagaccgagtcacattcaatgggagagactgcctttgtcaactctgtgcacagccgatgtcgtccagtccgaaagaaaccaccttctccagcaattgtgccggctgcggaagagatatcaagaacgggcaggcgctgctggcgctggataagcagtggcacttggggtgctttaaatgcaagtcctgcgggaaggtcctcaccggggagtacatcagcaaggatggtgctccgtactgtgaaaaggactaccagggactctttggggtgaaatgtgaggcgtgtcaccagtttatcacagggaaagtcctggaggcaggtgacaaacattaccaccccagctgtgcacgatgcagcagatgcaaccagatgttcacagaaggagaggaaatgtatcttcaaggctccaccgtttggcatcccgactgtaagcaatctacgaagaccgaggaaaagctgcggcctaccaggacatcctcggaaagtatttattctaggccaggctccagtattcctggctcaccaggtcatactatctatgcaaaagtagacaatgagatcctggattacaaggatttagcagccattccgaaggtcaaggcaatttatgacattgaacgtccagatcttattacctatgagcctttctacacttcgggctatgatgacaaacaggagagacagagccttggagagtctccgaggactttgtctcctactccatcagcagaagggtaccaggatgttcgggatcggatgatccatcggtccacgagccagggctccatcaactcccctgtgtacagccgccacagctacactccaaccacgtcccgctctccccagcatttccacagacctggcaatgagccgtccagcggccggaactcccctctcccttaccggccagacagcctccctctaactccaacttacgctcaggcccctaaacatttccatgttccagatcaaggaatcaacatttaccgaaagccacccatctacaaacagcatgctgccttggcagcccagagcaagtcctcagaagatatcatcaagttttccaagttcccagcagcccaggcaccagaccccagcgagacaccaaagattgagacggaccactggcctggtcccccctcatttgctgtcgtaggacctgacatgaaacgcagatctagtggcagagaggaagatgatgaggaacttctgagacgtcggcagcttcaagaagagcaattaatgaagcttaactcaggcctgggacagttgatcttgaaagaagagatggagaaagagagccgggaaaggtcatctctgttagccagtcgctacgattctcccatcaactcagcttcacatattccatcatctaaaactgcatctctccctggctatggaagaaatgggcttcaccggcctgtttctaccgacttcgctcagtataacagctatggggatgtcagcgggggagtgcgagattaccagacactcccagatggccacatgcctgcaatgagaatggaccgaggagtgtctatgcccaacatgttggaaccaaagatatttccatatgaaatgctcatggtgaccaacagagggcgaaacaaaatcctcagagaggtggacagaaccaggctggagcgccacttagcccctgaagtgtttcgggaaatctttggaatgtccatacaggagtttgacaggttacctctttggagacgcaacgacatgaagaaaaaagcaaaactcttctaagtcccactcgtgaatggcaattagagaaaggactgacagtggcggtgccccataggatgtcatattgaggcccaaacttgattggagaatttgcaaactaccgtcgctcagcaacaccaaaaagagaaagtctggttaaaacaccatgagtcaaatgtcgggccagccaacagtaacacttgccaagaagcatggcgtagaaatttctatgttccgaaacacagagtagtgtccacatgtgaccttttcacattaccttatgtatacaacaggagctgcgttgttttcttctttttcttttcctttatctgttgtccaacaacagtgctgactgtccggataagagctggcaagtgcccttaggatgccgcatgggaaaaatcggttatcataatttcaaagtataaatatatttattatgtagcgctgcggctaagaaggaagagtgaggggtctgtccatggggtggcagtgatttcacacccgcctttcttgaatggcttcgtgttactcagccgtgccctggcaggaatggaactccatcagggaacagggcagctctgtttgaatggggtgaaaaacagcaaaattaattcttagcaagctccttgttctctactgttcaccgggacctggctggcaaatgacttagctattagtatatttaaaaactgttcaaaagcaaaagagaaggaacaggaatgaaaggaaaccttcccttaactctttctgcttcccatagcaggtctggttcctgctccccgcctaggacaggagctgtctggagctccacctttgcaaagaaaggaaaaacacaaattgcccccagattggcccagtggcatgccattaggtgattttgcgtaggggccatatcattcatggccaaaaaaaaccaaaaagcaaaaaacaaaaacaagtcccatgtcctactgactctagttcttccagtcgttatcctctgctgtctctctggcatcctatgaatcagatcaagcccatgctgttgttggtttttaaggtttctttcaataataggctaaggaaagacatgtttttctcttttaaatctctgcaactccaaagtagactccttcgaacgtatttaatttggccttttcagctttcttcttgcccagctctgtcgaattcatgggtgtgtgtgcacatgttggtttcactcacccagagtaattttgtgagcatgcatgtgctttttaatttctgcttgaatgtttgtcctgctgtgttgcagcttctaaagacattgtcaccgagtgtgtgtgactcaaagatcaagagtgaggctaaactgcgaccccaacatcacttccttcatggaaaggtgttggcgctgatgtagctcatggaaggatcagactgggaaccacagaggaaggatgaggtgggatgtggaggtcagagcatctcacgagagtccctcaggctctgcaacactagattcgaatatgagcctagggtttccccaacacgtgcgtgcatatgaaaccacatcatgattcccgacgtgagttagatgagggagagtttgtgtaactccacacccaggagggtaagccactttattatcatgctttggggctgtgcttaagaatttaagctctgttttaaagccgaagaagaaaacatttgaatttaccttcatatgccactaagaacaaaagctctgaagttcttcctgctggcaccaaatattaggattacaagctgtctctctgacaccagtggtaaaaaagcaagtagaatagtttctgagtctgtgttgcagcctctgacacgtggctcaccgctgtcatttgggggatggaatgaacagtcactgttctatagcatcctcctgtgctcttacctaaggaatctaaattgtcctagccttccattgctatgcactgaatgaggactactctcgtgtgtgtgtgtgtgtgtgtgtgtgtgtgtgtgtgtgtgtgtgtgtgttggatctactaacatgtttagcaaatggctctgacagggtggccatgagcagatgagaccagctcttgcttggttggaagccacactgcagtttgcagtttagcctttggtgtctcagtggcctcttgcttattccatgctttttctatcccatcctctctctgtgccctcctgcaatggcagccttggcacaatgcctgggtgtcctcatccttgctttactctggaaagtgtggggatggagaggatggtgcatttccagtgcttccttacctgtcaataacaatggtggccacctgggtcccagcacttggctggtggagagatttttttcattatggagctaataaagggtccctacgttttacattgattaatgaattatcacccagacatgtgcagatgaaatgtcaatataagaaaaatcaaggtatttgggaaacatgggcataatcaggtagttttgctaaaattcctcttccttggtctacataaagaagacatgggtctgtcatagaatggggacattagactgaaaactgggacaacccccttccttattttatagagactaggagttaaggggcctgcctaagattgcagtgataaagaactgaaccctaaatcagctcccactaatgaaaccctgctttccttgtatcttttaaactcagttctgcatccaacttgagaagaaaaaaagcttctttccatatcaagtaccatatgagttcatttaaactgcaccttgcagaaatgcattgccagaaagcaccagtagcctcctatctgcaagcagagtagtgctctgctctggggaggggtcattggaaaccataatgcagagtgggccccctactccatttcccagcaaaaggctccagctggagggatgggttgtggggcaacctggttcctgctaactgccagattgaatgtgtgggctagaatgcctgcacatttagttaaactgggctcagcatgcttgtcctcaaaatgtccatcctggtcacagcacacaagatggctattggtctgcttttaccctaccctgtactatacatgaaaattccagttattaacacactcaaactggtggagcttgttcaccctaggaaggggattgtatatatggcaggcttccctggtgccgatgtaaagggctacatttgggaacatttgacttccttgggactcttaagtgcatactgatggcatgaagtaaaaggggcctcaatgatgataggaaaatcagttcttttaaaatttcttcaagaaaatccaggctatcacatagtctttctgtgtgacttattaggagataggaagagcattgggaaacttgcacagctagctatgcatctacattttggtttggggttagttatgaaatgttcttaatatgacgtgttcaataacttcacataaacttcctgttctccaaaacctcaaagagatagagttaatgagttgttgtttttttttaaatgggggtagttttctatctgtcatgggctctagcatctactccgctacccaattctgtcatctccaagctgagtttcctcttctgaggcagaggctggagcagttctttttcagttctcatcctctccatcccaatccagtatatcaatcaactctaactcggagacgtctagctggcaatgtttctaaaactttcactggatttctttagacattgaagcaaacatttttttctaagaattgcttctcagatgatgatatcaaatgtatatgcttttgcaagtttgaaaagttcaaattaaccacttttgactaggtaagtctttctaaaaaccatttaaagctaactgggtcttagcatcctcctgtgtatggaagagacaggtgaccgctccaggttgggtgctcacagaacccttttcctgactctcatggaagatggtggaaggaaaatagactgtctcatcaaccctcctgtgtcctctgaagcaatctcagtttttattaaccacctcttctgtgtttctggtagctatttaacctgtatttaatctgtacttcctatgccagcctcaattttatttgatttttaaaattattctcttctaaccaatgaagtgtttgtcagtatgccccaaagcttgctcttttgtgctcccttttgaataactttctatccagaaaaagagattatttgggacttgagaggtggtggcagatatgctttgcatatggattgttatgtttttatttgggcaagtttaatcatggaaaactcaaaaagaaggggggaaatggtcagtttaagccaaaagaaactttctaaacaatgtataggtacacagcaaaattaaacaaatccaacaatttctgaagcttagtgtaattgagtggtggttgttattcaataaaattattcccaaaagtgtttctcctaagagtgcagttcccatgagtcacttcctgaacccattgaccaaaggtggacagagacaatcctgtagaccttgacattcagaaagatgtgagctgcttactgatcatatatgcatacgtttctttacagcagaggaaaccattgtccacaaaactgatgttcttttggggttttatgtacagacttgtccaatcatgtgtgtggttcctgcgagttgctgatgactccgcattgaagctctctgagttctttgattttaagttgggtttatggaattttttcaaatgttggaaggcgtgtggttcttcctgccctccctccccttttggaaatatgaaagcaaatgtttagaagaattccttttgaaaagctgtgtcgtgttccctgtgaaactgagcaggtgtgtgttggcgcgctaagtgccacatgcttgtgtgtagaggaggaggtggccctgccggctccgcgctgctgtgcctgtgatccctacctgctccccgctcctgttgccagcagcactcactgcactcctttgtcatatactctgcatcactgtcatactcacaacttcgtgaataaagttgtgtgctttattcgta

SEQ ID NO: 333743 - DNA, 1427 bp, Homo sapiens
aagaaaaattgaggccgggcgcggtggctcacgcctgtaatcccagcactttgggagagagcgtgcctgcccgccgcacacggggctggtttccggagtgcgtctctagagggatgcacgttgccttagccgagcttcggagagaagcctgatatgtaacccaggcaggtgggagcctcagtctgtcgggctgaggtctggcatctacaaagcctcttggccgtgttctgaacttgaagcctggaggagttctctgctcagcacagccaaggaacagaattagaagaaaaggaaccctggcctgaggcaggtgacaaacattaccaccccagctgtgcacgatgcagcagatgcaaccagatgttcacagaaggagaggaaatgtatcttcaaggctccaccgtttggcatcccgactgtaagcaatctacgaagaccgaggaaaagctgcggcctaccaggacatcctcggaaagtatttattctaggccaggctccagtattcctggctcaccaggtcatactatctatgcaaaagtagacaatgagatcctggattacaaggatttagcagccattccgaaggtcaaggcaatttatgacattgaacgtccagatcttattacctatgagcctttctacacttcgggctatgatgacaaacaggagagacagagccttggagagtctccgaggactttgtctcctactccatcagcagaagggtaccaggatgttcgggatcggatgatccatcggtccacgagccagggctccatcaactcccctgtgtacagccgccacagctacactccaaccacgtcccgctctccccagcatttccacagacctgatcaaggaatcaacatttaccgaaagccacccatctacaaacagcatgctgccttggcagcccagagcaagtcctcagaagatatcatcaagttttccaagttcccagcagcccaggcaccagaccccagcgagacaccaaagattgagacggaccactggcctggtcccccctcatttgctgtcgtaggacctgacatgaaacgcagatctagtggcagagaggaagatgatgaggaacttctgagacgtcggcagcttcaagaagagcaattaatgaagcttaactcaggcctgggacagttgatcttgaaagcaaatgtttagaagaattccttttgaaaagctgtgtcgtgttccctgtgaaactgagcaggtgtgtgttggcgcgctaagtgccacatgcttgtgtgtagaggaggaggtggccctgccggctccgcgctgctgtgcctgtgatccctacctgctccccgctcctgttgccagcagcactcactgcactcctttgtcatatactctgcatcactgtcatactcacaacttcgtgaataaagttgtgtgctttattcgta

SEQ ID NO: 333744 - DNA, 1421 bp, Homo sapiens
aagaaaaattgaggccgggcgcggtggctcacgcctgtaatcccagcactttgggagagagcgtgcctgcccgccgcacacggggctggtttccggagtgcgtctctagagggatgcacgttgccttagccgagcttcggagagaagcctgatatgtaacccaggcaggtgggagcctcagtctgtcgggctgaggtctggcatctacaaagcctcttggccgtgttctgaacttgaagcctggaggagttctctgctcagcacagccaaggaacagaattagaagaaaaggaaccctggcctgaggcaggtgacaaacattaccaccccagctgtgcacgatgcagcagatgcaaccagatgttcacagaaggagaggaaatgtatcttcaaggctccaccgtttggcatcccgactgtaagcaatctacgaagaccgaggaaaagctgcggcctaccaggacatcctcggaaagtatttattctaggccaggctccagtattcctggctcaccaggtcatactatctatgcaaaagtagacaatgagatcctggattacaaggatttagcagccattccgaaggtcaaggcaatttatgacattgaacgtccagatcttattacctatgagcctttctacacttcgggctatgatgacaaacaggagagacagagccttggagagtctccgaggactttgtctcctactccatcagcagaagggtaccaggatgttcgggatcggatgatccatcggtccacgagccagggctccatcaactcccctgtgtacagccgccacagctacactccaaccacgtcccgctctccccagcatttccacagacctgatcaaggaatcaacatttaccgaaagccacccatctacaaacagcatgctgccttggcagcccagagcaagtcctcagaagatatcatcaagttttccaagttcccagcagcccaggcaccagaccccagcgagacaccaaagattgagacggaccactggcctggtcccccctcatttgctgtcgtaggacctgacatgaaacgcagatctagtggcagagaggaagatgatgaggaacttctgagacgtcggcagcttcaagaagagcaattaatgaagcttaactcaggcctgggacagttgatcttgaaagaagagatggagaaagagagccgggaaaggtcatctctgttagccagtcgctacgattctcccatcaactcagcttcacatattccatcatctaaaactgcatctctccctggctatggaagaaatgggcttcaccggcctgtttctaccgacttcgctcagtataacagctatggggatgtcagcgggggagtgcgagattaccgacactcccagatagccacagcctgcgaacctatgagggatcctctaga

SEQ ID NO: 333745 - DNA, 1085 bp, Homo sapiens
aagaaaaattgaggccgggcgcggtggctcacgcctgtaatcccagcactttgggagagagcgtgcctgcccgccgcacacggggctggtttccggagtgcgtctctagagggatgcacgttgccttagccgagcttcggagagaagcctgatatgtaacccaggcaggtgggagcctcagtctgtcgggctgaggtctggcatctacaaagcctcttggccgtgttctgaacttgaagcctggaggagttctctgctcagcacagccaaggaacagaattagaagaaaaggaaccctggcctgaggcaggtgacaaacattaccaccccagctgtgcacgatgcagcagatgcaaccagatgttcacagaaggagaggaaatgtatcttcaaggctccaccgtttggcatcccgactgtaagcaatctacgaagaccgaggaaaagctgcggcctaccaggacatcctcggaaagtatttattctaggccaggctccagtattcctggctcaccaggtcatactatctatgcaaaagtagacaatgagatcctggattacaaggatttagcagccattccgaaggtcaaggcaatttatgacattgaacgtccagatcttattacctatgagcctttctacacttcgggctatgatgacaaacaggagagacagagccttggagagtctccgaggactttgtctcctactccatcagcagaagggtaccaggatgttcgggatcggatgatccatcggtccacgagccagggctccatcaactcccctgtgtacagccgccacagctacactccaaccacgtcccgctctccccagcatttccacagacctgtaagggtgactgttcctggattcactctatataacaaactatgtttctgtgattttttcccctactattgatagcacattgaaaaatcaacgactaaacatttccatccctctcccagagcaaaatgaaaactggtatccaactatattttatgctctatcttttcttgaaacatcagtcatcctaagcctgtgttcattttgatttattaaataattatattttgacagcg

SEQ ID NO: 333746 - DNA, 909 bp, Homo sapiens
ctcccagtgggtgtgcagacactggagagacccagtggcccaccctcaggaccctcaccacccatcagagaagcctgtcattcactgccataaatgtggggagccttgcaagggtgaagtgcttcgggtccagaccaaacatttccacatcaagtgtttcacctgcaaagtgtgtggctgtgacctggcacaagggggcttcttcataaagaacggagagtatctctgcaccctggactaccagcggatgtacgggacacgctgccatggctgtggggagttcgtggagggcgaagtggtgactgctctgggcaagacctaccatcccaattgctttgcttgtactatctgcaagcgcccgtttccacccggagaccgagtcacattcaatgggagagactgcctttgtcaactctgtgcacagccgatgtcgtccagtccgaaagaaaccaccttctccagcaattgtgccggctgcggaagagatatcaagaacgggcaggcgctgctggcgctggataagcagtggcacttggggtgctttaaatgcaagtcctgcgggaaggtcctcaccggggagtacatcagcaaggatggtgctccgtactgtgaaaaggactaccagggactctttggggtgaaatgtgaggcgtgtcaccagtttatcacagggaaagtcctggaggcaggtgacaaacattaccaccccagctgtgcacgatgcagcagatgcaaccagatgttcacagaaggagaggaaatgtatcttcaaggctccaccgtttggcatcccgactgtaagcaatctacgaagaccgaggaaaagctgcggttatgctggtacaccttgctgcgttctgtacatgaagaagttgaagctcaaggaagttaaaagaaaaagagaatgga

SEQ ID NO: 333747 - DNA, 368 bp, Homo sapiens
gcttctagcttgcaggctgggccttagtcctgcacataccaaagctgacgggcaggaagggcactctcgacaacccaagagacctaagtacccctcccagggaaatttcttttttctaatcgacatccctcccagcaccacacaccccgcccctgaaaggagatcatcagcccccacaatttgtcagagctgaagccagcccactacccacccccactacagcattgtgcttgggtctgggttctcagtaatgtagccatttgagaaacttacttggggacaaagtctcaatccttattttaaatgaaaaaagaaaagaaaagcataataaatttaaaagaaaaggctgagaaatgaaaaaaatcaaa

SEQ ID NO: 333748 - DNA, 2767 bp, Homo sapiens
tatttttttcagttttagaggattccattttgtgaatgtaccatgttttgttcaagtagtcctatattgatgaatagtctggttattgtcaattttgctattacaaaaaaagtactacagttaacaatgtgcattcatcatcttgtttttggcaagtgtatatttggtaaagattactagaagtacgattgccgctcggaaggtaaaacatatataattttgctagatagtctataaaattattaagtctaatattaatttactttgtttctcccatcagaaagaagccaacaaaacatataactgtgaaaatttaggtctcagtgaaatccctgacactctaccaaacacaacagaatttttggaattcagctttaattttttgcctacaattcacaatagaaccttcagcagactcatgaatcttacctttttggatttaactaggtgccagattaactggatacatgaagacacttttcaaagccatcatcaattaagcacacttgtgttaactggaaatcccctgatattcatggcagaaacatcgcttaatgggcccaagtcactgaagcatcttttcttaatccaaacgggaatatccaatctcgagtttattccagtgcacaatctggaaaacttggaaagcttgtatcttggaagcaaccatatttcctccattaagttccccaaagacttcccagcacggaatctgaaagtactggattttcagaataatgctatacactacatctctagagaagacatgaggtctctggagcaggccatcaacctaagcctgaacttcaatggcaataatgttaaaggtattgagcttggggcttttgattcaacggtcttccaaagtttgaactttggaggaactccaaatttgtctgttatattcaatggtctgcagaactctactactcagtctctctggctgggaacatttgaggacattgatgacgaagatattagttcagccatgctcaagggactctgtgaaatgtctgttgagagcctcaacctgcaggaacaccgcttctctgacatctcatccaccacatttcagtgcttcacccaactccaagaattggatctgacagcaactcacttgaaagggttaccctctgggatgaagggtctgaacttgctcaagaaattagttctcagtgtaaatcatttcgatcaattgtgtcaaatcagtgctgccaatttcccctcccttacacacctctacatcagaggcaacgtgaagaaacttcaccttggtgttggctgcttggagaaactaggaaaccttcagacacttgatttaagccataatgacatagaggcttctgactgctgcagtctgcaactcaaaaacctgtcccacttgcaaaccttaaacctgagccacaatgagcctcttggtctccagagtcaggcattcaaagaatgtcctcagctagaactcctcgatttggcatttacccgcttacacattaatgctccacaaagtcccttccaaaacctccatttccttcaggttctgaatctcacttactgcttccttgataccagcaatcagcatcttctagcaggcctaccagttctccggcatctcaacttaaaagggaatcactttcaagatgggactatcacgaagaccaacctacttcagactgtgggcagcttggaggttctgattttgtcctcttgtggtctcctctctatagaccagcaagcattccacagcttgggaaaaatgagccatgtagacttaagccacaacagcctgacatgcgacagcattgattctcttagccatcttaagggaatctacctcaatctggctgccaacagcattaacatcatctcaccccgtctcctccctatcttgtcccagcagagcaccattaatttaagtcataaccccctggactgcacttgctcgaatattcatttcttaacatggtacaaagaaaacctgcacaaacttgaaggctcggaggagaccacgtgtgcaaacccgccatctctaaggggagttaagctatctgatgtcaagctttcctgtgggattacagccataggcattttctttctcatagtatttctattattgttggctattctgctattttttgcagttaaataccttctcaggtggaaataccaacacatttagtgctgaaggtttccagagaaagcaaataagtgtgcttagcaaaattgctctaagtgaaagaactgtcatctgctggtgaccagaccagacttttcagattgcttcctggaactgggcagggactcactgtgcttttctgagcttcttactcctgtgagtcccagagctaaagaaccttctaggcaagtacaccgaatgactcagtccagagggtcagatgctgctgtgagaggcacagagccctttccgcatgtggaagagtgggaggaagcagagggagggactgggcagggactgccggccccggagtctcccacagggaggccattccccttctactcaccgacatccctcccagcaccacacaccccgcccctgaaaggagatcatcagcccccacaatttgtcagagctgaagccagcccactacccacccccactacagcattgtgcttgggtctgggttctcagtaatgtagccatttgagaaacttacttggggacaaagtctcaatccttattttaaatgaaaaaagaaaagaaaagcataataaatttaaaagaaaaggctgagaaatgaaaaaaatcaaa

SEQ ID NO: 333749 - DNA, 2720 bp, Homo sapiens
gctgagcagtcaacagcatttcttgttccaagatcacccttctgagtacctctctggctgccaaattgccagggccttcacagtttgattccatttctcagctccaagcattaggtaaacccaccaagcaatcctagcctgtgatggcgtttgacgtcagctgcttcttttgggtggtgctgttttctgccggctgtaaagtcatcacctcctgggatcagatgtgcattgagaaagaagccaacaaaacatataactgtgaaaatttaggtctcagtgaaatccctgacactctaccaaacacaacagaatttttggaattcagctttaattttttgcctacaattcacaatagaaccttcagcagactcatgaatcttacctttttggatttaactaggtgccagattaactggatacatgaagacacttttcaaagccatcatcaattaagcacacttgtgttaactggaaatcccctgatattcatggcagaaacatcgcttaatgggcccaagtcactgaagcatcttttcttaatccaaacgggaatatccaatctcgagtttattccagtgcacaatctggaaaacttggaaagcttgtatcttggaagcaaccatatttcctccattaagttccccaaagacttcccagcacggaatctgaaagtactggattttcagaataatgctatacactacatctctagagaagacatgaggtctctggagcaggccatcaacctaagcctgaacttcaatggcaataatgttaaaggtattgagcttggggcttttgattcaacggtcttccaaagtttgaactttggaggaactccaaatttgtctgttatattcaatggtctgcagaactctactactcagtctctctggctgggaacatttgaggacattgatgacgaagatattagttcagccatgctcaagggactctgtgaaatgtctgttgagagcctcaacctgcaggaacaccgcttctctgacatctcatccaccacatttcagtgcttcacccaactccaagaattggatctgacagcaactcacttgaaagggttaccctctgggatgaagggtctgaacttgctcaagaaattagttctcagtgtaaatcatttcgatcaattgtgtcaaatcagtgctgccaatttcccctcccttacacacctctacatcagaggcaacgtgaagaaacttcaccttggtgttggctgcttggagaaactaggaaaccttcagacacttgatttaagccataatgacatagaggcttctgactgctgcagtctgcaactcaaaaacctgtcccacttgcaaaccttaaacctgagccacaatgagcctcttggtctccagagtcaggcattcaaagaatgtcctcagctagaactcctcgatttggcatttacccgcttacacattaatgctccacaaagtcccttccaaaacctccatttccttcaggttctgaatctcacttactgcttccttgataccagcaatcagcatcttctagcaggcctaccagttctccggcatctcaacttaaaagggaatcactttcaagatgggactatcacgaagaccaacctacttcagactgtgggcagcttggaggttctgattttgtcctcttgtggtctcctctctatagaccagcaagcattccacagcttgggaaaaatgagccatgtagacttaagccacaacagcctgacatgcgacagcattgattctcttagccatcttaagggaatctacctcaatctggctgccaacagcattaacatcatctcaccccgtctcctccctatcttgtcccagcagagcaccattaatttaagtcataaccccctggactgcacttgctcgaatattcatttcttaacatggtacaaagaaaacctgcacaaacttgaaggctcggaggagaccacgtgtgcaaacccgccatctctaaggggagttaagctatctgatgtcaagctttcctgtgggattacagccataggcattttctttctcatagtatttctattattgttggctattctgctattttttgcagttaaataccttctcaggtggaaataccaacacatttagtgctgaaggtttccagagaaagcaaataagtgtgcttagcaaaattgctctaagtgaaagaactgtcatctgctggtgaccagaccagacttttcagattgcttcctggaactgggcagggactcactgtgcttttctgagcttcttactcctgtgagtcccagagctaaagaaccttctaggcaagtacaccgaatgactcagtccagagggtcagatgctgctgtgagaggcacagagccctttccgcatgtggaagagtgggaggaagcagagggagggactgggcagggactgccggccccggagtctcccacagggaggccattccccttctactcaccgacatccctcccagcaccacacaccccgcccctgaaaggagatcatcagcccccacaatttgtcagagctgaagccagcccactacccacccccactacagcattgtgcttgggtctgggttctcagtaatgtagccatttgagaaacttacttggggacaaagtctcaatccttattttaaatgaaaaaagaaaagaaaagcataataaatttaaaagaaaaggctgagaaatgaaaaaaatcaaa

SEQ ID NO: 333750 - DNA, 1668 bp, Homo sapiens
aaaaaaaaaaccccccccattgtgggggttttttgtgggtttttccccctttttttccccccggggccgggggtttaacggcacactttaaatggaagagaggttgtggctataacttgtggctgggaataataaagatggcaccgccaaggagcctcaccttgcgtgagtgagtactcagttgggcgctgcagggtctggagtctgtgtgagacgtgtgtgattgtgatgggtgcgaatcagcgtatagcacttgagaacaaggcagaccttggagcagaatggttatgtgaaggatcacatcacccatgggtagggggggaagtcatacgtcctggaggtgctggtcctcctcctggaactgccagccttgctaggactatcaacatcaacagcattgcctggtaaaccctactgtttgtgctccccactgtgtcccatgactggtgttaaaattctccctactttgatcatctgccctgcccaggccttgggctttatgccagcacagagctcaaaggccaggtagcagcacatcctcaagcatgagagctcaaagggttacatttgagtctctgtacctgcttggaagaaataaaaatacgtgtgaattccatctcatccatgaatagttacaaattcttgactagcattctgtccagttctttgccatttttacgtcttttttacaagggagattaaaatagctcctgactcagttacagctccctgcagtgttcagcactttaggggtgggagagacattctggagtccttcagtatatatatgtgtcagttaaactatggtgccgtgtttctatttcagggtttatccatgtgtattcccattgattcatgtctgattgaacctggcattgtatgtttacttttcttgatttttgctgtctgttggcagacctctttatttttcagccaaaacccaagagaggaaatatttgcgttacctaaaactatagcagaatcatccttatgggttgtgaaaaaggacgttggcctgtatgagttctaactcctagaatgagaaccaacccccgtcaggagctcacctcttcgggtgctggaggtcaacagtgaatgccccagttacccccacccctgtgacttagaaatgtaggaaataaagtgccctctgagatgcagctaatccagtcccagtaggaggcgctgaaaggactcaagtctggagtctgaagggccgtctggccaggatcaggtgcatagcttaacttttattcattcaacaaagatttaaggcttgctacttccaaggcactgttctaggtattaggggtgcagcagtaaacacaataggtgaatcagatgttaatacatctggccaggcacggtggttcacgcctgtaattccagcactttgggaggccgaggcgagtggatcacctgaggtcaggagttggagaccagcctggccaacatggtgaaaccccgtctctactaaaaatagaaaaattagctgggtgtggtggcacgtgcctgtaatcccagctactggggaggctgaggtaggagaattgcttgaaccaaggagacagaggttgcagtgagccgagatcacaccattgcactccagcctgggagacagagcgagactccatctcagaaaaaaaaaaaaaaaaaaaaaaaaagatg

SEQ ID NO: 333751 - DNA, 7692 bp, Homo sapiens
acgtgggacactctacggtggccgagaggatgccgcagatgtgttagcggcgagtccagaagcagccccaggaggtgctgggggcatcgtttctctaatctggcctcccgagtgccaaggaggcgtcccggcagcggtcatcatggtgaaggagcagttccgggagacggatgtggccaagaaaataagccacatctgttttggaatgaagtcacctgaggagatgcgccagcaggcgcacatccaagttgtgagtaagaacctgtacagccaggacaaccaacatgcccccttgctatatggggtgctcgaccataggatgggtacgagtgagaaggatcgtccatgtgaaacctgtgggaaaaacttggctgactgtctaggccactatgggtatatcgacctggagttgccgtgttttcatgtagggtacttcagagcagtcataggcatcttacagatgatctgcaaaacctgctgccacatcatgctgtcccaagaggagaagaagcagtttctggactatctaaagaggcccggcctgacctaccttcagaagcgaggactgaaaaagaaaatctctgacaagtgccggaagaaaaacatctgccatcactgtggcgcttttaatggtaccgtaaagaagtgtggactgctgaaaataattcatgagaaatacaagaccaacaaaaaagtggtggatcccattgtatcaaatttccttcagtcttttgaaacagccattgaacataataaagaagtggagcctctgctgggaagggcacaggaaaacttgaatcccttagtagttctgaatttatttaaacgaatcccagctgaagatgttcctctacttctgatgaacccagaagccggaaagccgtctgatttgattctcacacgacttttggtgcctcctttgtgtatcagaccctccgttgtgagtgatttgaagtctggcaccaatgaagatgatctgacaatgaaactgacagaaatcattttcctaaacgatgttattaaaaagcatcggatctcaggagccaagacccagatgatcatggaggactgggatttcctgcagctgcagtgtgccctctacattaacagtgagctctcgggcattcccctcaacatggcacccaagaagtggaccagaggcttcgtccaacgcctgaagggaaaacagggtcgatttagaggaaatctctcaggaaagagagtggatttttctggcagaacagtcatctcgcccgaccccaacctccggattgatgaggtagctgtgccagttcatgtggccaaaattctaacttttcctgagaaggtaaacaaagcaaacatcaatttcttgaggaaactggttcaaaacggccctgaggttcacccaggagcaaacttcattcagcagagacatacgcagatgaaaaggtttttgaaatacggaaatcgagaaaagatggctcaagagctcaagtatggtgacatcgtagagagacacctcatcgatggagatgtggtgctgttcaatcggcagccctcgctgcacaaattgagcattatggctcatctggccagggtcaagccccaccggaccttcagatttaatgagtgtgtctgtacaccctataatgctgactttgatggtgatgaaatgaaccttcatcttcctcaaacagaagaagctaaagcagaggcccttgttctgatggggactaaagcaaatcttgtaaccccgaggaatggggaaccgctgattgctgctattcaggattttctaacaggtgcctatctcctcactctcaaggacactttctttgatcgagccaaggcttgccaaatcattgcttcaatactggttggcaaggatgagaaaattaaagttcgcctcccaccgcctacaatcctaaagcctgtcaccctgtggacgggaaagcagatcttcagtgtcatcctcaggcctagcgatgacaatccagtgagggccaacctgcgaaccaagggcaagcagtactgtggcaaaggggaagatctctgtgccaatgattcctatgttacaatccagaacagtgagttgatgagtggcagcatggacaaaggaaccctagggtcaggatccaagaacaatattttttacattttgctgcgagactggggacagaatgaagctgcagatgccatgtcacggctcgccaggctggctcctgtctacctgtctaaccgtggtttctcaattgggatcggtgatgtcacacctggccaaggactgctgaaggccaagtatgagttgctgaatgccggctacaagaaatgtgatgagtacatcgaagccctgaacacgggcaagctgcagcagcagcctggctgcactgctgaggagaccctggaggcactgatcctgaaggagctgtctgtgatccgtgaccacgctggcagtgcctgcctccgggagctggacaagagcaacagccccctcaccatggctctgtgcggctccaaaggttccttcattaacatatcacagatgattgcctgtgtgggacagcaggccatcagtggctctcgagtgccagacggctttgaaaacaggtccttgcctcattttgaaaaacactcaaagctcccagctgccaaaggctttgtggctaatagcttttattccggtttgacaccaactgagtttttcttccacacaatggccggccgggaaggtctagtcgacacggctgtaaagacagctgaaacgggatacatgcagcgaaggcttgtcaaatctcttgaagatctttgctcccagtatgatctgacagtccgaagctctactggcgatattatccagttcatttatggaggagatggcttagatcctgcagctatggagggaaaagatgaacctttggagtttaaaagggttctggacaacatcaaagcagtcttcccgtgtcccagtgagcctgctctcagcaaaaacgagctgatcctgaccacagagtccatcatgaagaagagtgagttcctctgctgccaggacagcttcctgcaggaaataaaaaaattcattaagggggtctctgagaagatcaagaaaaccagagataaatatggcatcaatgataacggcacaacagagccccgtgtgctgtaccagctggaccgcatcacccccacccaagtagaaaagtttctggagacctgtagggacaagtacatgagggcacagatggagccaggttctgcagtgggtgctctgtgtgcccagagcattggtgagccaggcacccagatgaccctgaagactttccactttgcaggtgtggcctccatgaacatcaccctgggcgtgccccggattaaagagatcatcaacgcttccaaggccatcagcactccaattatcacagcacagctagacaaggatgacgacgcggattatgctcgcctcgtgaaagggagaattgagaaaaccctcttgggagagatttccgagtatattgaagaagtgtttcttcctgatgactgctttattctcgtcaagctctccctggaacggattaggcttctgagactggaagtgaacgctgagacagtgagatattccatctgcacatccaagctccgtgtgaagcccggtgatgtggctgttcatggtgaggctgtggtgtgtgtcacccccagagagaacagcaagagctccatgtactacgtgctgcagttcctgaaagaggatctccccaaggtggtggtgcagggcattccagaggtgtccagagctgtcatccacattgacgagcagagtggaaaggagaagtacaagcttctggtggaaggtgataacctgcgggcagtcatggccacacacggtgtgaagggcacccgaaccacctccaataacacctatgaggtggagaaaactctgggcatcgaggccgcccggacaacgatcatcaatgaaatccagtacaccatggtgaaccacggcatgagcatcgacaggaggcacgtgatgctgctctccgacctcatgacctacaagggtgaagtcctgggcatcactaggtttggcctggccaagatgaaggagagtgtgctgatgctggcctcctttgagaagacggctgaccatctctttgacgctgcctacttcgggcagaaggactctgtgtgtggggtgtctgagtgcatcatcatgggaatcccaatgaacattggaaccgggctcttcaagctgcttcacaaggctgacagggacccgaaccctcccaagaggcccctgatcttcgacacaaatgaattccacatcccccttgtcacatagtccaaagaaagaggggaccatgcctgaccttgactccttgtcctgtctccagctgatgtataaagagttttgtgctccctgggacgggggtcctgaggtccccacctatgccagcaatcagagaagccctcttggcatccccaggagcagcttctcctctgatagggtgcagctcacaccagtgaccctgactgtgccacgctgctcgggagagctgagggttttattgtttgcttgcttgaaacctaatctatagacggccccacagctcgtgcacacactgcttccctggacttaaagcccagccaggtgtcatggtccatcccagctcactgcatacatccatcggctccccatggtgtcttcacacctgacgatgagccaggcctgagccccacacaggccagggcacattcttggattttccattccttggtcatgctggaatctctcaatgtgacatacttatgtaaatattgttactattatttatttgttccatttgagggatttggaatttttgttattttagttttatttttgaaaccaagcatctatagaaaccaagaaagtcagcatgtaagcgtcactggaaaaactggtttaagcaaatagagccgtctgggatttgtaactgaggtgcaactgtcatgaggcccaggcagctctgtaacatcttctatagatgcccctggctaccctgttgttttcatctacctcagacccctatcatggggctctaccctgtgacaagagccaaacccattctccatggcctatggaagcctcactggagtttggggcctgctgcaatggggatgagatggttttttgtagaattatacttacgttccttggatgatctctagttgattttttaagttctgagttgatgctgttaaggtacccggggtagccattggttcttggatctgtgttagaatgagtgctttcccttcctactgatgtgattgtggattaggaattcgtgaccgagtgatttttggccagtggttgggtttaaaattctattaaaatttgtagtttgggctgggtgctgtggctcatacctataatcccagcactttgggaggccgaggggggcagatcacttgagcccaggagttcgagagcagcctgggcaacatgacgaaaccccgtctctacagagaatacaaaaattagccaggcatggtggcccatgcctgtagtacctgctattggtaaggctgaggtggaaggttcacttgagcctgggaggtggaggttgtagtgagccaagatcgtgccactacactccagcctgggcaacaaagcaagaccttgtctcaaaaaaaaaaaaagaaaaaaattaagcgtaaaaaaaaattagtttttataaaaaattatagtttgaccttttgatttccctgcatctacaaggtagacctattaacttctcttggggtatcagtgatgtggaaaaaaaatgccatttttcttaatgtttaacccccctttatctttgaattgagctagagcctggtttaggacaaaggattaagtttgttaatgaacactaattcagggcttctacttgagaccccaccgagatcaccagttctcatgtaacctgggaagagccataaaggggtaccccccaccccaactgccttcctggaagcatgcctgggaagtaagctgtaggcctgatccgagccaggaccactgggatccgtgcaaaggccaggggagggtagaattgaatcataggagtgaactccggcacctgttgtcttctgcgggtgacgcacactttaaatggaagagaggttgtggctataacttgtggctgggaataataaagatggcaccgccaaggagcctcaccttgcgtgagtgagtactcagttgggcgctgcagggtctggagtctgtgtgagacgtgtgtgattgtgatgggtgcgaatcagcgtatagcacttgagaacaaggcagaccttggagcagaatggttatgtgaaggatcacatcacccatgggtagggggggaagtcatacgtcctggaggtgctggtcctcctcctggaactgccagccttgctaggactatcaacatcaacagcattgcctggtaaaccctactgtttgtgctccccactgtgtcccatgactggtgttaaaattctccctactttgatcatctgccctgcccaggccttgggctttatgccagcacagagctcaaaggccaggtagcagcacatcctcaagcatgagagctcaaagggttacatttgagtctctgtacctgcttggaagaaataaaaatacgtgtgaattccatctcatccatgaatagttacaaattcttgactagcattctgtccagttctttgccatttttacgtcttttttacaagggagattaaaatagctcctgactcagttacagctccctgcagtgttcagcactttaggggtgggagagacattctggagtccttcagtatatatatgtgtcagttaaactatggtgccgtgtttctatttcagggtttatccatgtgtattcccattgattcatgtctgattgaacctggcattgtatgtttacttttcttgatttttgctgtctgttggcagacctctttatttttcagccaaaacccaagagaggaaatatttgcgttacctaaaactatagcagaatcatccttatgggttgtgaaaaaggacgttggcctgtatgagttctaactcctagaatgagaaccaacccccgtcaggagctcacctcttcgggtgctggaggtcaacagtgaatgccccagttacccccacccctgtgacttagaaatgtaggaaataaagtgccctctgagatgcagctaatccagtcccagtaggaggcgctgaaaggactcaagtctggagtctgaagggccgtctggccaggatcaggtgcatagcttaacttttattcattcaacaaagatttaaggcttgctacttccaaggcactgttctaggtattaggggtgcagcagtaaacacaataggtgaatcagatgttaatacatctggccaggcacggtggttcacgcctgtaattccagcactttgggaggccgaggcgagtggatcacctgaggtcaggagttggagaccagcctggccaacatggtgaaaccccgtctctactaaaaatagaaaaattagctgggtgtggtggcacgtgcctgtaatcccagctactggggaggctgaggtaggagaattgcttgaaccaaggagacagaggttgcagtgagccgagatcacaccattgcactccagcctgggagacagagcgagactccatctcagaaaaaaaaaaaaaaaaaaaaaaaaagatg

SEQ ID NO: 333752 - DNA, 6271 bp, Homo sapiens
acgtgggacactctacggtggccgagaggatgccgcagatgtgttagcggcgagtccagaagcagccccaggaggtgctgggggcatcgtttctctaatctggcctcccgagtgccaaggaggcgtcccggcagcggtcatcatggtgaaggagcagttccgggagacggatgtggccaagaaaataagccacatctgttttggaatgaagtcacctgaggagatgcgccagcaggcgcacatccaagttgtgagtaagaacctgtacagccaggacaaccaacatgcccccttgctatatggggtgctcgaccataggatgggtacgagtgagaaggatcgtccatgtgaaacctgtgggaaaaacttggctgactgtctaggccactatgggtatatcgacctggagttgccgtgttttcatgtagggtacttcagagcagtcataggcatcttacagatgatctgcaaaacctgctgccacatcatgctgtcccaagaggagaagaagcagtttctggactatctaaagaggcccggcctgacctaccttcagaagcgaggactgaaaaagaaaatctctgacaagtgccggaagaaaaacatctgccatcactgtggcgcttttaatggtaccgtaaagaagtgtggactgctgaaaataattcatgagaaatacaagaccaacaaaaaagtggtggatcccattgtatcaaatttccttcagtcttttgaaacagccattgaacataataaagaagtggagcctctgctgggaagggcacaggaaaacttgaatcccttagtagttctgaatttatttaaacgaatcccagctgaagatgttcctctacttctgatgaacccagaagccggaaagccgtctgatttgattctcacacgacttttggtgcctcctttgtgtatcagaccctccgttgtgagtgatttgaagtctggcaccaatgaagatgatctgacaatgaaactgacagaaatcattttcctaaacgatgttattaaaaagcatcggatctcaggagccaagacccagatgatcatggaggactgggatttcctgcagctgcagtgtgccctctacattaacagtgagctctcgggcattcccctcaacatggcacccaagaagtggaccagaggcttcgtccaacgcctgaagggaaaacagggtcgatttagaggaaatctctcaggaaagagagtggatttttctggcagaacagtcatctcgcccgaccccaacctccggattgatgaggtagctgtgccagttcatgtggccaaaattctaacttttcctgagaaggtaaacaaagcaaacatcaatttcttgaggaaactggttcaaaacggccctgaggttcacccaggagcaaacttcattcagcagagacatacgcagatgaaaaggtttttgaaatacggaaatcgagaaaagatggctcaagagctcaagtatggtgacatcgtagagagacacctcatcgatggagatgtggtgctgttcaatcggcagccctcgctgcacaaattgagcattatggctcatctggccagggtcaagccccaccggaccttcagatttaatgagtgtgtctgtacaccctataatgctgactttgatggtgatgaaatgaaccttcatcttcctcaaacagaagaagctaaagcagaggcccttgttctgatggggactaaagcaaatcttgtaaccccgaggaatggggaaccgctgattgctgctattcaggattttctaacaggtgcctatctcctcactctcaaggacactttctttgatcgagccaaggcttgccaaatcattgcttcaatactggttggcaaggatgagaaaattaaagttcgcctcccaccgcctacaatcctaaagcctgtcaccctgtggacgggaaagcagatcttcagtgtcatcctcaggcctagcgatgacaatccagtgagggccaacctgcgaaccaagggcaagcagtactgtggcaaaggggaagatctctgtgccaatgattcctatgttacaatccagaacagtgagttgatgagtggcagcatggacaaaggaaccctagggtcaggatccaagaacaatattttttacattttgctgcgagactggggacagaatgaagctgcagatgccatgtcacggctcgccaggctggctcctgtctacctgtctaaccgtggtttctcaattgggatcggtgatgtcacacctggccaaggactgctgaaggccaagtatgagttgctgaatgccggctacaagaaatgtgatgagtacatcgaagccctgaacacgggcaagctgcagcagcagcctggctgcactgctgaggagaccctggagcgaaggcttgtcaaatctcttgaagatctttgctcccagtatgatctgacagtccgaagctctactggcgatattatccagttcatttatggaggagatggcttagatcctgcagctatggagggaaaagatgaacctttggagtttaaaagggttctggacaacatcaaagcagtcttcccgtgtcccagtgagcctgctctcagcaaaaacgagctgatcctgaccacagagtccatcatgaagaagagtgagttcctctgctgccaggacagcttcctgcaggaaataaaaaaattcattaagggggtctctgagaagatcaagaaaaccagagataaatatggcatcaatgataacggcacaacagagccccgtgtgctgtaccagctggaccgcatcacccccacccaagtagaaaagtttctggagacctgtagggacaagtacatgagggcacagatggagccaggttctgcagtgggtgctctgtgtgcccagagcattggtgagccaggcacccagatgaccctgaagactttccactttgcaggtgtggcctccatgaacatcaccctgggcgtgccccggattaaagagatcatcaacgcttccaaggccatcagcactccaattatcacagcacagctagacaaggatgacgacgcggattatgctcgcctcgtgaaagggagaattgagaaaaccctcttgggagagatttccgagtatattgaagaagtgtttcttcctgatgactgctttattctcgtcaagctctccctggaacggattaggcttctgagactggaagtgaacgctgagacagtgagatattccatctgcacatccaagctccgtgtgaagcccggtgatgtggctgttcatggtgaggctgtggtgtgtgtcacccccagagagaacagcaagagctccatgtactacgtgctgcagttcctgaaagaggatctccccaaggtggtggtgcagggcattccagaggtgtccagagctgtcatccacattgacgagcagagtggaaaggagaagtacaagcttctggtggaaggtgataacctgcgggcagtcatggccacacacggtgtgaagggcacccgaaccacctccaataacacctatgaggtggagaaaactctgggcatcgaggccgcccggacaacgatcatcaatgaaatccagtacaccatggtgaaccacggcatgagcatcgacaggaggcacgtgatgctgctctccgacctcatgacctacaagggtgaagtcctgggcatcactaggtttggcctggccaagatgaaggagagtgtgctgatgctggcctcctttgagaagacggctgaccatctctttgacgctgcctacttcgggcagaaggactctgtgtgtggggtgtctgagtgcatcatcatgggaatcccaatgaacattggaaccgggctcttcaagctgcttcacaaggctgacagggacccgaaccctcccaagaggcccctgatcttcgacacaaatgaattccacatcccccttgtcacatagtccaaagaaagaggggaccatgcctgaccttgactccttgtcctgtctccagctgatgtataaagagttttgtgctccctgggacgggggtcctgaggtccccacctatgccagcaatcagagaagccctcttggcatccccaggagcagcttctcctctgatagggtgcagctcacaccagtgaccctgactgtgccacgctgctcgggagagctgagggttttattgtttgcttgcttgaaacctaatctatagacggccccacagctcgtgcacacactgcttccctggacttaaagcccagccaggtgtcatggtccatcccagctcactgcatacatccatcggctccccatggtgtcttcacacctgacgatgagccaggcctgagccccacacaggccagggcacattcttggattttccattccttggtcatgctggaatctctcaatgtgacatacttatgtaaatattgttactattatttatttgttccatttgagggatttggaatttttgttattttagttttatttttgaaaccaagcatctatagaaaccaagaaagtcagcatgtaagcgtcactggaaaaactggtttaagcaaatagagccgtctgggatttgtaactgaggtgcaactgtcatgaggcccaggcagctctgtaacatcttctatagatgcccctggctaccctgttgttttcatctacctcagacccctatcatggggctctaccctgtgacaagagccaaacccattctccatggcctatggaagcctcactggagtttggggcctgctgcaatggggatgagatggttttttgtagaattatacttacgttccttggatgatctctagttgattttttaagttctgagttgatgctgttaaggtacccggggtagccattggttcttggatctgtgttagaatgagtgctttcccttcctactgatgtgattgtggattaggaattcgtgaccgagtgatttttggccagtggttgggtttaaaattctattaaaatttgtagtttgggctgggtgctgtggctcatacctataatcccagcactttgggaggccgaggggggcagatcacttgagcccaggagttcgagagcagcctgggcaacatgacgaaaccccgtctctacagagaatacaaaaattagccaggcatggtggcccatgcctgtagtacctgctattggtaaggctgaggtggaaggttcacttgagcctgggaggtggaggttgtagtgagccaagatcgtgccactacactccagcctgggcaacaaagcaagaccttgtctcaaaaaaaaaaaaagaaaaaaattaagcgtaaaaaaaaattagtttttataaaaaattatagtttgaccttttgatttccctgcatctacaaggtagacctattaacttctcttggggtatcagtgatgtggaaaaaaaatgccatttttcttaatgtttaacccccctttatctttgaattgagctagagcctggtttaggacaaaggattaagtttgttaatgaacactaattcagggcttctacttgagaccccaccgagatcaccagttctcatgtaacctgggaagagccataaaggggtaccccccaccccaactgccttcctggaagcatgcctgggaagtaagctgtaggcctgatccgagccaggaccactgggatccgtgcaaaggccaggggagggtagaattgaatcataggagtgaactccggcacctgttgtcttctgcgggtgacgcacactttaaatggaagagaggttgtggctataacttgtggctgggaataataaagatggcaccgccaaggagcctcaccttgcgtgagtgagtactcagttgggcgctgcagggtctggagtctgtgtgagacgtgtgtgattgtgatgggtgcgaatcagcgtatagcacttgagaacaaggcagaccttggagcagaatggttatgtgaaggatcacatcacccatgggtagggggggaagtcatacgtcctggaggtgctggtcctcctcctggaactgccagccttgctaggactatcaacatcaacagcattgcctggtaaaccctactgtttgtgctccccactgtgtcccatgactggtgttaaaattctccctactttgatcatctgccctgcccaggccttgggctttatgccagcacagagctcaaaggccaggtagcagcacatcctcaagcatgagagctcaaagggttacatttgagtctctgtacctgcttggaagaaataaaaatacgtgtgaattcca

SEQ ID NO: 333753 - DNA, 6570 bp, Homo sapiens
acgtgggacactctacggtggccgagaggatgccgcagatgtgttagcggcgagtccagaagcagccccaggaggtgctgggggcatcgtttctctaatctggcctcccgagtgccaaggaggcgtcccggcagcggtcatcatggtgaaggagcagttccgggagacggatgtggccaagaaaataagccacatctgttttggaatgaagtcacctgaggagatgcgccagcaggcgcacatccaagttgtgagtaagaacctgtacagccaggacaaccaacatgcccccttgctatatggggtgctcgaccataggatgggtacgagtgagaaggatcgtccatgtgaaacctgtgggaaaaacttggctgactgtctaggccactatgggtatatcgacctggagttgccgtgttttcatgtagggtacttcagagcagtcataggcatcttacagatgatctgcaaaacctgctgccacatcatgctgtcccaagaggagaagaagcagtttctggactatctaaagaggcccggcctgacctaccttcagaagcgaggactgaaaaagaaaatctctgacaagtgccggaagaaaaacatctgccatcactgtggcgcttttaatggtaccgtaaagaagtgtggactgctgaaaataattcatgagaaatacaagaccaacaaaaaagtggtggatcccattgtatcaaatttccttcagtcttttgaaacagccattgaacataataaagaagtggagcctctgctgggaagggcacaggaaaacttgaatcccttagtagttctgaatttatttaaacgaatcccagctgaagatgttcctctacttctgatgaacccagaagccggaaagccgtctgatttgattctcacacgacttttggtgcctcctttgtgtatcagaccctccgttgtgagtgatttgaagtctggcaccaatgaagatgatctgacaatgaaactgacagaaatcattttcctaaacgatgttattaaaaagcatcggatctcaggagccaagacccagatgatcatggaggactgggatttcctgcagctgcagtgtgccctctacattaacagtgagctctcgggcattcccctcaacatggcacccaagaagtggaccagaggcttcgtccaacgcctgaagggaaaacagggtcgatttagaggaaatctctcaggaaagagagtggatttttctggcagaacagtcatctcgcccgaccccaacctccggattgatgaggtagctgtgccagttcatgtggccaaaattctaacttttcctgagaaggtaaacaaagcaaacatcaatttcttgaggaaactggttcaaaacggccctgaggttcacccaggagcaaacttcattcagcagagacatacgcagatgaaaaggtttttgaaatacggaaatcgagaaaagatggctcaagagctcaagtatggtgacatcgtagagagacacctcatcgatggagatgtggtgctgttcaatcggcagccctcgctgcacaaattgagcattatggctcatctggccagggtcaagccccaccggaccttcagatttaatgagtgtgtctgtacaccctataatgctgactttgatggtgatgaaatgaaccttcatcttcctcaaacagaagaagctaaagcagaggcccttgttctgatggggactaaagcaaatcttgtaaccccgaggaatggggaaccgctgattgctgctattcaggattttctaacaggtgcctatctcctcactctcaaggacactttctttgatcgagccaaggcttgccaaatcattgcttcaatactggttggcaaggatgagaaaattaaagttcgcctcccaccgcctacaatcctaaagcctgtcaccctgtggacgggaaagcagatcttcagtgtcatcctcaggcctagcgatgacaatccagtgagggccaacctgcgaaccaagggcaagcagtactgtggcaaaggggaagatctctgtgccaatgattcctatgttacaatccagaacagtgagttgatgagtggcagcatggacaaaggaaccctagggtcaggatccaagaacaatattttttacattttgctgcgagactggggacagaatgaagctgcagatgccatgtcacggctcgccaggctggctcctgtctacctgtctaaccgtggtttctcaattgggatcggtgatgtcacacctggccaaggactgctgaaggccaagtatgagttgctgaatgccggctacaagaaatgtgatgagtacatcgaagccctgaacacgggcaagctgcagcagcagcctggctgcactgctgaggagaccctggaggcactgatcctgaaggagctgtctgtgatccgtgaccacgctggcagtgcctgcctccgggagctggacaagagcaacagccccctcaccatggctctgtgcggctccaaaggttccttcattaacatatcacagatgattgcctgtgtgggacagcaggccatcagtggctctcgagtgccagacggctttgaaaacaggtccttgcctcattttgaaaaacactcaaagctcccagctgccaaaggctttgtggctaatagcttttattccggtttgacaccaactgagtttttcttccacacaatggccggccgggaaggtctagtcgacacggctgtaaagacagctgaaacgggatacatgcagcgaaggcttgtcaaatctcttgaagatctttgctcccagtatgatctgacagtccgaagctctactggcgatattatccagttcatttatggaggagatggcttagatcctgcagctatggagggaaaagatgaacctttggagtttaaaagggttctggacaacatcaaagcagtcttcccgtgtcccagtgagcctgctctcagcaaaaacgagctgatcctgaccacagagtccatcatgaagaagagtgagttcctctgctgccaggacagcttcctgcaggaaataaaaaaattcattaagggggtctctgagaagatcaagaaaaccagagataaatatggcatcaatgataacggcacaacagagccccgtgtgctgtaccagctggaccgcatcacccccacccaagtagaaaagtttctggagacctgtagggacaagtacatgagggcacagatggagccaggttctgcagtgggtgctctgtgtgcccagagcattggtgagccaggcacccagatgaccctgaagactttccactttgcaggtgtggcctccatgaacatcaccctgggcgtgccccggattaaagagatcatcaacgcttccaaggccatcagcactccaattatcacagcacagctagacaaggatgacgacgcggattatgctcgcctgatgactgctttattctcgtcaagctctccctggaacggattaggcttctgagactggaagtgaacgctgagacagtgagatattccatctgcacatccaagctccgtgtgaagcccggtgatgtggctgttcatggtgaggctgtggtgtgtgtcacccccagagagaacagcaagagctccatgtactacgtgctgcagttcctgaaagaggatctccccaaggtggtggtgcagggcattccagaggtgtccagagctgtcatccacattgacgagcagagtggaaaggagaagtacaagcttctggtggaaggtgataacctgcgggcagtcatggccacacacggtgtgaagggcacccgaaccacctccaataacacctatgaggtggagaaaactctgggcatcgaggccgcccggacaacgatcatcaatgaaatccagtacaccatggtgaaccacggcatgagcatcgacaggaggcacgtgatgctgctctccgacctcatgacctacaagggtgaagtcctgggcatcactaggtttggcctggccaagatgaaggagagtgtgctgatgctggcctcctttgagaagacggctgaccatctctttgacgctgcctacttcgggcagaaggactctgtgtgtggggtgtctgagtgcatcatcatgggaatcccaatgaacattggaaccgggctcttcaagctgcttcacaaggctgacagggacccgaaccctcccaagaggcccctgatcttcgacacaaatgaattccacatcccccttgtcacatagtccaaagaaagaggggaccatgcctgaccttgactccttgtcctgtctccagctgatgtataaagagttttgtgctccctgggacgggggtcctgaggtccccacctatgccagcaatcagagaagccctcttggcatccccaggagcagcttctcctctgatagggtgcagctcacaccagtgaccctgactgtgccacgctgctcgggagagctgagggttttattgtttgcttgcttgaaacctaatctatagacggccccacagctcgtgcacacactgcttccctggacttaaagcccagccaggtgtcatggtccatcccagctcactgcatacatccatcggctccccatggtgtcttcacacctgacgatgagccaggcctgagccccacacaggccagggcacattcttggattttccattccttggtcatgctggaatctctcaatgtgacatacttatgtaaatattgttactattatttatttgttccatttgagggatttggaatttttgttattttagttttatttttgaaaccaagcatctatagaaaccaagaaagtcagcatgtaagcgtcactggaaaaactggtttaagcaaatagagccgtctgggatttgtaactgaggtgcaactgtcatgaggcccaggcagctctgtaacatcttctatagatgcccctggctaccctgttgttttcatctacctcagacccctatcatggggctctaccctgtgacaagagccaaacccattctccatggcctatggaagcctcactggagtttggggcctgctgcaatggggatgagatggttttttgtagaattatacttacgttccttggatgatctctagttgattttttaagttctgagttgatgctgttaaggtacccggggtagccattggttcttggatctgtgttagaatgagtgctttcccttcctactgatgtgattgtggattaggaattcgtgaccgagtgatttttggccagtggttgggtttaaaattctattaaaatttgtagtttgggctgggtgctgtggctcatacctataatcccagcactttgggaggccgaggggggcagatcacttgagcccaggagttcgagagcagcctgggcaacatgacgaaaccccgtctctacagagaatacaaaaattagccaggcatggtggcccatgcctgtagtacctgctattggtaaggctgaggtggaaggttcacttgagcctgggaggtggaggttgtagtgagccaagatcgtgccactacactccagcctgggcaacaaagcaagaccttgtctcaaaaaaaaaaaaagaaaaaaattaagcgtaaaaaaaaattagtttttataaaaaattatagtttgaccttttgatttccctgcatctacaaggtagacctattaacttctcttggggtatcagtgatgtggaaaaaaaatgccatttttcttaatgtttaacccccctttatctttgaattgagctagagcctggtttaggacaaaggattaagtttgttaatgaacactaattcagggcttctacttgagaccccaccgagatcaccagttctcatgtaacctgggaagagccataaaggggtaccccccaccccaactgccttcctggaagcatgcctgggaagtaagctgtaggcctgatccgagccaggaccactgggatccgtgcaaaggccaggggagggtagaattgaatcataggagtgaactccggcacctgttgtcttctgcgggtgacgcacactttaaatggaagagaggttgtggctataacttgtggctgggaataataaagatggcaccgccaaggagcctcaccttgcgtgagtgagtactcagttgggcgctgcagggtctggagtctgtgtgagacgtgtgtgattgtgatgggtgcgaatcagcgtatagcacttgagaacaaggcagaccttggagcagaatggttatgtgaaggatcacatcacccatgggtagggggggaagtcatacgtcctggaggtgctggtcctcctcctggaactgccagccttgctaggactatcaacatcaacagcattgcctggtaaaccctactgtttgtgctccccactgtgtcccatgactggtgttaaaattctccctactttgatcatctgccctgcccaggccttgggctttatgccagcacagagctcaaaggccaggtagcagcacatcctcaagcatgagagctcaaagggttacatttgagtctctgtacctgcttggaagaaataaaaatacgtgtgaattcca

SEQ ID NO: 333754 - DNA, 3249 bp, Homo sapiens
acgtgggacactctacggtggccgagaggatgccgcagatgtgttagcggcgagtccagaagcagccccaggaggtgctgggggcatcgtttctctaatctggcctcccgagtgccaaggaggcgtcccggcagcggtcatcatggtgaaggagcagttccgggagacggatgtggccaagaaaataagccacatctgttttggaatgaagtcacctgaggagatgcgccagcaggcgcacatccaagttgtgagtaagaacctgtacagccaggacaaccaacatgcccccttgctatatggggtgctcgaccataggatgggtacgagtgagaaggatcgtccatgtgaaacctgtgggaaaaacttggctgactgtctaggccactatgggtatatcgacctggagttgccgtgttttcatgtagggtacttcagagcagtcataggcatcttacagatgatctgcaaaacctgctgccacatcatgctgtcccaagaggagaagaagcagtttctggactatctaaagaggcccggcctgacctaccttcagaagcgaggactgaaaaagaaaatctctgacaagtgccggaagaaaaacatctgccatcactgtggcgcttttaatggtaccgtaaagaagtgtggactgctgaaaataattcatgagaaatacaagaccaacaaaaaagtggtggatcccattgtatcaaatttccttcagtcttttgaaacagccattgaacataataaagaagtggagcctctgctgggaagggcacaggaaaacttgaatcccttagtagttctgaatttatttaaacgaatcccagctgaagatgttcctctacttctgatgaacccagaagccggaaagccgtctgatttgattctcacacgacttttggtgcctcctttgtgtatcagaccctccgttgtgagtgatttgaagtctggcaccaatgaagatgatctgacaatgaaactgacagaaatcattttcctaaacgatgttattaaaaagcatcggatctcaggagccaagacccagatgatcatggaggactgggatttcctgcagctgcagtgtgccctctacattaacagtgagctctcgggcattcccctcaacatggcacccaagaagtggaccagaggcttcgtccaacgcctgaagggaaaacagggtcgatttagaggaaatctctcaggaaagagagtggatttttctggcagaacagtcatctcgcccgaccccaacctccggattgatgaggtagctgtgccagttcatgtggccaaaattctaacttttcctgagaaggtaaacaaagcaaacatcaatttcttgaggaaactggttcaaaacggccctgaggttcacccaggagcaaacttcattcagcagagacatacgcagatgaaaaggtttttgaaatacggaaatcgagaaaagatggctcaagagctcaagtatggtgacatcgtagagagacacctcatcgatggagatgtggtgctgttcaatcggcagccctcgctgcacaaattgagcattatggctcatctggccagggtcaagccccaccggaccttcagatttaatgagtgtgtctgtacaccctataatgctgactttgatggtgatgaaatgaaccttcatcttcctcaaacagaagaagctaaagcagaggcccttgttctgatggggactaaagcaaatcttgtaaccccgaggaatggggaaccgctgattgctgctattcaggattttctaacaggtgcctatctcctcactctcaaggacactttctttgatcgagccaaggcttgccaaatcattgcttcaatactggttggcaaggatgagaaaattaaagttcgcctcccaccgcctacaatcctaaagcctgtcaccctgtggacgggaaagcagatcttcagtgtcatcctcaggcctagcgatgacaatccagtgagggccaacctgcgaaccaagggcaagcagtactgtggcaaaggggaagatctctgtgccaatgattcctatgttacaatccagaacagtgagttgatgagtggcagcatggacaaaggaaccctagggtcaggatccaagaacaatattttttacattttgctgcgagactggggacagaatgaagctgcagatgccatgtcacggctcgccaggctggctcctgtctacctgtctaaccgtggtttctcaattgggatcggtgatgtcacacctggccaaggactgctgaaggccaagtatgagttgctgaatgccggctacaagaaatgtgatgagtacatcgaagccctgaacacgggcaagctgcagcagcagcctggctgcactgctgaggagaccctggaggcactgatcctgaaggagctgtctgtgatccgtgaccacgctggcagtgcctgcctccgggagctggacaagagcaacagccccctcaccatggctctgtgcggctccaaaggttccttcattaacatatcacagatgattgcctgtgtgggacagcaggccatcagtggctctcgagtgccagacggctttgaaaacaggtccttgcctcattttgaaaaacactcaaagctcccagctgccaaaggctttgtggctaatagcttttattccggtttgacaccaactgagtttttcttccacacaatggccggccgggaaggtctagtcgacacggctgtaaagacagctgaaacgggatacatgcagcgaaggcttgtcaaatctcttgaagatctttgctcccagtatgatctgacagtccgaagctctactggcgatattatccagttcatttatggaggagatggcttagatcctgcagctatggagggaaaagatgaacctttggagtttaaaagggttctggacaacatcaaagcagtcttcccgtgtcccagtgagcctgctctcagcaaaaacgagctgatcctgaccacagagtccatcatgaagaagagtgagttcctctgctgccaggacagcttcctgcagagctcggaggtggaactcgtgactgtgtatgggcacatgtgagtgcgtgtgtgtggacagccaggcttagtgtagacaacgtgtgaggctcagaccccaagtgctgactacacctatgcacatccacacctgcgtgtgaaagaagatgctagaaaagaacaaaaataacttaaaaaataaatccaataagatggctggaacataaa

SEQ ID NO: 333755 - DNA, 261 bp, Homo sapiens
aaaactagctctagtgtgttaacagatgaccactgctgaaagctggggtgatcaaggtgatcagcccagggcatggctcaccccgtcctcacagctttctctgtctctgaatccaggtggtggtgcagggcattccagaggtgtccagagctgtcatccacattgacgagcagagtggaaaggagaagtacaagcttctggtggaaggtgataacctgcgggcagtcatggccacacacggtgtgaagggcacccgaacca

SEQ ID NO: 333756 - DNA, 577 bp, Homo sapiens
gcatcaatgataacggcacaacagaggtaatatccctccaagacgcgttagaaccccgagctgtttgtagttgccgctggccctaactctgtgcttggcttgtattctcccagccccgtgtgctgtaccagctggaccgcatcacccccacccaagtagaaaagtttctggagacctgtagggacaagtacatgaggtagggatgcttttgtcttggactgacggtcatccacataggtctcacgtatcccttctgtttccccatgtgtacaaaaccctgcaccagctcacttgttaactgccagtatttgatcagattctgtcacattttctgtagggggtctgatgaattgccagtctgaatgctccaagataacggaaataattgcaaggaaatttcttagtgtcttctccccatggggaaactgctaacgaatatggcagatgccactgctctgtttgccatcagtaccattggttagcagactgcttagattttctgcatccattacatgctgaccacaagcagccatgcagaattgagttgcactgctgccccctctctgacctttacttt

SEQ ID NO: 333757 - DNA, 598 bp, Homo sapiens
ctctctgatgttcattctggttggtttcaggggtgtctgagtgcatcatcatgggaatcccaatgaacattggaaccgggctcttcaagctgcttcacaaggctgacagggacccgaaccctcccaagaggcccctgatcttcgacacaaatgaattccacatcccccttgtcacatagtccaaagaaagaggggaccatgcctgaccttgactccttgtcctgtctccagctgatgtataaagagttttgtgctccctgggacgggggtcctgaggtccccacctatgccagcaatcagagaagccctcttggcatccccaggagcagcttctcctctgatagggtgcagctcacaccagtgaccctgactgtgccacgctgctcgggagagctgagggttttattgtttgcttgcttgaaacctaatctatagacggccccacagctcgtgcacacactgcttccctggacttaaagcccagccaggtgtcatggtccatcccagctcactgcatacatccatcggctccccatggtgtcttcacacctgacgatgagccaggcctgagccccacacaggccagggcacattcttg

SEQ ID NO: 333758 - DNA, 6640 bp, Homo sapiens
acgtgggacactctacggtggccgagaggatgccgcagatgtgttagcggcgagtccagaagcagccccaggaggtgctgggggcatcgtttctctaatctggcctcccgagtgccaaggaggcgtcccggcagcggtcatcatggtgaaggagcagttccgggagacggatgtggccaagaaaataagccacatctgttttggaatgaagtcacctgaggagatgcgccagcaggcgcacatccaagttgtgagtaagaacctgtacagccaggacaaccaacatgcccccttgctatatggggtgctcgaccataggatgggtacgagtgagaaggatcgtccatgtgaaacctgtgggaaaaacttggctgactgtctaggccactatgggtatatcgacctggagttgccgtgttttcatgtagggtacttcagagcagtcataggcatcttacagatgatctgcaaaacctgctgccacatcatgctgtcccaagaggagaagaagcagtttctggactatctaaagaggcccggcctgacctaccttcagaagcgaggactgaaaaagaaaatctctgacaagtgccggaagaaaaacatctgccatcactgtggcgcttttaatggtaccgtaaagaagtgtggactgctgaaaataattcatgagaaatacaagaccaacaaaaaagtggtggatcccattgtatcaaatttccttcagtcttttgaaacagccattgaacataataaagaagtggagcctctgctgggaagggcacaggaaaacttgaatcccttagtagttctgaatttatttaaacgaatcccagctgaagatgttcctctacttctgatgaacccagaagccggaaagccgtctgatttgattctcacacgacttttggtgcctcctttgtgtatcagaccctccgttgtgagtgatttgaagtctggcaccaatgaagatgatctgacaatgaaactgacagaaatcattttcctaaacgatgttattaaaaagcatcggatctcaggagccaagacccagatgatcatggaggactgggatttcctgcagctgcagtgtgccctctacattaacagtgagctctcgggcattcccctcaacatggcacccaagaagtggaccagaggcttcgtccaacgcctgaagggaaaacagggtcgatttagaggaaatctctcaggaaagagagtggatttttctggcagaacagtcatctcgcccgaccccaacctccggattgatgaggtagctgtgccagttcatgtggccaaaattctaacttttcctgagaaggtaaacaaagcaaacatcaatttcttgaggaaactggttcaaaacggccctgaggttcacccaggagcaaacttcattcagcagagacatacgcagatgaaaaggtttttgaaatacggaaatcgagaaaagatggctcaagagctcaagtatggtgacatcgtagagagacacctcatcgatggagatgtggtgctgttcaatcggcagccctcgctgcacaaattgagcattatggctcatctggccagggtcaagccccaccggaccttcagatttaatgagtgtgtctgtacaccctataatgctgactttgatggtgatgaaatgaaccttcatcttcctcaaacagaagaagctaaagcagaggcccttgttctgatggggactaaagcaaatcttgtaaccccgaggaatggggaaccgctgattgctgctattcaggattttctaacaggtgcctatctcctcactctcaaggacactttctttgatcgagccaaggcttgccaaatcattgcttcaatactggttggcaaggatgagaaaattaaagttcgcctcccaccgcctacaatcctaaagcctgtcaccctgtggacgggaaagcagatcttcagtgtcatcctcaggcctagcgatgacaatccagtgagggccaacctgcgaaccaagggcaagcagtactgtggcaaaggggaagatctctgtgccaatgattcctatgttacaatccagaacagtgagttgatgagtggcagcatggacaaaggaaccctagggtcaggatccaagaacaatattttttacattttgctgcgagactggggacagaatgaagctgcagatgccatgtcacggctcgccaggctggctcctgtctacctgtctaaccgtggtttctcaattgggatcggtgatgtcacacctggccaaggactgctgaaggccaagtatgagttgctgaatgccggctacaagaaatgtgatgagtacatcgaagccctgaacacgggcaagctgcagcagcagcctggctgcactgctgaggagaccctggaggcactgatcctgaaggagctgtctgtgatccgtgaccacgctggcagtgcctgcctccgggagctggacaagagcaacagccccctcaccatggctctgtgcggctccaaaggttccttcattaacatatcacagatgattgcctgtgtgggacagcaggccatcagtggctctcgagtgccagacggctttgaaaacaggtccttgcctcattttgaaaaacactcaaagctcccagctgccaaaggctttgtggctaatagcttttattccggtttgacaccaactgagtttttcttccacacaatggccggccgggaaggtctagtcgacacggctgtaaagacagctgaaacgggatacatgcagcgaaggcttgtcaaatctcttgaagatctttgctcccagtatgatctgacagtccgaagctctactggcgatattatccagttcatttatggaggagatggcttagatcctgcagctatggagggaaaagatgaacctttggagtttaaaagggttctggacaacatcaaagcagtcttcccgtgtcccagtgagcctgctctcagcaaaaacgagctgatcctgaccacagagtccatcatgaagaagagtgagttcctctgctgccaggacagcttcctgcaggaaataaaaaaattcattaagggggtctctgagaagatcaagaaaaccagagataaatatggcatcaatgataacggcacaacagagccccgtgtgctgtaccagctggaccgcatcacccccacccaagtagaaaagtttctggagacctgtagggacaagtacatgagggcacagatggagccaggttctgcagtgggtgctctgtgtgcccagagcattggtgagccaggcacccagatgaccctgaagactttccactttgcaggtgtggcctccatgaacatcaccctgggcgtgccccggattaaagagatcatcaacgcttccaaggccatcagcactccaattatcacagcacagctagacaaggatgacgacgcggattatgctcgcctcgtgaaagggagaattgagaaaaccctcttgggagagatttccgagtatattgaagaagtgtttcttcctgatgactgctttattctcgtcaagctctccctggaacggattaggcttctgagactggaagtgaacgctgagacagtgagatattccatctgcacatccaagctccgtgtgaagcccggtgatgtggctgttcatggtgaggctgtggtgtgtgtcacccccagagagaacagcaagagctccatgtactacgtgctgcagttcctgaaagaggatctccccaaggtggtggtgcagggcattccagaggtgtccagagctgtcatccacattgacgagcagagtggaaaggagaagtacaagcttctggtggaaggtgataacctgcgggcagtcatggccacacacggtgtgaagggcacccgaaccacctccaataacacctatgaggtggagaaaactctgggcatcgaggccgcccggacaacgatcatcaatgaaatccagtacaccatggtgaaccacggcatgagcatcgacaggaggcacgtgatgctgctctccgacctcatgacctacaagggtgaagtcctgggcatcactaggtttggcctggccaagatgaaggagagtgtgctgatgctggcctcctttgagaagacggctgaccatctctttgacgctgcctacttcgggcagaaggactctgtgtgtggggtgtctgagtgcatcatcatgggaatcccaatgaacattggaaccgggctcttcaagctgcttcacaaggctgacagggacccgaaccctcccaagaggcccctgatcttcgacacaaatgaattccacatcccccttgtcacatagtccaaagaaagaggggaccatgcctgaccttgactccttgtcctgtctccagctgatgtataaagagttttgtgctccctgggacgggggtcctgaggtccccacctatgccagcaatcagagaagccctcttggcatccccaggagcagcttctcctctgatagggtgcagctcacaccagtgaccctgactgtgccacgctgctcgggagagctgagggttttattgtttgcttgcttgaaacctaatctatagacggccccacagctcgtgcacacactgcttccctggacttaaagcccagccaggtgtcatggtccatcccagctcactgcatacatccatcggctccccatggtgtcttcacacctgacgatgagccaggcctgagccccacacaggccagggcacattcttggattttccattccttggtcatgctggaatctctcaatgtgacatacttatgtaaatattgttactattatttatttgttccatttgagggatttggaatttttgttattttagttttatttttgaaaccaagcatctatagaaaccaagaaagtcagcatgtaagcgtcactggaaaaactggtttaagcaaatagagccgtctgggatttgtaactgaggtgcaactgtcatgaggcccaggcagctctgtaacatcttctatagatgcccctggctaccctgttgttttcatctacctcagacccctatcatggggctctaccctgtgacaagagccaaacccattctccatggcctatggaagcctcactggagtttggggcctgctgcaatggggatgagatggttttttgtagaattatacttacgttccttggatgatctctagttgattttttaagttctgagttgatgctgttaaggtacccggggtagccattggttcttggatctgtgttagaatgagtgctttcccttcctactgatgtgattgtggattaggaattcgtgaccgagtgatttttggccagtggttgggtttaaaattctattaaaatttgtagtttgggctgggtgctgtggctcatacctataatcccagcactttgggaggccgaggggggcagatcacttgagcccaggagttcgagagcagcctgggcaacatgacgaaaccccgtctctacagagaatacaaaaattagccaggcatggtggcccatgcctgtagtacctgctattggtaaggctgaggtggaaggttcacttgagcctgggaggtggaggttgtagtgagccaagatcgtgccactacactccagcctgggcaacaaagcaagaccttgtctcaaaaaaaaaaaaagaaaaaaattaagcgtaaaaaaaaattagtttttataaaaaattatagtttgaccttttgatttccctgcatctacaaggtagacctattaacttctcttggggtatcagtgatgtggaaaaaaaatgccatttttcttaatgtttaacccccctttatctttgaattgagctagagcctggtttaggacaaaggattaagtttgttaatgaacactaattcagggcttctacttgagaccccaccgagatcaccagttctcatgtaacctgggaagagccataaaggggtaccccccaccccaactgccttcctggaagcatgcctgggaagtaagctgtaggcctgatccgagccaggaccactgggatccgtgcaaaggccaggggagggtagaattgaatcataggagtgaactccggcacctgttgtcttctgcgggtgacgcacactttaaatggaagagaggttgtggctataacttgtggctgggaataataaagatggcaccgccaaggagcctcaccttgcgtgagtgagtactcagttgggcgctgcagggtctggagtctgtgtgagacgtgtgtgattgtgatgggtgcgaatcagcgtatagcacttgagaacaaggcagaccttggagcagaatggttatgtgaaggatcacatcacccatgggtagggggggaagtcatacgtcctggaggtgctggtcctcctcctggaactgccagccttgctaggactatcaacatcaacagcattgcctggtaaaccctactgtttgtgctccccactgtgtcccatgactggtgttaaaattctccctactttgatcatctgccctgcccaggccttgggctttatgccagcacagagctcaaaggccaggtagcagcacatcctcaagcatgagagctcaaagggttacatttgagtctctgtacctgcttggaagaaataaaaatacgtgtgaattcca

SEQ ID NO: 333759 - DNA, 6501 bp, Homo sapiens
acgtgggacactctacggtggccgagaggatgccgcagatgtgttagcggcgagtccagaagcagccccaggaggtgctgggggcatcgtttctctaatctggcctcccgagtgccaaggaggcgtcccggcagcggtcatcatggtgaaggagcagttccgggagacggatgtggccaagaaaataagccacatctgttttggaatgaagtcacctgaggagatgcgccagcaggcgcacatccaagttgtgagtaagaacctgtacagccaggacaaccaacatgcccccttgctatatggggtgctcgaccataggatgggtacgagtgagaaggatcgtccatgtgaaacctgtgggaaaaacttggctgactgtctaggccactatgggtatatcgacctggagttgccgtgttttcatgtagggtacttcagagcagtcataggcatcttacagatgatctgcaaaacctgctgccacatcatgctgtcccaagaggagaagaagcagtttctggactatctaaagaggcccggcctgacctaccttcagaagcgaggactgaaaaagaaaatctctgacaagtgccggaagaaaaacatctgccatcactgtggcgcttttaatggtaccgtaaagaagtgtggactgctgaaaataattcatgagaaatacaagaccaacaaaaaagtggtggatcccattgtatcaaatttccttcagtcttttgaaacagccattgaacataataaagaagtggagcctctgctgggaagggcacaggaaaacttgaatcccttagtagttctgaatttatttaaacgaatcccagctgaagatgttcctctacttctgatgaacccagaagccggaaagccgtctgatttgattctcacacgacttttggtgcctcctttgtgtatcagaccctccgttgtgagtgatttgaagtctggcaccaatgaagatgatctgacaatgaaactgacagaaatcattttcctaaacgatgttattaaaaagcatcggatctcaggagccaagacccagatgatcatggaggactgggatttcctgcagctgcagtgtgccctctacattaacagtgagctctcgggcattcccctcaacatggcacccaagaagtggaccagaggcttcgtccaacgcctgaagggaaaacagggtcgatttagaggaaatctctcaggaaagagagtggatttttctggcagaacagtcatctcgcccgaccccaacctccggattgatgaggtagctgtgccagttcatgtggccaaaattctaacttttcctgagaaggtaaacaaagcaaacatcaatttcttgaggaaactggttcaaaacggccctgaggttcacccaggagcaaacttcattcagcagagacatacgcagatgaaaaggtttttgaaatacggaaatcgagaaaagatggctcaagagctcaagtatggtgacatcgtagagagacacctcatcgatggagatgtggtgctgttcaatcggcagccctcgctgcacaaattgagcattatggctcatctggccagggtcaagccccaccggaccttcagatttaatgagtgtgtctgtacaccctataatgctgactttgatggtgatgaaatgaaccttcatcttcctcaaacagaagaagctaaagcagaggcccttgttctgatggggactaaagcaaatcttgtaaccccgaggaatggggaaccgctgattgctgctattcaggattttctaacaggtgcctatctcctcactctcaaggacactttctttgatcgagccaaggcttgccaaatcattgcttcaatactggttggcaaggatgagaaaattaaagttcgcctcccaccgcctacaatcctaaagcctgtcaccctgtggacgggaaagcagatcttcagtgtcatcctcaggcctagcgatgacaatccagtgagggccaacctgcgaaccaagggcaagcagtactgtggcaaaggggaagatctctgtgccaatgattcctatgttacaatccagaacagtgagttgatgagtggcagcatggacaaaggaaccctagggtcaggatccaagaacaatattttttacattttgctgcgagactggggacagaatgaagctgcagatgccatgtcacggctcgccaggctggctcctgtctacctgtctaaccgtggtttctcaattgggatcggtgatgtcacacctggccaaggactgctgaaggccaagtatgagttgctgaatgccggctacaagaaatgtgatgagtacatcgaagccctgaacacgggcaagctgcagcagcagcctggctgcactgctgaggagaccctggaggcactgatcctgaaggagctgtctgtgatccgtgaccacgctggcagtgcctgcctccgggagctggacaagagcaacagccccctcaccatggctctgtgcggctccaaaggttccttcattaacatatcacagatgattgcctgtgtgggacagcaggccatcagtggctctcgagtgccagacggctttgaaaacaggtccttgcctcattttgaaaaacactcaaagctcccagctgccaaaggctttgtggctaatagcttttattccggtttgacaccaactgagtttttcttccacacaatggccggccgggaaggtctagtcgacacggctgtaaagacagctgaaacgggatacatgcagcgaaggcttgtcaaatctcttgaagatctttgctcccagtatgatctgacagtccgaagctctactggcgatattatccagttcatttatggaggagatggcttagatcctgcagctatggagggaaaagatgaacctttggagtttaaaagggttctggacaacatcaaagcagtcttcccgtgtcccagtgagcctgctctcagcaaaaacgagctgatcctgaccacagagtccatcatgaagaagagtgagttcctctgctgccaggacagcttcctgcaggaaataaaaaaattcattaagggggtctctgagaagatcaagaaaaccagagataaatatggcatcaatgataacggcacaacagagccccgtgtgctgtaccagctggaccgcatcacccccacccaagtagaaaagtttctggagacctgtagggacaagtacatgagggcacagatggagccaggttctgcagtgggtgctctgtgtgcccagagcattggtgagccaggcacccagatgaccctgaagactttccactttgcaggtgtggcctccatgaacatcaccctgggcgtgccccggattaaagagatcatcaacgcttccaaggccatcagcactccaattatcacagcacagctagacaaggatgacgacgcggattatgctcgcctcgtgaaagggagaattgagaaaaccctcttgggagagatttccgagtatattgaagaagtgtttcttcctgatgactgctttattctcgtcaagctctccctggaacggattaggcttctgagactggaagtgaacgctgagacagtgagatattccatctgcacatccaagctccgtgtgaagcccggtgatgtggctgttcatggtgaggctgtggtgtgtgtcacccccagagagaacagcaagagctccatgtactacgtgctgcagttcctgaaagaggatctccccaaggtggtggtgcagggcattccagaggtgtccagagctgtcatccacattgacgagcagagtggaaaggagaagtacaagcttctggtggaaggtgataacctgcgggcagtcatggccacacacggtgtgaagggcacccgaaccacctccaataacacctatgaggtggagaaaactctgggcatcgaggccgcccggacaacgatcatcaatgaaatccagtacaccatggtgaaccacggcatgagcatcgacaggaggcacgtgatgctgctctccgacctcatgacctacaagggtgaagtcctgggcatcactaggtttggcctggccaagatgaaggagagtgtgctgatgctggcctcctttgagaagacggctgaccatctctttgacgctgcctacttcgggcagaaggactctgtgtgtggggtgtctgagtgcatcatcatgggaatcccaatgaacattggaaccgggctcttcaagctgcttcacaaggctgacagggacccgaaccctcccaagaggcccctgatcttcgacacaaatgaattccacatcccccttgtcacatagtccaagagcagcttctcctctgatagggtgcagctcacaccagtgaccctgactgtgccacgctgctcgggagagctgagggttttattgtttgcttgcttgaaacctaatctatagacggccccacagctcgtgcacacactgcttccctggacttaaagcccagccaggtgtcatggtccatcccagctcactgcatacatccatcggctccccatggtgtcttcacacctgacgatgagccaggcctgagccccacacaggccagggcacattcttggattttccattccttggtcatgctggaatctctcaatgtgacatacttatgtaaatattgttactattatttatttgttccatttgagggatttggaatttttgttattttagttttatttttgaaaccaagcatctatagaaaccaagaaagtcagcatgtaagcgtcactggaaaaactggtttaagcaaatagagccgtctgggatttgtaactgaggtgcaactgtcatgaggcccaggcagctctgtaacatcttctatagatgcccctggctaccctgttgttttcatctacctcagacccctatcatggggctctaccctgtgacaagagccaaacccattctccatggcctatggaagcctcactggagtttggggcctgctgcaatggggatgagatggttttttgtagaattatacttacgttccttggatgatctctagttgattttttaagttctgagttgatgctgttaaggtacccggggtagccattggttcttggatctgtgttagaatgagtgctttcccttcctactgatgtgattgtggattaggaattcgtgaccgagtgatttttggccagtggttgggtttaaaattctattaaaatttgtagtttgggctgggtgctgtggctcatacctataatcccagcactttgggaggccgaggggggcagatcacttgagcccaggagttcgagagcagcctgggcaacatgacgaaaccccgtctctacagagaatacaaaaattagccaggcatggtggcccatgcctgtagtacctgctattggtaaggctgaggtggaaggttcacttgagcctgggaggtggaggttgtagtgagccaagatcgtgccactacactccagcctgggcaacaaagcaagaccttgtctcaaaaaaaaaaaaagaaaaaaattaagcgtaaaaaaaaattagtttttataaaaaattatagtttgaccttttgatttccctgcatctacaaggtagacctattaacttctcttggggtatcagtgatgtggaaaaaaaatgccatttttcttaatgtttaacccccctttatctttgaattgagctagagcctggtttaggacaaaggattaagtttgttaatgaacactaattcagggcttctacttgagaccccaccgagatcaccagttctcatgtaacctgggaagagccataaaggggtaccccccaccccaactgccttcctggaagcatgcctgggaagtaagctgtaggcctgatccgagccaggaccactgggatccgtgcaaaggccaggggagggtagaattgaatcataggagtgaactccggcacctgttgtcttctgcgggtgacgcacactttaaatggaagagaggttgtggctataacttgtggctgggaataataaagatggcaccgccaaggagcctcaccttgcgtgagtgagtactcagttgggcgctgcagggtctggagtctgtgtgagacgtgtgtgattgtgatgggtgcgaatcagcgtatagcacttgagaacaaggcagaccttggagcagaatggttatgtgaaggatcacatcacccatgggtagggggggaagtcatacgtcctggaggtgctggtcctcctcctggaactgccagccttgctaggactatcaacatcaacagcattgcctggtaaaccctactgtttgtgctccccactgtgtcccatgactggtgttaaaattctccctactttgatcatctgccctgcccaggccttgggctttatgccagcacagagctcaaaggccaggtagcagcacatcctcaagcatgagagctcaaagggttacatttgagtctctgtacctgcttggaagaaataaaaatacgtgtgaattcca

SEQ ID NO: 333760 - DNA, 2154 bp, Homo sapiens
tacccctcaggctcttcccgagcagcgtggcacacgtcacgggtccacttggctgtgagctgcaccctatcagaggagaagctgctcctggggatgccaagacgggcttctcttgattgtctggcattaggtggggacctctaggacccccgtcctcagggaagctacaaaactctgttatacatcagctggagcacagggacaaggagtccaggcctgagccccacacaggccagggcacattcttggattttccattccttggtcatgctggaatctctcaatgtgacatacttatgtaaatattgttactattatttatttgttccatttgagggatttggaatttttgttattttagttttatttttgaaaccaagcatctatagaaaccaagaaagtcagcatgtaagcgtcactggaaaaactggtttaagcaaatagagccgtctgggatttgtaactgaggtgcaactgtcatgaggcccaggcagctctgtaacatcttctatagatgcccctggctaccctgttgttttcatctacctcagacccctatcatggggctctaccctgtgacaagagccaaacccattctccatggcctatggaagcctcactggagtttggggcctgctgcaatggggatgagatggttttttgtagaattatacttacgttccttggatgatctctagttgattttttaagttctgagttgatgctgttaaggtacccggggtagccattggttcttggatctgtgttagaatgagtgctttcccttcctactgatgtgattgtggattaggaattcgtgaccgagtgatttttggccagtggttgggtttaaaattctattaaaatttgtagtttgggctgggtgctgtggctcatacctataatcccagcactttgggaggccgaggggggcagatcacttgagcccaggagttcgagagcagcctgggcaacatgacgaaaccccgtctctacagagaatacaaaaattagccaggcatggtggcccatgcctgtagtacctgctattggtaaggctgaggtggaaggttcacttgagcctgggaggtggaggttgtagtgagccaagatcgtgccactacactccagcctgggcaacaaagcaagaccttgtctcaaaaaaaaaaaaagaaaaaaattaagcgtaaaaaaaaattagtttttataaaaaattatagtttgaccttttgatttccctgcatctacaaggtagacctattaacttctcttggggtatcagtgatgtggaaaaaaaatgccatttttcttaatgtttaacccccctttatctttgaattgagctagagcctggtttaggacaaaggattaagtttgttaatgaacactaattcagggcttctacttgagaccccaccgagatcaccagttctcatgtaacctgggaagagccataaaggggtaccccccaccccaactgccttcctggaagcatgcctgggaagtaagctgtaggcctgatccgagccaggaccactgggatccgtgcaaaggccaggggagggtagaattgaatcataggagtgaactccggcacctgttgtcttctgcgggtgacgcacactttaaatggaagagaggttgtggctataacttgtggctgggaataataaagatggcaccgccaaggagcctcaccttgcgtgagtgagtactcagttgggcgctgcagggtctggagtctgtgtgagacgtgtgtgattgtgatgggtgcgaatcagcgtatagcacttgagaacaaggcagaccttggagcagaatggttatgtgaaggatcacatcacccatgggtagggggggaagtcatacgtcctggaggtgctggtcctcctcctggaactgccagccttgctaggactatcaacatcaacagcattgcctggtaaaccctactgtttgtgctccccactgtgtcccatgactggtgttaaaattctccctactttgatcatctgccctgcccaggccttgggctttatgccagcacagagctcaaaggccaggtagcagcacatcctcaagcatgagagctcaaagggttacatttgagtctctgtacctgcttggaagaaataaaaatacgtgtgaattcca

SEQ ID NO: 333761 - DNA, 409 bp, Homo sapiens
cttttggtaagggaagccttggaaggatgtctgctgaaggtgcagagaaaatgcagagctccgttcaaggtgaaaaaagtggttgacaactggcagaaagaagctggccttagggaggaagtcagaagccagggtgctgtaccccttgggctgtgtgttaactcctgggtcactggatcatggggatgtccacagggtccctcgggggtgggttcttgacacccagggtggcagggacctgggccggtggctatttactaaggggtatgaatgtgtcccagcatgttaagatctagtggagctggactgatacctattggccgaatgtgacctctgcctgtttcaaaggtgtttaatcctgatgtctcataaattaagactcaggcctgtaatcccagcactttgggag

SEQ ID NO: 333762 - DNA, 100 bp, Homo sapiens
atgaaaaattcatactgataattatagatcagaatcatttaaagcccttatctccttcctcctctcatttccctaatcttaattctttcctctgaaaaaa

SEQ ID NO: 333763 - DNA, 761 bp, Homo sapiens
gtgcatcacagtctttctgcacttaggatcgctagacagcacttcagccgtgcacgtggggaccattttacacagcaccatccccaagaaaaaggacaaaaatatgaaaaacctggcactaaatggactgtgaaaaggacatttcttcacaaaatgacagttgaaacaggaagtcagagcgttgccttgttcagcctctgctagaaatgtgcttgtcggttgactcaaattttttgccgctctgtgcatgttggtgaatatctgcaaaaggactgtgggtcgggcgcagtgattcatgcctataatctcagcactctgagaggccgaggcgagagggttgattgaggccaggggttcaagaccagcctggtcaatgtagtaagattacatctccacaaaaaataaaaaactagctgggcctgttggcataagcctgtaatccctgcttctccagaggctgatgaggtagaatcccttgagctcaggagtttgaggctgcagtgagctatgactgcatcactgcactccagcctgggacacagagcaagaccctgtctgaacaaattaaaataaataaataaatagggcatggtggcttatgcctgtaatcccaacactgtgggaggctgaggcaggaggattatttaagccctggagtctgagactagcttggacaatgtagtgagacctctactctataaaacataaaaataaaaaataaaataaataatagccagtttgaaaaatgcttacccagtaag

SEQ ID NO: 333764 - DNA, 541 bp, Homo sapiens
tgtggggtctactggccacacctgatgtcaaagtacaacaggaggaggctgagtggggagccaggctggccgcttccactggccaggcagaacgaaggggcattccgaggaacctgaaccttggagtggctggggcgtgagcaagccagggtcctacggtgctgggtgcaacaggaaaacccagggctgatgggtgaggtttgaggctgacctcagtctcccgtctgtggaatggggacaagggccctgagacactgcagagcggctcagagaagcctcctgggccagtggttctggagaaacacagctgcctatggggtgaaggggaaagcagggctgcagagtcagcgccttccctgcgggcgggccagccacctcagctgcacccccaagtcgggggggtccctaaagctccagctcatgctctgggtgacacactgggtgtggagggcattgtccctgggccactcaatgaggacatccaggcagggccacagccatcgctaatgtcactaacgcacacccccacctagtgttcagc

SEQ ID NO: 333765 - DNA, 191 bp, Homo sapiens
aaaaacctgcacagctttgaggtggaaattttatgatattcaattgatatcatgattagttttaaaactatagagctagatcaactcagaattatcaagtagacagtttattgctctctctgtacccttccttcctggagaaatctcaagtacttactttcttcacacttttttttttttttttttttttt

SEQ ID NO: 333766 - DNA, 313 bp, Homo sapiens
ccatttgtttctagtttgttgagtttttaaaaaatcataaatggatgtcgaatttcagtaatagctcttccctttaaaatgtttacgtggcaaattttattgattgatttttcaacataagccaaatgtattggtgaatgtagtaactcattgctttttttaactagaattttccccattatgagtgaggttgagtatctttcttttagtgtgcttattggctatttggatatccagtttgtaaaatgcctgttcaagtcccctctccctttttacaaaatcaggttgcctgaccttctcgtattgatttata

SEQ ID NO: 333767 - DNA, 442 bp, Homo sapiens
aaaagaaaagaaaagaaaactgtcataactgtattactcaaatatttcctcttctctcatttgctaaaaatatatagtaaaactttcatgcctatttaaaacaatctctaggccgagtgcagtggctcatgcctgtaatcccagcattttgggaggttgaggcaggcggatcatgaggtcaatagatcgagaccatcctggccaacatggtgaaaccccgtttctactaaaaatacaaaagttagctgggcatggtggcgtgtgcctgtagtctcagctacttgggaggctgaggcaggagaatcgcttgaacccgggaggtggaggttgcagtgagccgagattgcgccactgcgcttcagcctggtgacagagcgagactctgtctcaaaaaaatgaatgaataaaacaatctgtagattgctatttttaagaaattgcg

SEQ ID NO: 333768 - DNA, 881 bp, Homo sapiens
tgcttctctcctcctgtcccatgtacaagccacacgtccttgagcacccgctatgcgcaggataacgtccttgcttctttagggcagtgacttttaaactttgttgacgataatctaaaaagaaatgcattttacatgagtgacccagcacatacatatagctagatattctgtatatttgactaaaacagaaattgtgcagaatgattttatccttactgcaggtgctacattctgatgctttctattacattcaattctgttttgttttacaaatgctggttgtactcacagcatggatttcatgatcccctgacatgatcctgatttcataatccagcgactcttagcccaggggcctttaaaaaactacgcctgcctggcttgacccccagaggttgtggtttcatttactgtcggattctgatgtgcggctgcagtttgagaaccactgcactaatgggtcatgatccacagtttaagaaactgtattactgtgatacgtaatacaaagaggaattgatcattcagtaagagccgtcaaatgcggacacaagagttatgaaggtgaagggagggagcagccacacccaactggttagatccaaaaagacctctgggagggaggggcaagctggagtttgagcaagatttaaagagggtagaatcatatagaaaggtgaactagacagaggacaaaggcagattcattcttgtacttactgaacctgtggctatggtactaaaataattttaataactggaacttcctctcacatacttgtggatactactctgttttatttttttgagagagtctcgccttgtcacccaggcaggaatgcaatggtgtgatctcagctcagtgcaagcttcgcctc

SEQ ID NO: 333769 - DNA, 1342 bp, Homo sapiens
agcgggcggggactggattgcttctgtctggcggcggcagcatggcggcgggggcggctgaggcagctgtagcggccgtggaggaggtcggctcagccgggcagtttgaggagctgctgcgcctcaaagccaagtccctccttgtggtccatttctgggcaccatgggctccacagtgtgcacagatgaacgaagttatggcagagttagctaaagaactccctcaagtttcatttgtgaagttggaagctgaaggtgttcctgaagtatctgaaaaatatgaaattagctctgttcccacttttctgtttttcaagaattctcagaaaatcgaccgattagatggtgcacatgccccagagttgaccaaaaaagttcagcgacatgcatctagtggctccttcctacccagcgctaatgaacatcttaaagaagatctcaaccttcgcttgaagaaattgactcatgctgccccctgcatgctgtttatgaaaggaactcctcaagaaccacgctgtggtttcagcaagcagatggtggaaattcttcacaaacataatattcagtttagcagttttgatatcttctcagatgaagaggttcgacagggactcaaagcctattccagttggcctacctatcctcagctctatgtttctggagagctcataggaggacttgatataattaaggagctagaagcatctgaagaactagatacaatttgtcccaaagctcccaaattagaggaaaggctcaaagtgctgacaaataaagcttctgtgatgctctttatgaaaggaaacaaacaggaagcaaaatgtggattcagcaaacaaattctggaaatactaaatagtactggtgttgaatatgaaacattcgatatattggaggatgaagaagttcggcaaggattaaaagcttactcaaattggccaacataccctcagctgtatgtgaaaggggagctggtgggaggattggatattgtgaaggaactgaaagaaaatggtgaattgctgcctatactgagaggagaaaattaataaatcttaaacttggtgcccaactattacggggtctggctctgtcacccaggctggagtgcagtggcacgattatggctcattgcagcctcgacttctcggggccaagcgatcctcctgcctcagccttctgagtagctgggaccacaggcgtgcaccaccatgcccacctaattttttatttcttgtagagatgaggtctcctgcctcagcctcccaaagtgctggaatttacaggtaggaccaccacacttggtccacttacttataataaacattgatttggtcgttca

SEQ ID NO: 333770 - DNA, 627 bp, Homo sapiens
caggcatgagccactgcacccagccttatttatttattttttaagagacagatttcaccatgttggtcaggctggtcttgaactcctggcctcaagtgatctgcccacctcggcctcccaaagtgctgggattacatttgtgagccaccacacctggccaagaataccttgttaaattttttaacctgatagtgtattcagggtttatggctcatttagtttgagagtgttaagagactggagttttaatccaataggtgtttcttttggttctcagatatacatacaagctgtgattgtttagatgtttccatctttttatatatgcatatacatattattattgttgttttttatttttaggaactgaaagaaaatggtgaattgctgcctatactgagaggagaaaattaataaatcttaaacttggtgcccaactattgtaagaaatatttaattacattgggagcagttcatgatttagtcctcagaaatggactaggaatagaaaattcctgctttctcagttacatgttttgtgtatttcacaatgtcgtgctaaataaatgtatgttacatttttttcccaccaaaaatagaatgcaataaacatcttcaaattattaa

SEQ ID NO: 333771 - DNA, 1262 bp, Homo sapiens
agcgggcggggactggattgcttctgtctggcggcggcagcatggcggcgggggcggctgaggcagctgtagcggccgtggaggaggtcggctcagccgggcagtttgaggagctgctgcgcctcaaagccaagtccctccttgtggtccatttctgggcaccatgggctccacagtgtgcacagatgaacgaagttatggcagagttagctaaagaactccctcaagtttcatttgtgaagttggaagctgaaggtgttcctgaagtatctgaaaaatatgaaattagctctgttcccacttttctgtttttcaagaattctcagaaaatcgaccgattagatggtgcacatgccccagagttgaccaaaaaagttcagcgacatgcatctagtggctccttcctacccagcgctaatgaacatcttaaagaagatctcaaccttcgcttgaagaaattgactcatgctgccccctgcatgctgtttatgaaaggaactcctcaagaaccacgctgtggtttcagcaagcagatggtggaaattcttcacaaacataatattcagtttagcagttttgatatcttctcagatgaagaggttcgacagggactcaaagcctattccagttggcctacctatcctcagctctatgtttctggagagctcataggaggacttgatataattaaggagctagaagcatctgaagaactagatacaatttgtcccaaagctcccaaattagaggaaaggctcaaagtgctgacaaataaagcttctgtgatgctctttatgaaaggaaacaaacaggaagcaaaatgtggattcagcaaacaaattctggaaatactaaatagtactggtgttgaatatgaaacattcgatatattggaggatgaagaagttcggcaaggattaaaagcttactcaaattggccaacataccctcagctgtatgtgaaaggggagctggtgggaggattggatattgtgaaggaactgaaagaaaatggtgaattgctgcctatactgagaggagaaaattaataaatcttaaacttggtgcccaactattgtaagaaatatttaattacattgggagcagttcatgatttagtcctcagaaatggactaggaatagaaaattcctgctttctcagttacatgttttgtgtatttcacaatgtcgtgctaaataaatgtatgttacatttttttcccaccaaaaatagaatgcaataaacatcttcaaattattaa

SEQ ID NO: 333772 - DNA, 2635 bp, Homo sapiens
agcgggcggggactggattgcttctgtctggcggcggcagcatggcggcgggggcggctgaggcagctgtagcggccgtggaggaggtcggctcagccgggcagtttgaggagctgctgcgcctcaaagccaagtccctccttgtggtccatttctgggcaccatgggctccacagtgtgcacagatgaacgaagttatggcagagttagctaaagaactccctcaagtttcatttgtgaagttggaagctgaaggtgttcctgaagtatctgaaaaatatgaaattagctctgttcccacttttctgtttttcaagaattctcagaaaatcgaccgattagatggtgcacatgccccagagttgaccaaaaaagttcagcgacatgcatctagtggctccttcctacccagcgctaatgaacatcttaaagaagatctcaaccttcgcttgaagaaattgactcatgctgccccctgcatgctgtttatgaaaggaactcctcaagaaccacgctgtggtttcagcaagcagatggtggaaattcttcacaaacataatattcagtttagcagttttgatatcttctcagatgaagaggttcgacagggactcaaagcctattccagttggcctacctatcctcagctctatgtttctggagagctcataggaggacttgatataattaaggagctagaagcatctgaagaactagatacaatttgtcccaaagctcccaaattagaggaaaggctcaaagtgctgacaaataaagcttctgtgatgctctttatgaaaggaaacaaacaggaagcaaaatgtggattcagcaaacaaattctggaaatactaaatagtactggtgttgaatatgaaacattcgatatattggaggatgaagaagttcggcaaggattaaaagcttactcaaattggccaacataccctcagctgtatgtgaaaggggagctggtgggaggattggatattgtgaaggaactgaaagaaaatggtgaattgctgcctatactgagaggagaaaattaataaatcttaaacttggtgcccaactattgtaagaaatatttaattacattgggagcagttcatgatttagtcctcagaaatggactaggaatagaaaattcctgctttctcagttacatgttttgtgtatttcacaatgtcgtgctaaataaatgtatgttacatttttttcccaccaaaaatagaatgcaataaacatcttcaaattattaacaataattgtatgaaaaaagtgtatctttacagcagtattaaacatacagctactataattaacccaccttaaatctctttttcttagtacatgagtatcttctagcagttaagaaaggcagtcttcagaaaatggagaactgtggcggaatgcagtacacaacagtatttaggacaactcctttgccaacacaatggctcccctcgctggtgaaagatctctttacagcttaggaaaaacaacggaaattagtttctgatgtcattgctgagctcggcactggttacattgcagaggcagtgtaggatgtctgcaggtttagagactcatttcacaaggcaccagtagtgaattatcaagaaacatttaagaggaaaatgatttctcattgaatatggtacaacaagcacttttttcataaggtctagaagaatgggtagtcatgacaaagaatggaaaagtattgtcatttgttgtaagcatcactacttttttttttttttcagacggggtctggctctgtcacccaggctggagtgcagtggcacgattatggctcattgcagcctcgacttctcggggccaagcgatcctcctgcctcagccttctgagtagctgggaccacaggcgtgcaccaccatgcccacctaattttttatttcttgtagagatgaggtctcctgcctcagcctcccaaagtgctggaatttacaggagtgtcggctgtgccccttgtgatggatgaggaaaggtatccacctttctgaatcagacacaagctgcagtagcttcctgatgcctcattcaccaggatgggtaactttaaagacaagttttataactggcatcccatctggtttcagagtcttgggggcttttttcatacagctttgtctgatatttagagacattcagattcagaagccatgagttcagttagctcatgggccgggcacgtgcactgactcactggctgcagcagaacacattgagggagtcttggtgcacttaggtcactgtaaggttctagggctgggagctgggatttgaaccaggatctgtcagcgcagccccagtgctgtgcttgaagcctcgtgccacactggctttgaggtagcacgctgcaagttagtgagtggagttgcccaagtctggggcttctgaaatgacctggtatttttatgttcctgttagaaatggtgtggctttcacaaattaagtgccaggctgggcacaatggctcgtgcttgtaatcccagcactttgggaggcggaggcaggcgggttgcttgagctccggagcttgagaccagcctgagcaacatggcgaaacctcatatctacaaaaaataaaaaattaactggtcatgg

SEQ ID NO: 333773 - DNA, 2348 bp, Homo sapiens
agcgggcggggactggattgcttctgtctggcggcggcagcatggcggcgggggcggctgaggcagctgtagcggccgtggaggaggtcggctcagccgggcagtttgaggagctgctgcgcctcaaagccaagtccctccttgtggtccatttctgggcaccatgggctccacagtgtgcacagatgaacgaagttatggcagagttagctaaagaactccctcaagtttcatttgtgaagttggaagctgaaggtgttcctgaagtatctgaaaaatatgaaattagctctgttcccacttttctgtttttcaagaattctcagaaaatcgaccgattagatggtgcacatgccccagagttgaccaaaaaagttcagcgacatgcatctagtggctccttcctacccagcgctaatgaacatcttaaagaagatctcaaccttcgcttgaagaaattgactcatgctgccccctgcatgctgtttatgaaaggaactcctcaagaaccacgctgtggtttcagcaagcagatggtggaaattcttcacaaacataatattcagtttagcagttttgatatcttctcagatgaagaggttcgacagggactcaaagcctattccagttggcctacctatcctcagctctatgtttctggagagctcataggaggacttgatataattaaggagctagaagcatctgaagaactagatacaatttgtcccaaagctcccaaattagaggaaaggctcaaagtgctgacaaataaagcttctgtgatgctctttatgaaaggaaacaaacaggaagcaaaatgtggattcagcaaacaaattctggaaatactaaatagtactggtgttgaatatgaaacattcgatatattggaggatgaagaagttcggcaaggattaaaagcttactcaaattggccaacataccctcagctgtatgtgaaaggggagctggtgggaggattggatattgtgaaggaactgaaagaaaatggtgaattgctgcctatactgagaggagaaaattaataaatcttaaacttggtgcccaactattgtaagaaatatttaattacattgggagcagttcatgatttagtcctcagaaatggactaggaatagaaaattcctgctttctcagttacatgttttgtgtatttcacaatgtcgtgctaaataaatgtatgttacatttttttcccaccaaaaatagaatgcaataaacatcttcaaattattaacaataattgtatgaaaaaagtgtatctttacagcagtattaaacatacagctactataattaacccaccttaaatctctttttcttagtacatgagtatcttctagcagttaagaaaggcagtcttcagaaaatggagaactgtggcggaatgcagtacacaacagtatttaggacaactcctttgccaacacaatggctcccctcgctggtgaaagatctctttacagcttaggaaaaacaacggaaattagtttctgatgtcattgctgagctcggcactggttacattgcagaggcagtgtaggatgtctgcaggtttagagactcatttcacaaggcaccagtagtgaattatcaagaaacatttaagaggaaaatgatttctcattgaatatggtacaacaagcacttttttcataaggtctagaagaatgggtagtcatgacaaagaatggaaaagtattgtcatttgttgtaagcatcactacttttttttttttttcagacggggtctggctctgtcacccaggctggagtgcagtggcacgattatggctcattgcagcctcgacttctcggggccaagcgatcctcctgcctcagccttctgagtagctgggaccacaggcgtgcaccaccatgcccacctaattttttatttcttgtagagatgaggtctcctgcctcagcctcccaaagtgctggaatttacagggtctcctctgtcacccaggctggagtgcagtggtgcagtcatggctcacggcatccttgacctcccaggctcaagatcctcccccgtcagcctcctcagtagctgagatgacaggcatgtgccaccatgcccggctgtgttttgattttttttttttgtagagatgaagtctcactatgttgcccaggctggtctcaatctcctgggctcaagtgatcctcccacctcagcctcccaaagtgttgggattacaggccctagccaccatgcctgacctaagatcagttttcttaaatttgacagttgctacttttcaaaattcaaacctttctaaataaaagtaagttgattatttgcaaaaaaattctt

SEQ ID NO: 333774 - DNA, 1943 bp, Homo sapiens
agcgggcggggactggattgcttctgtctggcggcggcagcatggcggcgggggcggctgaggcagctgtagcggccgtggaggaggtcggctcagccgggcagtttgaggagctgctgcgcctcaaagccaagtccctccttgtggtccatttctgggcaccatgggctccacagtgtgcacagatgaacgaagttatggcagagttagctaaagaactccctcaagtttcatttgtgaagttggaagctgaaggtgttcctgaagtatctgaaaaatatgaaattagctctgttcccacttttctgtttttcaagaattctcagaaaatcgaccgattagatggtgcacatgccccagagttgaccaaaaaagttcagcgacatgcatctagtggctccttcctacccagcgctaatgaacatcttaaagaagatctcaaccttcgcttgaagaaattgactcatgctgccccctgcatgctgtttatgaaaggaactcctcaagaaccacgctgtggtttcagcaagcagatggtggaaattcttcacaaacataatattcagtttagcagttttgatatcttctcagatgaagaggttcgacagggactcaaagcctattccagttggcctacctatcctcagctctatgtttctggagagctcataggaggacttgatataattaaggagctagaagcatctgaagaactagatacaatttgtcccaaagctcccaaattagaggaaaggctcaaagtgctgacaaataaagcttctgtgatgctctttatgaaaggaaacaaacaggaagcaaaatgtggattcagcaaacaaattctggaaatactaaatagtactggtgttgaatatgaaacattcgatatattggaggatgaagaagttcggcaaggattaaaagcttactcaaattggccaacataccctcagctgtatgtgaaaggggagctggtgggaggattggatattgtgaaggaactgaaagaaaatggtgaattgctgcctatactgagaggagaaaattaataaatcttaaacttggtgcccaactattacggggtctggctctgtcacccaggctggagtgcagtggcacgattatggctcattgcagcctcgacttctcggggccaagcgatcctcctgcctcagccttctgagtagctgggaccacaggcgtgcaccaccatgcccacctaattttttatttcttgtagagatgaggtctcctgcctcagcctcccaaagtgctggaatttacaggagtgtcggctgtgccccttgtgatggatgaggaaaggtatccacctttctgaatcagacacaagctgcagtagcttcctgatgcctcattcaccaggatgggtaactttaaagacaagttttataactggcatcccatctggtttcagagtcttgggggcttttttcatacagctttgtctgatatttagagacattcagattcagaagccatgagttcagttagctcatgggccgggcacgtgcactgactcactggctgcagcagaacacattgagggagtcttggtgcacttaggtcactgtaaggttctagggctgggagctgggatttgaaccaggatctgtcagcgcagccccagtgctgtgcttgaagcctcgtgccacactggctttgaggtagcacgctgcaagttagtgagtggagttgcccaagtctggggcttctgaaatgacctggtatttttatgttcctgttagaaatggtgtggctttcacaaattaagtgccaggctgggcacaatggctcgtgcttgtaatcccagcactttgggaggcggaggcaggcgggttgcttgagctccggagcttgagaccagcctgagcaacatggcgaaacctcatatctacaaaaaataaaaaattaactggtcatgg

SEQ ID NO: 333775 - DNA, 2581 bp, Homo sapiens
agcgggcggggactggattgcttctgtctggcggcggcagcatggcggcgggggcggctgaggcagctgtagcggccgtggaggaggtcggctcagccgggcagtttgaggagctgctgcgcctcaaagccaagtccctccttgtggtccatttctgggcaccatgggctccacagtgtgcacagatgaacgaagttatggcagagttagctaaagaactccctcaagtttcatttgtgaagttggaagctgaaggtgttcctgaagtatctgaaaaatatgaaattagctctgttcccacttttctgtttttcaagaattctcagaaaatcgaccgattagatggtgcacatgccccagagttgaccaaaaaagttcagcgacatgcatctagtggctccttcctacccagcgctaatgaacatcttaaagaagatctcaaccttcgcttgaagaaattgactcatgctgccccctgcatgctgtttatgaaaggaactcctcaagaaccacgctgtggtttcagcaagcagatggtggaaattcttcacaaacataatattcagtttagcagttttgatatcttctcagatgaagaggttcgacagggactcaaagcctattccagttggcctacctatcctcagctctatgtttctggagagctcataggaggacttgatataattaaggagctagaagcatctgaagaactagatacaatttgtcccaaagctcccaaattagaggaaaggctcaaagtgctgacaaataaagcttctgtgatgctctttatgaaaggaaacaaacaggaagcaaaatgtggattcagcaaacaaattctggaaatactaaatagtactggtgttgaatatgaaacattcgatatattggaggatgaagaagttcggcaaggattaaaagcttactcaaattggccaacataccctcagctgtatgtgaaaggggagctggtgggaggattggatattgtgaaggaactgaaagaaaatggtgaattgctgcctatactgagaggagaattgggagcagttcatgatttagtcctcagaaatggactaggaatagaaaattcctgctttctcagttacatgttttgtgtatttcacaatgtcgtgctaaataaatgtatgttacatttttttcccaccaaaaatagaatgcaataaacatcttcaaattattaacaataattgtatgaaaaaagtgtatctttacagcagtattaaacatacagctactataattaacccaccttaaatctctttttcttagtacatgagtatcttctagcagttaagaaaggcagtcttcagaaaatggagaactgtggcggaatgcagtacacaacagtatttaggacaactcctttgccaacacaatggctcccctcgctggtgaaagatctctttacagcttaggaaaaacaacggaaattagtttctgatgtcattgctgagctcggcactggttacattgcagaggcagtgtaggatgtctgcaggtttagagactcatttcacaaggcaccagtagtgaattatcaagaaacatttaagaggaaaatgatttctcattgaatatggtacaacaagcacttttttcataaggtctagaagaatgggtagtcatgacaaagaatggaaaagtattgtcatttgttgtaagcatcactacttttttttttttttcagacggggtctggctctgtcacccaggctggagtgcagtggcacgattatggctcattgcagcctcgacttctcggggccaagcgatcctcctgcctcagccttctgagtagctgggaccacaggcgtgcaccaccatgcccacctaattttttatttcttgtagagatgaggtctcctgcctcagcctcccaaagtgctggaatttacaggagtgtcggctgtgccccttgtgatggatgaggaaaggtatccacctttctgaatcagacacaagctgcagtagcttcctgatgcctcattcaccaggatgggtaactttaaagacaagttttataactggcatcccatctggtttcagagtcttgggggcttttttcatacagctttgtctgatatttagagacattcagattcagaagccatgagttcagttagctcatgggccgggcacgtgcactgactcactggctgcagcagaacacattgagggagtcttggtgcacttaggtcactgtaaggttctagggctgggagctgggatttgaaccaggatctgtcagcgcagccccagtgctgtgcttgaagcctcgtgccacactggctttgaggtagcacgctgcaagttagtgagtggagttgcccaagtctggggcttctgaaatgacctggtatttttatgttcctgttagaaatggtgtggctttcacaaattaagtgccaggctgggcacaatggctcgtgcttgtaatcccagcactttgggaggcggaggcaggcgggttgcttgagctccggagcttgagaccagcctgagcaacatggcgaaacctcatatctacaaaaaataaaaaattaactggtcatgg

SEQ ID NO: 333776 - DNA, 1764 bp, Homo sapiens
gggcgcgaggctcgcctggaagccccggccccagccctggctccgaccccgacggctgtccaagcccgggggacgcgaccttcccggcctctggcctgggcggccccgccgcgggacggaggcggtggtgactcagccgtgccgcagtggcggggcgggggacggggcggcgccgagaccccggccctccgcgccacggagcgggacccacggctgcgggctccacctttcctgtgcccgccgggagggagcggcaggctcggcgtcggcccattgctcttcagcctcccttcaggaacgcccctgtcgcaggaagagcggcgagggaaggccccgttgcattagctaggcctggctgccttttgaagtcagcctttaaagtttgttggacagcaggtagcctcagtcttcagacttaacctgttgccggagacagagatttcctgttccatgaactggtgtagtgagagtctgttcagatttggcgccggtgtccaggtcttcaatccctgggaagactgcaaaaggagatccagaggaatgcatagaaagcgttttctgggtggactagaagctctgaactgcaagcatgcttacgagtaaatgcttactagcgtgcgtgcctgcagggaaaggtccctccttgtggtccatttctgggcaccatgggctccacagtgtgcacagatgaacgaagttatggcagagttagctaaagaactccctcaagtttcatttgtgaagttggaagctgaaggtgttcctgaagtatctgaaaaatatgaaattagctctgttcccacttttctgtttttcaagaattctcagaaaatcgaccgattagatggtgcacatgccccagagttgaccaaaaaagttcagcgacatgcatctagtggctccttcctacccagcgctaatgaacatcttaaagaagatctcaaccttcgcttgaagaaattgactcatgctgccccctgcatgctgtttatgaaaggaactcctcaagaaccacgctgtggtttcagcaagcagatggtggaaattcttcacaaacataatattcagtttagcagttttgatatcttctcagatgaagaggttcgacagggactcaaagcctattccagttggcctacctatcctcagctctatgtttctggagagctcataggaggacttgatataattaaggagctagaagcatctgaagaactagatacaatttgtcccaaagctcccaaattagaggaaaggctcaaagtgctgacaaataaagcttctgtgatgctctttatgaaaggaaacaaacaggaagcaaaatgtggattcagcaaacaaattctggaaatactaaatagtactggtgttgaatatgaaacattcgatatattggaggatgaagaagttcggcaaggattaaaagcttactcaaattggccaacataccctcagctgtatgtgaaaggggagctggtgggaggattggatattgtgaaggaactgaaagaaaatggtgaattgctgcctatactgagaggagaaaattaataaatcttaaacttggtgcccaactattgtaagaaatatttaattacattgggagcagttcatgatttagtcctcagaaatggactaggaatagaaaattcctgctttctcagttacatgttttgtgtatttcacaatgtcgtgctaaataaatgtatgttacatttttttcccaccaaaaatagaatgcaataaacatcttcaaattattaa

SEQ ID NO: 333777 - DNA, 976 bp, Homo sapiens
agcgggcggggactggattgcttctgtctggcggcggcagcatggcggcgggggcggctgaggcagctgtagcggccgtggaggaggtcggctcagccgggcagtttgaggagctgctgcgcctcaaagccaagtccctccttgtggtccatttctgggcaccatgggctccacagtgtgcacagatgaacgaagttatggcagagttagctaaagaactccctcaagtttcatttgtgaagttggaagctgaaggtgttcctgaagtatctgaaaaatatgaaattagctctgttcccacttttctgtttttcaagaattctcagaaaatcgaccgattagatggtgcacatgccccagagttgaccaaaaaagttcagcgacatgcatctagtggctccttcctacccagcgctaatgaacatcttaaagaagatctcaaccttcgcttgaagaaattgactcatgctgccccctgcatgctgtttatgaaaggaactcctcaagaaccacgctgtggtttcagcaagcagatggtggaaattcttcacaaacataatattcagtttagcagttttgatatcttctcagatgaagaggttcgacagggactcaaagcctattccagttggcctacctatcctcagctctatgtttctggagagctcataggaggacttgatataattaaggagctagaagcatctgaagaactagatacaatttgtcccaaagctcccaaattagaggaaaggctcaaagtgctgacaaataaagcttctgtgatgctctttatgaaaggaaacaaacagggagccaaatgtgggttccgcaaacaattctggaatactaataggccgggggtgatttgaaaccttccgtttatttgggggtgaaaaaatcggcaagggttgctactcaaattgggccacccctcactgtttttggggggcttgtggaggttgatatttttagg

SEQ ID NO: 333778 - DNA, 1545 bp, Homo sapiens
atacacaatacaatactatttggctattttaaaaaaggaaatggtcttattcacaacaacatggatgaacctggagaacatgatattaagtgaaataagccaagctcataaaaacaaatactgaatgattttacttgtatgtgggatctaaaaatgtccaattcacagaagcaaagactagactagtggttgccagaagctagagggttaagggattggggagatgttactgaaataacacaaaatttcatttagacaggaggaataactttaagagatctattgaacatcacagtgagaacaatatattgtatatactaaaattaccaaaagaataaattttaagtgctctcaacacaactgtctggcggcggcagcatggcggcgggggcggctgaggcagctgtagcggccgtggaggaggtcggctcagccgggcagtttgaggagctgctgcgcctcaaagccaagtccctccttgtggtccatttctgggcaccatgggctccacagtgtgcacagatgaacgaagttatggcagagttagctaaagaactccctcaagtttcatttgtgaagttggaagctgaaggtgttcctgaagtatctgaaaaatatgaaattagctctgttcccacttttctgtttttcaagaattctcagaaaatcgaccgattagatggtgcacatgccccagagttgaccaatcttaaagaagatctcaaccttcgcttgaagaaattgactcatgctgccccctgcatgctgtttatgaaaggaactcctcaagaaccacgctgtggtttcagcaagcagatggtggaaattcttcacaaacataatattcagtttagcagttttgatatcttctcagatgaagaggttcgacagggactcaaagcctattccagttggcctacctatcctcagctctatgtttctggagagctcataggaggacttgatataattaaggagctagaagcatctgaagaactagatacaatttgtcccaaagctcccaaattagaggaaaggctcaaagtgctgacaaataaagcttctgtgatgctctttatgaaaggaaacaaacaggaagcaaaatgtggattcagcaaacaaattctggaaatactaaatagtactggtgttgaatatgaaacattcgatatattggaggatgaagaagttcggcaaggattaaaagcttactcaaattggccaacataccctcagctgtatgtgaaaggggagctggtgggaggattggatattgtgaaggaactgaaagaaaatggtgaattgctgcctatactgagaggagaaaattaataaatcttaaacttggtgcccaactattgtaagaaatatttaattacattgggagcagttcatgatttagtcctcagaaatggactaggaatagaaaattcctgctttctcagttacatgttttgtgtatttcacaatgtcgtgctaaataaatgtatgttacatttttttcccaccaaaaatagaatgcaataaacatcttcaaattattaa

SEQ ID NO: 333779 - DNA, 2000 bp, Homo sapiens
caggcatgagccactgcacccagccttatttatttattttttaagagacagatttcaccatgttggtcaggctggtcttgaactcctggcctcaagtgatctgcccacctcggcctcccaaagtgctgggattacatttgtgagccaccacacctggccaagaataccttgttaaattttttaacctgatagtgtattcagggtttatggctcatttagtttgagagtgttaagagactggagttttaatccaataggtgtttcttttggttctcagatatacatacaagctgtgattgtttagatgtttccatctttttatatatgcatatacatattattattgttgttttttatttttaggaactgaaagaaaatggtgaattgctgcctatactgagaggagaaaattaataaatcttaaacttggtgcccaactattgtaagaaatatttaattacattgggagcagttcatgatttagtcctcagaaatggactaggaatagaaaattcctgctttctcagttacatgttttgtgtatttcacaatgtcgtgctaaataaatgtatgttacatttttttcccaccaaaaatagaatgcaataaacatcttcaaattattaacaataattgtatgaaaaaagtgtatctttacagcagtattaaacatacagctactataattaacccaccttaaatctctttttcttagtacatgagtatcttctagcagttaagaaaggcagtcttcagaaaatggagaactgtggcggaatgcagtacacaacagtatttaggacaactcctttgccaacacaatggctcccctcgctggtgaaagatctctttacagcttaggaaaaacaacggaaattagtttctgatgtcattgctgagctcggcactggttacattgcagaggcagtgtaggatgtctgcaggtttagagactcatttcacaaggcaccagtagtgaattatcaagaaacatttaagaggaaaatgatttctcattgaatatggtacaacaagcacttttttcataaggtctagaagaatgggtagtcatgacaaagaatggaaaagtattgtcatttgttgtaagcatcactacttttttttttttttcagacggggtctggctctgtcacccaggctggagtgcagtggcacgattatggctcattgcagcctcgacttctcggggccaagcgatcctcctgcctcagccttctgagtagctgggaccacaggcgtgcaccaccatgcccacctaattttttatttcttgtagagatgaggtctcctgcctcagcctcccaaagtgctggaatttacaggagtgtcggctgtgccccttgtgatggatgaggaaaggtatccacctttctgaatcagacacaagctgcagtagcttcctgatgcctcattcaccaggatgggtaactttaaagacaagttttataactggcatcccatctggtttcagagtcttgggggcttttttcatacagctttgtctgatatttagagacattcagattcagaagccatgagttcagttagctcatgggccgggcacgtgcactgactcactggctgcagcagaacacattgagggagtcttggtgcacttaggtcactgtaaggttctagggctgggagctgggatttgaaccaggatctgtcagcgcagccccagtgctgtgcttgaagcctcgtgccacactggctttgaggtagcacgctgcaagttagtgagtggagttgcccaagtctggggcttctgaaatgacctggtatttttatgttcctgttagaaatggtgtggctttcacaaattaagtgccaggctgggcacaatggctcgtgcttgtaatcccagcactttgggaggcggaggcaggcgggttgcttgagctccggagcttgagaccagcctgagcaacatggcgaaacctcatatctacaaaaaataaaaaattaactggtcatgg

SEQ ID NO: 333780 - DNA, 1190 bp, Homo sapiens
gggcgcgaggctcgcctggaagccccggccccagccctggctccgaccccgacggctgtccaagcccgggggacgcgaccttcccggcctctggcctgggcggccccgccgcgggacggaggcggtggtgactcagccgtgccgcagtggcggggcgggggacggggcggcgccgagaccccggccctccgcgccacggagcgggacccacggctgcgggctccacctttcctgtgcccgccgggagggagcggcaggctcggcgtcggcccattgctcttcagcctcccttcaggaacgcccctgtcgcaggaagagcggcgagggaaggccccgttgcattagctaggcctggctgccttttgaagtcagcctttaaagtttgttggacagcaggtagcctcagtcttcagacttaacctgttgccggagacagagatttcctgttccatgaactggtgtagtgagagtctgttcagatttggcgccggtgtccaggtcttcaatccctgggaagactgcaaaaggagatccagaggaatgcatagaaagcgttttctgggtggactagaagctctgaactgcaagcatgcttacgagtaaatgcttactagcgtgcgtgcctgcagggaaaggtccctccttgtggtccatttctgggcaccatgggctccacagtgtgcacagatgaacgaagttatggcagagttagctaaagaactccctcaagtttcatttgtgaagttggaagctgaaggtgttcctgaagtatctgaaaaatatgaaattagcttctttgattagcccaaaacaataaacagaagctgtagctttaatatctacacacagaccccactgcaccccaggcccactgtgggcatggtggcatcgaggagggtggtagctggttgggtatagagaggagctagacaggaatgctgggcaggaatgccagggtctgctcaggggcatgaacaaaactgccccgaaaagtgggttgctgactgccctcaggccttcctcttgcctcaatccatgagagaattttctgaggtcagatcttcgactttttatgtggaaaacaatagcaagtagtactacttctagttatgttgtaaaataaaagtttttttttttttttacatttttttttgagagagtttcgctcttgttccccactggagtgcaat

SEQ ID NO: 333781 - DNA, 402 bp, Homo sapiens
gccggtgtccaggtcttcaatccctgggaagactgcaaaaggagatccagaggaatgcatagaaagcgttttctgggtggactagaagctctgaactgcaagcatgcttacgagtaaatgcttactagcgtgcgtgcctgcagggaaaggtctgcacgtggactctccgtgataataccacctcacattgtagactactccaaggactgagttgttctcttagttgtattattagcggttgttatgggaactcttatgtcggattgcctgggatccagtcccaccgcagccactcagtagccatgtaacccctgggcacgtttcatgcccaagcctcagtttcccgacggtgacatagattagcacctgttagtacctcagggttgttgtgagggttaaatg

SEQ ID NO: 333782 - DNA, 243 bp, Homo sapiens
tctagaggatcccacatgatagctccacgctccatgaaaggaaacaaacaggaagcaaaatgtggattcagcaaacaaattctggaaatactaaatagtactggtgttgaatatgaaacattcgatatattggaggatgaagaagttcggcaaggattaaaagcttactcaaattggccaacataccctcagctgtatgtgaaaggggagctggtggacaatcatgtgggataccgacgctcg

SEQ ID NO: 333783 - DNA, 1599 bp, Homo sapiens
atacacaatacaatactatttggctattttaaaaaaggaaatggtcttattcacaacaacatggatgaacctggagaacatgatattaagtgaaataagccaagctcataaaaacaaatactgaatgattttacttgtatgtgggatctaaaaatgtccaattcacagaagcaaagactagactagtggttgccagaagctagagggttaagggattggggagatgttactgaaataacacaaaatttcatttagacaggaggaataactttaagagatctattgaacatcacagtgagaacaatatattgtatatactaaaattaccaaaagaataaattttaagtgctctcaacacaactgtctggcggcggcagcatggcggcgggggcggctgaggcagctgtagcggccgtggaggaggtcggctcagccgggcagtttgaggagctgctgcgcctcaaagccaagtccctccttgtggtccatttctgggcaccatgggctccacagtgtgcacagatgaacgaagttatggcagagttagctaaagaactccctcaagtttcatttgtgaagttggaagctgaaggtgttcctgaagtatctgaaaaatatgaaattagctctgttcccacttttctgtttttcaagaattctcagaaaatcgaccgattagatggtgcacatgccccagagttgaccaaaaaagttcagcgacatgcatctagtggctccttcctacccagcgctaatgaacatcttaaagaagatctcaaccttcgcttgaagaaattgactcatgctgccccctgcatgctgtttatgaaaggaactcctcaagaaccacgctgtggtttcagcaagcagatggtggaaattcttcacaaacataatattcagtttagcagttttgatatcttctcagatgaagaggttcgacagggactcaaagcctattccagttggcctacctatcctcagctctatgtttctggagagctcataggaggacttgatataattaaggagctagaagcatctgaagaactagatacaatttgtcccaaagctcccaaattagaggaaaggctcaaagtgctgacaaataaagcttctgtgatgctctttatgaaaggaaacaaacaggaagcaaaatgtggattcagcaaacaaattctggaaatactaaatagtactggtgttgaatatgaaacattcgatatattggaggatgaagaagttcggcaaggattaaaagcttactcaaattggccaacataccctcagctgtatgtgaaaggggagctggtgggaggattggatattgtgaaggaactgaaagaaaatggtgaattgctgcctatactgagaggagaaaattaataaatcttaaacttggtgcccaactattgtaagaaatatttaattacattgggagcagttcatgatttagtcctcagaaatggactaggaatagaaaattcctgctttctcagttacatgttttgtgtatttcacaatgtcgtgctaaataaatgtatgttacatttttttcccaccaaaaatagaatgcaataaacatcttcaaattattaa

SEQ ID NO: 333784 - DNA, 2972 bp, Homo sapiens
atacacaatacaatactatttggctattttaaaaaaggaaatggtcttattcacaacaacatggatgaacctggagaacatgatattaagtgaaataagccaagctcataaaaacaaatactgaatgattttacttgtatgtgggatctaaaaatgtccaattcacagaagcaaagactagactagtggttgccagaagctagagggttaagggattggggagatgttactgaaataacacaaaatttcatttagacaggaggaataactttaagagatctattgaacatcacagtgagaacaatatattgtatatactaaaattaccaaaagaataaattttaagtgctctcaacacaactgtctggcggcggcagcatggcggcgggggcggctgaggcagctgtagcggccgtggaggaggtcggctcagccgggcagtttgaggagctgctgcgcctcaaagccaagtccctccttgtggtccatttctgggcaccatgggctccacagtgtgcacagatgaacgaagttatggcagagttagctaaagaactccctcaagtttcatttgtgaagttggaagctgaaggtgttcctgaagtatctgaaaaatatgaaattagctctgttcccacttttctgtttttcaagaattctcagaaaatcgaccgattagatggtgcacatgccccagagttgaccaaaaaagttcagcgacatgcatctagtggctccttcctacccagcgctaatgaacatcttaaagaagatctcaaccttcgcttgaagaaattgactcatgctgccccctgcatgctgtttatgaaaggaactcctcaagaaccacgctgtggtttcagcaagcagatggtggaaattcttcacaaacataatattcagtttagcagttttgatatcttctcagatgaagaggttcgacagggactcaaagcctattccagttggcctacctatcctcagctctatgtttctggagagctcataggaggacttgatataattaaggagctagaagcatctgaagaactagatacaatttgtcccaaagctcccaaattagaggaaaggctcaaagtgctgacaaataaagcttctgtgatgctctttatgaaaggaaacaaacaggaagcaaaatgtggattcagcaaacaaattctggaaatactaaatagtactggtgttgaatatgaaacattcgatatattggaggatgaagaagttcggcaaggattaaaagcttactcaaattggccaacataccctcagctgtatgtgaaaggggagctggtgggaggattggatattgtgaaggaactgaaagaaaatggtgaattgctgcctatactgagaggagaaaattaataaatcttaaacttggtgcccaactattgtaagaaatatttaattacattgggagcagttcatgatttagtcctcagaaatggactaggaatagaaaattcctgctttctcagttacatgttttgtgtatttcacaatgtcgtgctaaataaatgtatgttacatttttttcccaccaaaaatagaatgcaataaacatcttcaaattattaacaataattgtatgaaaaaagtgtatctttacagcagtattaaacatacagctactataattaacccaccttaaatctctttttcttagtacatgagtatcttctagcagttaagaaaggcagtcttcagaaaatggagaactgtggcggaatgcagtacacaacagtatttaggacaactcctttgccaacacaatggctcccctcgctggtgaaagatctctttacagcttaggaaaaacaacggaaattagtttctgatgtcattgctgagctcggcactggttacattgcagaggcagtgtaggatgtctgcaggtttagagactcatttcacaaggcaccagtagtgaattatcaagaaacatttaagaggaaaatgatttctcattgaatatggtacaacaagcacttttttcataaggtctagaagaatgggtagtcatgacaaagaatggaaaagtattgtcatttgttgtaagcatcactacttttttttttttttcagacggggtctggctctgtcacccaggctggagtgcagtggcacgattatggctcattgcagcctcgacttctcggggccaagcgatcctcctgcctcagccttctgagtagctgggaccacaggcgtgcaccaccatgcccacctaattttttatttcttgtagagatgaggtctcctgcctcagcctcccaaagtgctggaatttacaggagtgtcggctgtgccccttgtgatggatgaggaaaggtatccacctttctgaatcagacacaagctgcagtagcttcctgatgcctcattcaccaggatgggtaactttaaagacaagttttataactggcatcccatctggtttcagagtcttgggggcttttttcatacagctttgtctgatatttagagacattcagattcagaagccatgagttcagttagctcatgggccgggcacgtgcactgactcactggctgcagcagaacacattgagggagtcttggtgcacttaggtcactgtaaggttctagggctgggagctgggatttgaaccaggatctgtcagcgcagccccagtgctgtgcttgaagcctcgtgccacactggctttgaggtagcacgctgcaagttagtgagtggagttgcccaagtctggggcttctgaaatgacctggtatttttatgttcctgttagaaatggtgtggctttcacaaattaagtgccaggctgggcacaatggctcgtgcttgtaatcccagcactttgggaggcggaggcaggcgggttgcttgagctccggagcttgagaccagcctgagcaacatggcgaaacctcatatctacaaaaaataaaaaattaactggtcatgg

SEQ ID NO: 333785 - DNA, 1455 bp, Homo sapiens
agcgggcggggactggattgcttctgtctggcggcggcagcatggcggcgggggcggctgaggcagctgtagcggccgtggaggaggtcggctcagccgggcagtttgaggagctgctgcgcctcaaagccaagtccctccttgtggtccatttctgggcaccatgggctccacagtgtgcacagatgaacgaagttatggcagagttagctaaagaactccctcaagtttcatttgtgaagttggaagctgaaggtgttcctgaagtatctgaaaaatatgaaattagctctgttcccacttttctgtttttcaagaattctcagaaaatcgaccgattagatggtgcacatgccccagagttgaccaaaaaagttcagcgacatgcatctagtggctccttcctacccagcgctaatgaacatcttaaagaagatctcaaccttcgcttgaagaaattgactcatgctgccccctgcatgctgtttatgaaaggaactcctcaagaaccacgctgtggtttcagcaagcagatggtggaaattcttcacaaacataatattcagtttagcagttttgatatcttctcagatgaagaggttcgacagggactcaaagcctattccagttggcctacctatcctcagctctatgtttctggagagctcataggaggacttgatataattaaggagctagaagcatctgaagaactagatacaatttgtcccaaagctcccaaattagaggaaaggctcaaagtgctgacaaataaagcttctgtgatgctctttatgaaaggaaacaaacaggaagcaaaatgtggattcagcaaacaaattctggaaatactaaatagtactggtgttgaatatgaaacattcgatatattggaggatgaagaagttcggcaaggattaaaagcttactcaaattggccaacataccctcagctgtatgtgaaaggggagctggtgggaggattggatattgtgaaggaactgaaagaaaatggtgaattgctgcctatactgagaggagaaaattaataaatcttaaacttggtgcccaactattacggggtctggctctgtcacccaggctggagtgcagtggcacgattatggctcattgcagcctcgacttctcggggccaagcgatcctcctgcctcagccttctgagtagctgggaccacaggcgtgcaccaccatgcccacctaattttttatttcttgtagagatgaggtctcctgcctcagcctcccaaagtgctggaatttacaggtaggaccaccacacttggtccacttacttataataaacattgatttggtcgttcaaaaaaacaaaaaaaccgagaattatgcgggggggaaacacagatggaagggccctgtaagtgtagaaccagttttttaaaggaaagcgcccaaagagcatatattaagcggac

SEQ ID NO: 333786 - DNA, 1165 bp, Homo sapiens
agcgggcggggactggattgcttctgtctggcggcggcagcatggcggcgggggcggctgaggcagctgtagcggccgtggaggaggtcggctcagccgggcagtttgaggagctgctgcgcctcaaagccaagtccctccttgtggtccatttctgggcaccatgggctccacagtgtgcacagatgaacgaagttatggcagagttagctaaagaactccctcaagtttcatttgtgaagttggaagctgaaggtgttcctgaagtatctgaaaaatatgaaattagctctgttcccacttttctgtttttcaagaattctcagaaaatcgaccgattagatggtgcacatgccccagagttgaccaaaaaagttcagcgacatgcatctagtggctccttcctacccagcgctaatgaacatcttaaagaagatctcaaccttcgcttgaagaaattgactcatgctgccccctgcatgctgtttatgaaaggaactcctcaagaaccacgctgtggtttcagcaagcagatggtggaaattcttcacaaacataatattcagtttagcagttttgatatcttctcagatgaagaggttcgacagggactcaaagcctattccagttggcctacctatcctcagctctatgtttctggagagctcataggaggacttgatataattaaggagctagaagcatctgaagaactagatacaatttgtcccaaagctcccaaattagaggaaaggctcaaagtgctgacaaataaagcttctgtgatgctctttatgaaaggaaacaaacaggaagcaaaatgtggattcagcaaacaaattctggaaatactaaatagtactggtgttgaatatgaaacattcgatatattggaggatgaagaagttcggcaaggattaaaagcttactcaaattggccaacataccctcagctgtatgtgaaaggggagctggtgggaggattggatattgtgaagacggggtctggctctgcactccagcctgggcgacagagcgagacttggtctcaaaaaaaaaaaaaaaggatttaaatgtattttcaagcattgatattgtcataaaatgtaattcactgataaaatgcactccagcctgggcgacagagcgagacttggtctcaaaa

SEQ ID NO: 333787 - DNA, 1688 bp, Homo sapiens
atacacaatacaatactatttggctattttaaaaaaggaaatggtcttattcacaacaacatggatgaacctggagaacatgatattaagtgaaataagccaagctcataaaaacaaatactgaatgattttacttgtatgtgggatctaaaaatgtccaattcacagaagcaaagactagactagtggttgccagaagctagagggttaagggattggggagatgttactgaaataacacaaaatttcatttagacaggaggaataactttaagagatctattgaacatcacagtgagaacaatatattgtatatactaaaattaccaaaagaataaattttaagtgctctcaacacaactgtctggcggcggcagcatggcggcgggggcggctgaggcagctgtagcggccgtggaggaggtcggctcagccgggcagtttgaggagctgctgcgcctcaaagccaagtccctccttgtggtccatttctgggcaccatgggctccacagtgtgcacagatgaacgaagttatggcagagttagctaaagaactccctcaagtttcatttgtgaagcctccaggcatcttttgaaatgtgcaacaaaataaaaacctctgaacctgttttgacactgcaaactcagtggatgacatgccagcccattggaagctgaaggtgttcctgaagtatctgaaaaatatgaaattagctctgttcccacttttctgtttttcaagaattctcagaaaatcgaccgattagatggtgcacatgccccagagttgaccaaaaaagttcagcgacatgcatctagtggctccttcctacccagcgctaatgaacatcttaaagaagatctcaaccttcgcttgaagaaattgactcatgctgccccctgcatgctgtttatgaaaggaactcctcaagaaccacgctgtggtttcagcaagcagatggtggaaattcttcacaaacataatattcagtttagcagttttgatatcttctcagatgaagaggttcgacagggactcaaagcctattccagttggcctacctatcctcagctctatgtttctggagagctcataggaggacttgatataattaaggagctagaagcatctgaagaactagatacaatttgtcccaaagctcccaaattagaggaaaggctcaaagtgctgacaaataaagcttctgtgatgctctttatgaaaggaaacaaacaggaagcaaaatgtggattcagcaaacaaattctggaaatactaaatagtactggtgttgaatatgaaacattcgatatattggaggatgaagaagttcggcaaggattaaaagcttactcaaattggccaacataccctcagctgtatgtgaaaggggagctggtgggaggattggatattgtgaaggaactgaaagaaaatggtgaattgctgcctatactgagaggagaaaattaataaatcttaaacttggtgcccaactattgtaagaaatatttaattacattgggagcagttcatgatttagtcctcagaaatggactaggaatagaaaattcctgctttctcagttacatgttttgtgtatttcacaatgtcgtgctaaataaatgtatgttacatttttttcccaccaaaaatagaatgcaataaacatcttcaaattattaa

SEQ ID NO: 333788 - DNA, 501 bp, Homo sapiens
tctagaggatcccacatgatagctccacgctccatgaaaggaaacaaacaggaagcaaaatgtggattcagcaaacaaattctggaaatactaaatagtactggtgttgaatatgaaacattcgatatattggaggatgaagaagttcggcaaggattaaaagcttactcaaattggccaacataccctcagctgtatgtgaaaggggagctggtgggaggattggatattgtgaaggaactgaaagaaaatggtgaattgctgcctatactgagaggagaaaattaataaatcttaaacttggtgcccaactattgtaagaaatatttaattacattgggagcagttcatgatttagtcctcagaaatggactaggaatagaaaattcctgctttctcagttacatgttttgtgtatttcacaatgtcgtgctaaataaatgtatgttacatttttttcccaccaaaaatagaatgcaataaacatcttcaaattattaa

SEQ ID NO: 333789 - DNA, 674 bp, Homo sapiens
ctcaagaaatcagcaagtgacatagctcctcccctgggaatttcacatctggaagcctgatgtcccaggacacagtggtcatttctacttccagcccctgttggcattggagctggaggcctggaagctgcggctcccttcaccaagaagagaacctgatgttgaagctcctggctcatgccctgcccccaactcaggacctgaggagggctcctgctgcgctctggccctctggagttcagagctgcagcctctccatccaccatgggccaggtctgggtgccccccaggtcactgcttccaaagcagctcagctgactttgcctccatgactttttaattttgacaccattagttgtaggagaggtgatttctctaccattttaaagtctaagaaagaaactgaggcaacagaaggtgtgcccctcagacagtagaatgcagccctttgcttactaggacacactggaatcacatggttcaggagggctcagctctgacatttcctgggagcctctcttttcatggggggcagtggaatcccagtttaaatgctggtctgggtcaggttgcttcttaccatcaagcaatttccatcaaatatctttggggtcatgatcggggcaacccacccccaccatagttacagaaaacagggtaccatcagacaagaa

SEQ ID NO: 333790 - DNA, 391 bp, Homo sapiens
atctctactatctccatcaaaattgtccaaaatcagactcatggttttcccttgcccatattcaggatcctaaattatgatcagaattactcccctaaatctccttgccagttccactcttaggattaccactactgacttatcatgttagcactaagttgtagttctgctttcccccacctcccaccatcatggtctagtctacaagactgcgtttctgctatggttgctgtttataattggattggaatcggtggaagtctatggaccatggtgtagttattctggaatttatagatcagtaagatagttattctggtcttaactgggctcacttaggcatctatggttagctatgggtctggaagtttgccctgctgatcttggctgg

SEQ ID NO: 333791 - DNA, 309 bp, Homo sapiens
gctaacgatgttgaacatcttttcatgggtcttataaggtggagaagtggttgaaattgggcaggttatgacagagtttatagctttggtttggtggctccaacaaagcctaaatattgaagcagagtattgataagaaaactgtggaacgtatacaccatggaattactaggcagccataaaaaaggatgagttcctgtcctttgcaggaacgtggatgaacttggaaggcatcattctcagcaaactgacacaggaaccgaaaaccaaacaccgtatgttctcactcctaagtgggagttgaactgt

SEQ ID NO: 333792 - DNA, 426 bp, Homo sapiens
tgtttcttctaccaaactacctttccaggatatctacagttggtgttcaagccattgcctctgggcttcatgtgagcattcttgccccgggcaggaattctgcagcacaaaacaaagtactaaagattttaccctttgagaagcctactccttaagggaatattacctcccaggtttagcagttgggaagacatgaagtacctgttctcatttcattcaaatgccattcagtggtctgtgagtctacatgaaatgactccctgcggacagcaccctcccccagtctgaccacctactacttcctcccaggtcactcccttgcagccacgcaggcttctttgctctttcctgaaaatgtcaattatgatctgccttggtctctgcactgcctctgccacatagagtcatggttcgttttcactcctc

SEQ ID NO: 333793 - DNA, 288 bp, Homo sapiens
ctcagaactctctgtaggatccacatctggagccaagaggccgctctgtgccaccacactccccggagtgtccatcgtgcattggagggggacggtgttggcctcaagtgctgccctcgcagctcccgttcacagaccatgactgagaggactctcagcagaggaccctggggtgacatttctactgctggtgcctcataaggctggccaggggcaggaggcccagggctgagtccaaggaatggggtggggtttcctcattccttgctgtcttcatacttggccttc

SEQ ID NO: 333794 - DNA, 520 bp, Homo sapiens
actacaggcacgtgccaccatgcccggctagtttctttaatttttttgtagagacggggtcttgccatgttgcccaggcttgtcttgaacccctgggctcaagggatcctcctgccttggcctcccaaagtgttgggattacaggatgtgagctaccatgcctggctggctataaatcttaagatagctttatttttctctgggagtataccattttctgtggcttatagtatttatgtagcggagtaactgctttctccacagaattactccacaaatgcagttgatctagttgttttgtagtgagaaggtgcttcagaatatctcatttgatataccaccagaagcagaaaactcaatgactttaaaagtcatttggttctttacagtttactatttggttccatacaaatctgttcgttatggtttcttactctttttttaaaaatagttttcagtttttttatatgtctctgatcatttaaaacgtattttacgttctctttagtattgtttaata

SEQ ID NO: 333795 - DNA, 465 bp, Homo sapiens
caataatgtctttctgtccatgaatttgaaatatctctatatttattcagatcttttgaagaatttcttaattagagctgtatagttttcctctaagagattgtttacataattgttagatttatacctaagtattttactttttctggtactaatataaatggtattaagttctttatttcaaattctaaatgttcatgctggtatatagaaagacattgactttgatatgttagccttgtattctgcaaccttgctataatcacttattatttcaaggagttatttttcgttgactctttgggatcttatgtatagaacatcatgtcatctgtgaacaatcagttttgtctctttcttcccaacctatatatctttttctctttttttattgcattagctaagaattttagtacactgttgaataggtgtgatgagaggtgaaattgttgccttattcccaat

SEQ ID NO: 333796 - DNA, 372 bp, Homo sapiens
gaatatgaattgttttgctttacttcttactatgcatgaaactgtctatgctatatcttgtacaaaataagaagtcacatgcatatagacacaattttcattcttttaaagaatactttacagttaagcctatttgaaaagaagttttaagcttcctggaaaaaaagctgtgcttggaatatttattaaatggcaaaaggcaaaccaaatgtgcatgcaatctaatgaagagtaaaattgtgagtaataatttaatacttcaagttaatagattgtttaataattaaaatcagctgcttgccccacattgtgacacctgaaaaacagaaagcgaatcacctagaaccaaggcaaagttagagttgatgcttc

SEQ ID NO: 333797 - DNA, 6082 bp, Homo sapiens
ctttcggagttagcgcagcgcgaacgctgggtgcggcgcctttaagcgtcgcggtgacacgtgtgtgaggcgccggaggcccggatggtgcgcgtgctgggccgcgggccgaaggagtcgccagggctgcgtaggcttgtggcgcgcccgcggagaggccggggctctgacgcccgctctgcggcttcggtgtttgaacaggccacagtccaggagcgcttacattcaggagctccgcgtagcacctgcccaaccaaactcagccctccgttaagatcctggttccatgccgcagtaggacagcaggcccaagtctgcacatcccagtgatgcaccatgccaatagtggataagttgaaggaggccctgaaacccggccgcaaggactcggctgatgatggagaactggggaagcttcttgcctcctctgccaagaaggtccttttacagaaaatcgagttcgagccagccagcaagagcttctcctaccagctggaggccttaaagagcaaatatgtgttgctcaaccccaaaacagagggagctagtcgccacaagagtggagatgacccaccggccaggagacagggcagtgagcacacgtatgagagctgtggtgacggagtcccagccccgcagaaagtgcttttccccacggagcgactgtctctgaggtgggagcgggtcttccgcgtgggcgcaggactccacaaccttggcaacacctgctttctcaatgccaccatccagtgcttgacctacacaccacctctagccaactacctgctctccaaggagcatgctcgcagctgccaccagggaagcttctgcatgctgtgtgtcatgcagaaccacattgtccaggccttcgccaacagcggcaacgccatcaagcccgtctccttcatccgagacctgaaaaagatcgcccgacacttccgctttgggaaccaggaggacgcgcatgagttcctgcggtacaccatcgacgccatgcagaaagcctgcctgaatggctgtgccaagttggatcgtcaaacgcaggctactaccttggtccatcaaatttttggagggtatctcagatcacgcgtgaagtgctccgtgtgcaagagcgtctcggacacctacgacccctacttggacgtcgcgctggagatccggcaagctgcgaatattgtgcgtgctctggaactttttgtgaaagcagatgtcctgagtggagagaatgcctacatgtgtgctaaatgcaagaagaaggttccagccagcaagcgcttcaccatccacagaacatccaacgtcttaaccctttccctcaagcgctttgccaacttcagcggggggaagatcaccaaggatgtaggctatccggaattcctcaacatacgtccgtatatgtcccagaataatggtgatcctgtcatgtatggactctatgctgtcctggtgcactcgggctacagctgccatgccgggcactattactgctacgtgaaggcaagcaatggacagtggtaccagatgaatgattccttggtccattccagcaacgtcaaggtggttctgaaccagcaggcctacgtgctgttctatctgcgaattccaggctctaagaaaagtcccgagggcctcatctccaggacaggctcctcctcccttcccggccgcccgagtgtgattccagatcactccaagaagaacatcggcaatgggattatttcctccccactgactggaaagcgacaagactctgggacgatgaagaagccgcacaccactgaagagattggtgtgcccatatccaggaatggctccaccctgggcctgaagtcccagaacggctgcattcctccaaagctgccctcggggtccccttcccccaaactctcccagacacccacacacatgccaaccatcctagacgaccctggaaagaaggtgaagaagccagctcctccacagcacttttcccccagaactgctcaggggctgcctgggaccagcaactcgaatagcagcagatctgggagccaaaggcagggctcctgggacagcagggatgttgtcctctctacctcacctaagctcctggctacagccactgccaacgggcatgggctgaaggggaacgacgagagcgctggcctcgacaggaggggctccagcagctccagcccagagcactcggccagcagcgactccaccaaggccccccagacccccaggagtggagcggcccatctctgcgattctcaggaaacgaactgttccaccgctggccactccaaaacgccgccaagtggagcagattctaagacggtgaagctgaagtcccctgtcctgagcaacaccaccactgagcctgcaagcaccatgtctcctccaccagccaaaaaactggccctttctgccaagaaggccagcaccctgtggagggcgaccggcaatgacctccgtccacctcccccctcaccatcctccgacctcacccaccccatgaaaacctctcaccccgtcgttgcctccacttggcccgtccatagagccagggctgtgtcacctgctccccaatcatccagccgcctgcaaccccccttcagcccccaccccacattgctgtccagtacccccaagcccccagggacgtcagaaccacggagctgctcctccatctcgacggcgctgcctcaggtcaacgaggaccttgtgtcccttccacaccagttgccagaggccagtgagcccccccggagcccctctgagaagaggaaaaagacctttgtgggagagccgcagaggctgggctcagagacgtgcctcccacagcacatcagggaggccactgcggctccccacgggaagaggaagaggaagaagaagaagcgcccggaggacacagctgccagcgccctgcaggaggggcagacacagagacagcctgggagccccatgtacaggagggagggccaggcacagctgcccgctgtcagacggcaggaagatggcacacagccacaggtgaatggccagcaggtgggatgtgttacggacggccaccacgcgagcagcaggaagcggaggaggaaaggagcagaaggtcttggtgaagaaggcggcctgcaccaggacccacttcggcacagctgctctcccatgggtgatggtgatccagaggccatggaagagtctccaaggaaaaagaaaaaaagaaagcaggagacacagcgggcagtagaagaggatgggcatctcaaatgcccaaggagtgccaagccccaagatgctgttgtccccgagtccagcagctgcgcaccatccgcgaatggctggtgtcctggggaccgcatggggctgagccaggcccctcctgtgtcttggaatggagagcgggagtctgatgtggtccaggaactgctcaaatactcatctgataaagcttacgggagaaaagttctgacctgggatggcaagatgtcggcggtcagtcaggatgctattgaagacagcagacaggcccggactgagaccgtggttgatgactgggacgaagagtttgaccgagggaaggaaaagaaaattaaaaaatttaagagagagaagaggagaaacttcaacgccttccagaaacttcagactcgacggaacttctggtctgtgactcacccagcaaaggctgccagcctcagctatcgccgctgactgtgcccctgtggaaggaggtcggttccgagggggtgggtgtaagggtgaggtgggggtgtgtgtgccgtgtatgtgtgtaggggtgtggtggggtgtggcgtgtgtgtatgatgtatgtgggctgtgtatctggcacatgtgtgttgggtggtgtgtgtggtgtgggcgcgtctgtggtgtgtgtcctagtcacttggagaagggtgtgtgtgggatgcgtgtgtataagggggtgtgtgtgggatgcgtgtgtataagggggtgtgtgtagtgtgtgttgggtgtggggtgtgtacacctggcatctgtggcatgtgttctggtcacttggagaagggcatgtgtggggtgtgtgtgggatgtgggttgtgtgtatatctggcatgtgtcccagtcacttgcagaagggtgacttcttgccagccgcatcgagatgccatgcattgggttcctaggttggactcatacccgagggtggcagtgggaagattcgggtctcgtttctctctgtcaggactaccgtggtttgttctgcagcctcctggagacaaggcgtcccttcccgggagctgtcggtctggatctgagggagctctctgtgtgggctctgctgtgctgggagcctgtcacggtaggagctctcccggtaccagtgtccacagaccgcccaacatagaggctttgaggcttctctagatcggaacctctttggtgacattcccgaccagccctgcaagagaaacgacagtgtgtgtgtgagcagaggtggctgcacacctgctggacatctttgccaggctgtgccttctcatgtttcatagacagtggtctgtgctggcagaggctgctgcccctggttggggctatcaggagagtgggggatggtggccacatgtcctccaggtggtctcccggtgcatagctggtggctctgggcaagccatcccttgcttctcggggctgacgccaccgttgtgtccgagcccgccctcccctgcttcctcagcgggaccccttcatctgttggccttacctgtcctcagaaaggaagaggtgaccccacccagccacctctcccttttatggaactcgagagggtggccctactgtgcaccccttccttgtgagtagctctcaactgtcctggagagcagaggctatttggggtcggaggagccctcgatacctgcgaatacatctgctttccaggctgctgtttattctgagacgactgtgctgtagcttcccttgcagctgcaataacccgcaggtcttcactgaggtggaggctttggggtagaattctccatttattttactacttaatacaaaacatttatttttgaccagtcctgtggcttccattagcaatatgtttcctttcccaaatatgcaaatagtggctttgtttgctcaattttgtgagtgctttggaatttaaatgattgtataactcaagaagattacttttctatgttgctcaagctgtgcctgccaacttgtaacttaataaatacaggaaatcctcagagaaggtgatattttcaggaaaaagacaaatgccctcatagtagtgggaagtgtgaaggtgaccgtgaacatccttcctcatcgggtctgtccccgtcatttcctcccggagtcgtcgcaggtggagatggacaacgtggtgttggacttagacctccttcagtgtggctctgctgggccagaggcatcctgctgtcccgggtggctgcctcgctgtctgcaccccctctccctggggcagctttgcttcctgcccctgtgctcggggcctgggtggttactggcgtgtagatggaattgcttttttaatatgggaagatacatttatttttttccatgtgggtgggtgtctctttttggattttcttctgtttttacgtttctcttcttagaagggtgggagagaatcaagctcctgtggccacctgtgtcccagcagcagtgagtggagctgctcagggtgccctctcctgcggaccagtctctgaatgttcaaagatgagggcctggcttccgtgctctggctttgtaacttatctggaagggaaagcacatgccttcacgggcaggatgatcaagcggtgctgattcacgagagtggaagcctccagagcttggggctttctggctgctcttcattgacctgtgtgttcccagcacacgaacagcgcccctaacggagatttgttcagcgactgaatatacacctgtaaacgagtagcatgtatacattgattttgattacaaatggttctgtattatataccaccgttctgactgcttttttcacttatagcttggaaattgtcttctgttggtaatacagaaatctgtttcagtcttaaag

SEQ ID NO: 333798 - DNA, 4650 bp, Homo sapiens
gtcacttttgaagaatggtgggacagtagatggtggcagttgatttttcattttctaactttgcagaataaaaattgaatgatcctgtattggtcccccaagtatttcagagctcccggagtctgggaagtgccatggtaaatagtcacacaggccagatgagagactgaggtgtgcatgttctgtgggaggggaagtgtagcctgcgggtgtggaatggtctgggtggccgtgggaaacgtggagagagccctggaaacagccccgctttgtgccagtgaggagtcggggaagcagctggggagacggggctggagagcctggggagaggggaagctcttctggagggagtgggtgcaccggcgcactgcgcagcctcctagtaaagggcctgcagacccagctggcctcatgcctggaggccttaggcgactctgaggaaggcagttccagagcagtgagtcaggaccagatgcagtgggttgcaagtagaaccaggagcagagactggatgtggtgtattgtttcagaaccttccagcgtgagtagctaccatatggatacgtaggcgtgggaggcgccaggcagccccgggtccgggtgagaagaggccccagagctcagagtgcctcagatcccagttagtgagcggtgcgggggacatgaatgagggcagggctcctgaccccgaagcccacgtctgactccgctgtcctctctgagacgggtgcagagccggggagatttggtcctgtttgtgcctttgttcccacccccacccctcttcccagattggggaccagctgtctgtgaccagcagagaagtggaagggtgggctgggtgggcgccctagctcagggggatgtttggcctcccgcctcactctagatttgggtacttactttttattgagaccaaaaagaaaaggcaacactgggtgaggatacacgtacatttctcggggcttttattttctgtgaagtgggtggcagtgggcattgtgaaggtttgaaatggctactgtgggtagtggggccctgaggaggtcagagctctgcagagagactgccaggcagcgtgggctgaggatggaggttaagggtctgtggtgactcgggtggggggtggagtttcccagcctcacgctgagcttgtgactggtgggcatggggctgctgggatggggccatccctcgtgtcatcttgctgagcccttcccttaaaggctggggtctccttttcaggttggatcgtcaaacgcaggctactaccttggtccatcaaatttttggagggtatctcagatcacgcgtgaagtgctccgtgtgcaagagcgtctcggacacctacgacccctacttggacgtcgcgctggagatccggcaagctgcgaatattgtgcgtgctctggaactttttgtgaaagcagatgtcctgagtggagagaatgcctacatgtgtgctaaatgcaagaagaaggttccagccagcaagcgcttcaccatccacagaacatccaacgtcttaaccctttccctcaagcgctttgccaacttcagcggggggaagatcaccaaggatgtaggctatccggaattcctcaacatacgtccgtatatgtcccagaataatggtgatcctgtcatgtatggactctatgctgtcctggtgcactcgggctacagctgccatgccgggcactattactgctacgtgaaggcaagcaatggacagtggtaccagatgaatgattccttggtccattccagcaacgtcaaggtggttctgaaccagcaggcctacgtgctgttctatctgcgaattccaggctctaagaaaagtcccgagggcctcatctccaggacaggctcctcctcccttcccggccgcccgagtgtgattccagatcactccaagaagaacatcggcaatgggattatttcctccccactgactggaaagcgacaagactctgggacgatgaagaagccgcacaccactgaagagattggtgtgcccatatccaggaatggctccaccctgggcctgaagtcccagaacggctgcattcctccaaagctgccctcggggtccccttcccccaaactctcccagacacccacacacatgccaaccatcctagacgaccctggaaagaaggtgaagaagccagctcctccacagcacttttcccccagaactgctcaggggctgcctgggaccagcaactcgaatagcagcagatctgggagccaaaggcagggctcctgggacagcagggatgttgtcctctctacctcacctaagctcctggctacagccactgccaacgggcatgggctgaaggggaacgacgagagcgctggcctcgacaggaggggctccagcagctccagcccagagcactcggccagcagcgactccaccaaggccccccagacccccaggagtggagcggcccatctctgcgattctcaggaaacgaactgttccaccgctggccactccaaaacgccgccaagtggagcagattctaagacggtgaagctgaagtcccctgtcctgagcaacaccaccactgagcctgcaagcaccatgtctcctccaccagccaaaaaactggccctttctgccaagaaggccagcaccctgtggagggcgaccggcaatgacctccgtccacctcccccctcaccatcctccgacctcacccaccccatgaaaacctctcaccccgtcgttgcctccacttggcccgtccatagagccagggctgtgtcacctgctccccaatcatccagccgcctgcaaccccccttcagcccccaccccacagctgccagcgccctgcaggaggggcagacacagagacagcctgggagccccatgtacaggagggagggccaggcacagctgcccgctgtcagacggcaggaagatggcacacagccacaggtgaatggccagcaggtgggatgtgttacggacggccaccacgcgagcagcaggaagcggaggaggaaaggagcagaaggtcttggtgaagaaggcggcctgcaccaggacccacttcggcacagctgctctcccatgggtgatggtgatccagaggccatggaagagtctccaaggaaaaagaaaaaaagaaagcaggagacacagcgggcagtagaagaggatgggcatctcaaatgcccaaggagtgccaagccccaagatgctgttgtccccgagtccagcagctgcgcaccatccgcgaatggctggtgtcctggggaccgcatggggctgagccaggcccctcctgtgtcttggaatggagagcgggagtctgatgtggtccaggaactgctcaaatactcatctgataaagcttacgggagaaaagttctgacctgggatggcaagatgtcggcggtcagtcaggatgctattgaagacagcagacaggcccggactgagaccgtggttgatgactgggacgaagagtttgaccgagggaaggaaaagaaaattaaaaaatttaagagagagaagaggagaaacttcaacgccttccagaaacttcagactcgacggaacttctggtctgtgactcacccagcaaaggctgccagcctcagctatcgccgctgactgtgcccctgtggaaggagcctcctggagacaaggcgtcccttcccgggagctgtcggtctggatctgagggagctctctgtgtgggctctgctgtgctgggagcctgtcacggtaggagctctcccggtaccagtgtccacagaccgcccaacatagaggctttgaggcttctctagatcggaacctctttggtgacattcccgaccagccctgcaagagaaacgacagtgtgtgtgtgagcagaggtggctgcacacctgctggacatctttgccaggctgtgccttctcatgtttcatagacagtggtctgtgctggcagaggctgctgcccctggttggggctatcaggagagtgggggatggtggccacatgtcctccaggtggtctcccggtgcatagctggtggctctgggcaagccatcccttgcttctcggggctgacgccaccgttgtgtccgagcccgccctcccctgcttcctcagcgggaccccttcatctgttggccttacctgtcctcagaaaggaagaggtgaccccacccagccacctctcccttttatggaactcgagagggtggccctactgtgcaccccttccttgtgagtagctctcaactgtcctggagagcagaggctatttggggtcggaggagccctcgatacctgcgaatacatctgctttccaggctgctgtttattctgagacgactgtgctgtagcttcccttgcagctgcaataacccgcaggtcttcactgaggtggaggctttggggtagaattctccatttattttactacttaatacaaaacatttatttttgaccagtcctgtggcttccattagcaatatgtttcctttcccaaatatgcaaatagtggctttgtttgctcaattttgtgagtgctttggaatttaaatgattgtataactcaagaagattacttttctatgttgctcaagctgtgcctgccaacttgtaacttaataaatacaggaaatcctcag

SEQ ID NO: 333799 - DNA, 470 bp, Homo sapiens
aggtcccaccctaatgatctcatgttaacttgattacatctgcaaagaccccacttccaaataaggtcaccattcacaggtactggggcttaggacttcaacatatcttttgttgggacatgactcaacccataacagtatggaaaggttctcttctcagagttaaatgtggctcccaatctctacctcacagatgatcaagcggtgctgattcacgagagtggaagcctccagagcttggggctttctggctgctcttcattgacctgtgtgttcccagcacacgaacagcgcccctaacggagatttgttcagcgactgaatatacacctgtaaacgagtagcatgtatacattgattttgattacaaatggttctgtattatataccaccgttctgactgcttttttcacttatagcttggaaattgtcttctgttggtaatacagaaatctgtttcagtcttaaag

SEQ ID NO: 333800 - DNA, 357 bp, Homo sapiens
tttaaaccctcagccgtggcacgaaggtggcttctgtccgtggcaggatccagaacagctgcttctgagggttggggcagggtgaggagccccacacatgctgtgtcttgggtagggaaggggcagagtgacgaagctcttccaacctgggtaatgtcacttcttgctcagagcatgtttttattcagacttcgagaccaaacatgacatctttgttcctcagacgagggcatgggtttagaaagaactgaactctttggctgtggtttagggtttagctaagagggcatcgctggggagccccacgtgttgccaagatcttggtgcaataaaatactccggttttgtgaaaaaaaa

SEQ ID NO: 333801 - DNA, 228 bp, Homo sapiens
gaccccatgcttcacgacgacataccaacccttgccaattcagcggggggaagatcaccaaggatgtaggctatccggaattcctcaacatacgtccgtatatgtcccagaataatggtgatcctgtcatgtatggactctatgctgtcctggtgcactcgggctacagctgccatgccgggcactattactgctacgtgaagctcaagcatgcgggatcctctagat

SEQ ID NO: 333802 - DNA, 5957 bp, Homo sapiens
ctttcggagttagcgcagcgcgaacgctgggtgcggcgcctttaagcgtcgcggtgacacgtgtgtgaggcgccggaggcccggatggtgcgcgtgctgggccgcgggccgaaggagtcgccagggctgcgtaggcttgtggcgcgcccgcggagaggccggggctctgacgcccgctctgcggcttcggtgtttgaacaggccacagtccaggagcgcttacattcaggagctccgcgtagcacctgcccaaccaaactcagccctccgttaagatcctggttccatgccgcagtaggacagcaggcccaagtctgcacatcccagtgatgcaccatgccaatagtggataagttgaaggaggccctgaaacccggccgcaaggactcggctgatgatggagaactggggaagcttcttgcctcctctgccaagaaggtccttttacagaaaatcgagttcgagccagccagcaagagcttctcctaccagctggaggccttaaagagcaaatatgtgttgctcaaccccaaaacagagggagctagtcgccacaagagtggagatgacccaccggccaggagacagggcagtgagcacacgtatgagagctgtggtgacggagtcccagccccgcagaaagtgcttttccccacggagcgactgtctctgaggtgggagcgggtcttccgcgtgggcgcaggactccacaaccttggcaacacctgctttctcaatgccaccatccagtgcttgacctacacaccacctctagccaactacctgctctccaaggagcatgctcgcagctgccaccagggaagcttctgcatgctgtgtgtcatgcagaaccacattgtccaggccttcgccaacagcggcaacgccatcaagcccgtctccttcatccgagacctgaaaaagatcgcccgacacttccgctttgggaaccaggaggacgcgcatgagttcctgcggtacaccatcgacgccatgcagaaagcctgcctgaatggctgtgccaagttggatcgtcaaacgcaggctactaccttggtccatcaaatttttggagggtatctcagatcacgcgtgaagtgctccgtgtgcaagagcgtctcggacacctacgacccctacttggacgtcgcgctggagatccggcaagctgcgaatattgtgcgtgctctggaactttttgtgaaagcagatgtcctgagtggagagaatgcctacatgtgtgctaaatgcaagaagaaggttccagccagcaagcgcttcaccatccacagaacatccaacgtcttaaccctttccctcaagcgctttgccaacttcagcggggggaagatcaccaaggatgtaggctatccggaattcctcaacatacgtccgtatatgtcccagaataatggtgatcctgtcatgtatggactctatgctgtcctggtgcactcgggctacagctgccatgccgggcactattactgctacgtgaaggcaagcaatggacagtggtaccagatgaatgattccttggtccattccagcaacgtcaaggtggttctgaaccagcaggcctacgtgctgttctatctgcgaattccaggctctaagaaaagtcccgagggcctcatctccaggacaggctcctcctcccttcccggccgcccgagtgtgattccagatcactccaagaagaacatcggcaatgggattatttcctccccactgactggaaagcgacaagactctgggacgatgaagaagccgcacaccactgaagagattggtgtgcccatatccaggaatggctccaccctgggcctgaagtcccagaacggctgcattcctccaaagctgccctcggggtccccttcccccaaactctcccagacacccacacacatgccaaccatcctagacgaccctggaaagaaggtgaagaagccagctcctccacagcacttttcccccagaactgctcaggggctgcctgggaccagcaactcgaatagcagcagatctgggagccaaaggcagggctcctgggacagcagggatgttgtcctctctacctcacctaagctcctggctacagccactgccaacgggcatgggctgaaggggaacgacgagagcgctggcctcgacaggaggggctccagcagctccagcccagagcactcggccagcagcgactccaccaaggccccccagacccccaggagtggagcggcccatctctgcgattctcaggaaacgaactgttccaccgctggccactccaaaacgccgccaagtggagcagattctaagacggtgaagctgaagtcccctgtcctgagcaacaccaccactgagcctgcaagcaccatgtctcctccaccagccaaaaaactggccctttctgccaagaaggccagcaccctgtggagggcgaccggcaatgacctccgtccacctcccccctcaccatcctccgacctcacccaccccatgaaaacctctcaccccgtcgttgcctccacttggcccgtccatagagccagggctgtgtcacctgctccccaatcatccagccgcctgcaaccccccttcagcccccaccccacattgctgtccagtacccccaagcccccagggacgtcagaaccacggagctgctcctccatctcgacggcgctgcctcaggtcaacgaggaccttgtgtcccttccacaccagttgccagaggccagtgagcccccccggagcccctctgagaagaggaaaaagacctttgtgggagagccgcagaggctgggctcagagacgtgcctcccacagcacatcagggaggccactgcggctccccacgggaagaggaagaggaagaagaagaagcgcccggaggacacagctgccagcgccctgcaggaggggcagacacagagacagcctgggagccccatgtacaggagggagggccaggcacagctgcccgctgtcagacggcaggaagatggcacacagccacaggtgaatggccagcaggtgggatgtgttacggacggccaccacgcgagcagcaggaagcggaggaggaaaggagcagaaggtcttggtgaagaaggcggcctgcaccaggacccacttcggcacagctgctctcccatgggtgatggtgatccagaggccatggaagagtctccaaggaaaaagaaaaaaagaaagcaggagacacagcgggcagtagaagaggatgggcatctcaaatgcccaaggagtgccaagccccaagatgctgttgtccccgagtccagcagctgcgcaccatccgcgaatggctggtgtcctggggaccgcatggggctgagccaggcccctcctgtgtcttggaatggagagcgggagtctgatgtggtccaggaactgctcaaatactcatctgataaagcttacgggagaaaagttctgacctgggatggcaagatgtcggcggtcagtcaggatgctattgaagacagcagacaggcccggactgagaccgtggttgatgactgggacgaagagtttgaccgagggaaggaaaagaaaattaaaaaatttaagagagagaagaggagaaacttcaacgccttccagaaacttcagactcgacggaacttctggtctgtgactcacccagcaaaggctgccagcctcagctatcgccgctgactgtgcccctgtggaaggagcctcctggagacaaggcgtcccttcccgggagctgtcggtctggatctgagggagctctctgtgtgggctctgctgtgctgggagcctgtcacggtaggagctctcccggtaccagtgtccacagaccgcccaacatagaggctttgaggcttctctagatcggaacctctttggtgacattcccgaccagccctgcaagagaaacgacagtgtgtgtgtgagcagaggtggctgcacacctgctggacatctttgccaggctgtgccttctcatgtttcatagacagtggtctgtgctggcagaggctgctgcccctggttggggctatcaggagagtgggggatggtggccacatgtcctccaggtggtctcccggtgcatagctggtggctctgggcaagccatcccttgcttctcggggctgacgccaccgttgtgtccgagcccgccctcccctgcttcctcagcgggaccccttcatctgttggccttacctgtcctcagaaaggaagaggtgaccccacccagccacctctcccttttatggaactcgagagggtggccctactgtgcaccccttccttgtgagtagctctcaactgtcctggagagcagaggctatttggggtcggaggagccctcgatacctgcgaatacatctgctttccaggctgctgtttattctgagacgactgtgctgtagcttcccttgcagctgcaataacccgcaggtcttcactgaggtggaggctttggggtagaattctccatttattttactacttaatacaaaacatttatttttgaccagtcctgtggcttccattagcaatatgtttcctttcccaaatatgcaaatagtggctttgtttgctcaattttgtgagtgctttggaatttaaatgattgtataactcaagaagattacttttctatgttgctcaagctgtgcctgccaacttgtaacttaataaatacaggaaatcctcagagaaggtgatattttcaggaaaaagacaaatgccctcatagtagtgggaagtgtgaaggtgaccgtgaacatccttcctcatcgggtctgtccccgtcatttcctcccggagtcgtcgcaggtggagatggacaacgtggtgttggacttagacctccttcagtgtggctctgctgggccagaggcatcctgctgtcccgggtggctgcctcgctgtctgcaccccctctccctggggcagctttgcttcctgcccctgtgctcggggcctgggtggttactggcgtgtagatggaattgcttttttaatatgggaagatacatttatttttttccatgtgggtgggtgtctctttttggattttcttctgtttttacgtttctcttcttagaagggtgggagagaatcaagctcctgtggccacctgtgtcccagcagcagtgagtggagctgctcagggtgccctctcctgcggaccagtctctgaatgttcaaagatgagggcctggcttccgtgctctggctttgtaacttatctggaagggaaagcacatgccttcacgggcagggtatgttccttttcttctcggggtgttgacttgcattcctgtgtgaactgttccctctgccatgtttaccgtgtgatgttctgtagttgaaaatgttagttgtctgctggcacagaatttatctcgttcctttctctcccttctctcctccaaatcagtctcttcccttctccactagataactgtaaaaccttttcctggggtacatacattcgttaactcttgggcagtggtgagcacgagatgactttctgcagcgtttatcactgttgggtggagtcacgtcccttccctccaccgaagtcatcaaccagatagggaagggaaagatgaggcccagaaaacgagttcaaactctaggtcttgtacacgtatgtaagtaaatgtcaataacccaagcctttgtcatagcagtcacttggttgacttaggatctgggtctgttgaattttgtgcttgggaatggagctggagggagtggggcctgtgtacagcagctacctctcccaggtcctctcacttgcctgccccgcgtcctggttgcatggccgcacctgtgtgtgtgcagaggtctgtgtcccatcctctgcacctcctttccgggggcctggggagccccacgtgttgccaagatcttggtgcaataaaatactccggttttgtgaaaaaaaa

SEQ ID NO: 333803 - DNA, 6200 bp, Homo sapiens
gtcacttttgaagaatggtgggacagtagatggtggcagttgatttttcattttctaactttgcagaataaaaattgaatgatcctgtattggtcccccaagtatttcagagctcccggagtctgggaagtgccatggtaaatagtcacacaggccagatgagagactgaggtgtgcatgttctgtgggaggggaagtgtagcctgcgggtgtggaatggtctgggtggccgtgggaaacgtggagagagccctggaaacagccccgctttgtgccagtgaggagtcggggaagcagctggggagacggggctggagagcctggggagaggggaagctcttctggagggagtgggtgcaccggcgcactgcgcagcctcctagtaaagggcctgcagacccagctggcctcatgcctggaggccttaggcgactctgaggaaggcagttccagagcagtgagtcaggaccagatgcagtgggttgcaagtagaaccaggagcagagactggatgtggtgtattgtttcagaaccttccagcgtgagtagctaccatatggatacgtaggcgtgggaggcgccaggcagccccgggtccgggtgagaagaggccccagagctcagagtgcctcagatcccagttagtgagcggtgcgggggacatgaatgagggcagggctcctgaccccgaagcccacgtctgactccgctgtcctctctgagacgggtgcagagccggggagatttggtcctgtttgtgcctttgttcccacccccacccctcttcccagattggggaccagctgtctgtgaccagcagagaagtggaagggtgggctgggtgggcgccctagctcagggggatgtttggcctcccgcctcactctagatttgggtacttactttttattgagaccaaaaagaaaaggcaacactgggtgaggatacacgtacatttctcggggcttttattttctgtgaagtgggtggcagtgggcattgtgaaggtttgaaatggctactgtgggtagtggggccctgaggaggtcagagctctgcagagagactgccaggcagcgtgggctgaggatggaggttaagggtctgtggtgactcgggtggggggtggagtttcccagcctcacgctgagcttgtgactggtgggcatggggctgctgggatggggccatccctcgtgtcatcttgctgagcccttcccttaaaggctggggtctccttttcaggttggatcgtcaaacgcaggctactaccttggtccatcaaatttttggagggtatctcagatcacgcgtgaagtgctccgtgtgcaagagcgtctcggacacctacgacccctacttggacgtcgcgctggagatccggcaagctgcgaatattgtgcgtgctctggaactttttgtgaaagcagatgtcctgagtggagagaatgcctacatgtgtgctaaatgcaagaagaaggttccagccagcaagcgcttcaccatccacagaacatccaacgtcttaaccctttccctcaagcgctttgccaacttcagcggggggaagatcaccaaggatgtaggctatccggaattcctcaacatacgtccgtatatgtcccagaataatggtgatcctgtcatgtatggactctatgctgtcctggtgcactcgggctacagctgccatgccgggcactattactgctacgtgaaggcaagcaatggacagtggtaccagatgaatgattccttggtccattccagcaacgtcaaggtggttctgaaccagcaggcctacgtgctgttctatctgcgaattccaggctctaagaaaagtcccgagggcctcatctccaggacaggctcctcctcccttcccggccgcccgagtgtgattccagatcactccaagaagaacatcggcaatgggattatttcctccccactgactggaaagcgacaagactctgggacgatgaagaagccgcacaccactgaagagattggtgtgcccatatccaggaatggctccaccctgggcctgaagtcccagaacggctgcattcctccaaagctgccctcggggtccccttcccccaaactctcccagacacccacacacatgccaaccatcctagacgaccctggaaagaaggtgaagaagccagctcctccacagcacttttcccccagaactgctcaggggctgcctgggaccagcaactcgaatagcagcagatctgggagccaaaggcagggctcctgggacagcagggatgttgtcctctctacctcacctaagctcctggctacagccactgccaacgggcatgggctgaaggggaacgacgagagcgctggcctcgacaggaggggctccagcagctccagcccagagcactcggccagcagcgactccaccaaggccccccagacccccaggagtggagcggcccatctctgcgattctcaggaaacgaactgttccaccgctggccactccaaaacgccgccaagtggagcagattctaagacggtgaagctgaagtcccctgtcctgagcaacaccaccactgagcctgcaagcaccatgtctcctccaccagccaaaaaactggccctttctgccaagaaggccagcaccctgtggagggcgaccggcaatgacctccgtccacctcccccctcaccatcctccgacctcacccaccccatgaaaacctctcaccccgtcgttgcctccacttggcccgtccatagagccagggctgtgtcacctgctccccaatcatccagccgcctgcaaccccccttcagcccccaccccacattgctgtccagtacccccaagcccccagggacgtcagaaccacggagctgctcctccatctcgacggcgctgcctcaggtcaacgaggaccttgtgtcccttccacaccagttgccagaggccagtgagcccccccggagcccctctgagaagaggaaaaagacctttgtgggagagccgcagaggctgggctcagagacgtgcctcccacagcacatcagggaggccactgcggctccccacgggaagaggaagaggaagaagaagaagcgcccggaggacacagctgccagcgccctgcaggaggggcagacacagagacagcctgggagccccatgtacaggagggagggccaggcacagctgcccgctgtcagacggcaggaagatggcacacagccacaggtgaatggccagcaggtgggatgtgttacggacggccaccacgcgagcagcaggaagcggaggaggaaaggagcagaaggtcttggtgaagaaggcggcctgcaccaggacccacttcggcacagctgctctcccatgggtgatggtgatccagaggccatggaagagtctccaaggaaaaagaaaaaaagaaagcaggagacacagcgggcagtagaagaggatgggcatctcaaatgcccaaggagtgccaagccccaagatgctgttgtccccgagtccagcagctgcgcaccatccgcgaatggctggtgtcctggggaccgcatggggctgagccaggcccctcctgtgtcttggaatggagagcgggagtctgatgtggtccaggaactgctcaaatactcatctgataaagcttacgggagaaaagttctgacctgggatggcaagatgtcggcggtcagtcaggatgctattgaagacagcagacaggcccggactgagaccgtggttgatgactgggacgaagagtttgaccgagggaaggaaaagaaaattaaaaaatttaagagagagaagaggagaaacttcaacgccttccagaaacttcagactcgacggaacttctggtctgtgactcacccagcaaaggctgccagcctcagctatcgccgctgactgtgcccctgtggaaggaggactaccgtggtttgttctgcagcctcctggagacaaggcgtcccttcccgggagctgtcggtctggatctgagggagctctctgtgtgggctctgctgtgctgggagcctgtcacggtaggagctctcccggtaccagtgtccacagaccgcccaacatagaggctttgaggcttctctagatcggaacctctttggtgacattcccgaccagccctgcaagagaaacgacagtgtgtgtgtgagcagaggtggctgcacacctgctggacatctttgccaggctgtgccttctcatgtttcatagacagtggtctgtgctggcagaggctgctgcccctggttggggctatcaggagagtgggggatggtggccacatgtcctccaggtggtctcccggtgcatagctggtggctctgggcaagccatcccttgcttctcggggctgacgccaccgttgtgtccgagcccgccctcccctgcttcctcagcgggaccccttcatctgttggccttacctgtcctcagaaaggaagaggtgaccccacccagccacctctcccttttatggaactcgagagggtggccctactgtgcaccccttccttgtgagtagctctcaactgtcctggagagcagaggctatttggggtcggaggagccctcgatacctgcgaatacatctgctttccaggctgctgtttattctgagacgactgtgctgtagcttcccttgcagctgcaataacccgcaggtcttcactgaggtggaggctttggggtagaattctccatttattttactacttaatacaaaacatttatttttgaccagtcctgtggcttccattagcaatatgtttcctttcccaaatatgcaaatagtggctttgtttgctcaattttgtgagtgctttggaatttaaatgattgtataactcaagaagattacttttctatgttgctcaagctgtgcctgccaacttgtaacttaataaatacaggaaatcctcagagaaggtgatattttcaggaaaaagacaaatgccctcatagtagtgggaagtgtgaaggtgaccgtgaacatccttcctcatcgggtctgtccccgtcatttcctcccggagtcgtcgcaggtggagatggacaacgtggtgttggacttagacctccttcagtgtggctctgctgggccagaggcatcctgctgtcccgggtggctgcctcgctgtctgcaccccctctccctggggcagctttgcttcctgcccctgtgctcggggcctgggtggttactggcgtgtagatggaattgcttttttaatatgggaagatacatttatttttttccatgtgggtgggtgtctctttttggattttcttctgtttttacgtttctcttcttagaagggtgggagagaatcaagctcctgtggccacctgtgtcccagcagcagtgagtggagctgctcagggtgccctctcctgcggaccagtctctgaatgttcaaagatgagggcctggcttccgtgctctggctttgtaacttatctggaagggaaagcacatgccttcacgggcagggtatgttccttttcttctcggggtgttgacttgcattcctgtgtgaactgttccctctgccatgtttaccgtgtgatgttctgtagttgaaaatgttagttgtctgctggcacagaatttatctcgttcctttctctcccttctctcctccaaatcagtctcttcccttctccactagataactgtaaaaccttttcctggggtacatacattcgttaactcttgggcagtggtgagcacgagatgactttctgcagcgtttatcactgttgggtggagtcacgtcccttccctccaccgaagtcatcaaccagatagggaagggaaagatgaggcccagaaaacgagttcaaactctaggtcttgtacacgtatgtaagtaaatgtcaataacccaagcctttgtcatagcagtcacttggttgacttaggatctgggtctgttgaattttgtgcttgggaatggagctggagggagtggggcctgtgtacagcagctacctctcccaggtcctctcacttgcctgccccgcgtcctggttgcatggccgcacctgtgtgtgtgcagaggtctgtgtcccatcctctgcacctcctttccgggggcctggggagccccacgtgttgccaagatcttggtgcaataaaatactccggttttgtgaaaaaaaa

SEQ ID NO: 333804 - DNA, 4738 bp, Homo sapiens
ctttcggagttagcgcagcgcgaacgctgggtgcggcgcctttaagcgtcgcggtgacacgtgtgtgaggcgccggaggcccggatggtgcgcgtgctgggccgcgggccgaaggagtcgccagggctgcgtaggcttgtggcgcgcccgcggagaggccggggctctgacgcccgctctgcggcttcggtgtttgaacaggccacagtccaggagcgcttacattcaggagctccgcgtagcacctgcccaaccaaactcagccctccgttaagatcctggttccatgccgcagtaggacagcaggcccaagtctgcacatcccagtgatgcaccatgccaatagtggataagttgaaggaggccctgaaacccggccgcaaggactcggctgatgatggagaactggggaagcttcttgcctcctctgccaagaaggtccttttacagaaaatcgagttcgagccagccagcaagagcttctcctaccagctggaggccttaaagagcaaatatgtgttgctcaaccccaaaacagagggagctagtcgccacaagagtggagatgacccaccggccaggagacagggcagtgagcacacgtatgagagctgtggtgacggagtcccagccccgcagaaagtgcttttccccacggagcgactgtctctgaggtgggagcgggtcttccgcgtgggcgcaggactccacaaccttggcaacacctgctttctcaatgccaccatccagtgcttgacctacacaccacctctagccaactacctgctctccaaggagcatgctcgcagctgccaccagggaagcttctgcatgctgtgtgtcatgcagaaccacattgtccaggccttcgccaacagcggcaacgccatcaagcccgtctccttcatccgagacctgaaaaagatcgcccgacacttccgctttgggaaccaggaggacgcgcatgagttcctgcggtacaccatcgacgccatgcagaaagcctgcctgaatggctgtgccaagttggatcgtcaaacgcaggctactaccttggtccatcaaatttttggagggtatctcagatcacgcgtgaagtgctccgtgtgcaagagcgtctcggacacctacgacccctacttggacgtcgcgctggagatccggcaagctgcgaatattgtgcgtgctctggaactttttgtgaaagcagatgtcctgagtggagagaatgcctacatgtgtgctaaatgcaagaagaaggttccagccagcaagcgcttcaccatccacagaacatccaacgtcttaaccctttccctcaagcgctttgccaacttcagcggggggaagatcaccaaggatgtaggctatccggaattcctcaacatacgtccgtatatgtcccagaataatggtgatcctgtcatgtatggactctatgctgtcctggtgcactcgggctacagctgccatgccgggcactattactgctacgtgaaggcaagcaatggacagtggtaccagatgaatgattccttggtccattccagcaacgtcaaggtggttctgaaccagcaggcctacgtgctgttctatctgcgaattccaggctctaagaaaagtcccgagggcctcatctccaggacaggctcctcctcccttcccggccgcccgagtgtgattccagatcactccaagaagaacatcggcaatgggattatttcctccccactgactggaaagcgacaagactctgggacgatgaagaagccgcacaccactgaagagattggtgtgcccatatccaggaatggctccaccctgggcctgaagtcccagaacggctgcattcctccaaagctgccctcggggtccccttcccccaaactctcccagacacccacacacatgccaaccatcctagacgaccctggaaagaaggtgaagaagccagctcctccacagcacttttcccccagaactgctcaggggctgcctgggaccagcaactcgaatagcagcagatctgggagccaaaggcagggctcctgggacagcagggatgttgtcctctctacctcacctaagctcctggctacagccactgccaacgggcatgggctgaaggggaacgacgagagcgctggcctcgacaggaggggctccagcagctccagcccagagcactcggccagcagcgactccaccaaggccccccagacccccaggagtggagcggcccatctctgcgattctcaggaaacgaactgttccaccgctggccactccaaaacgccgccaagtggagcagattctaagacggtgaagctgaagtcccctgtcctgagcaacaccaccactgagcctgcaagcaccatgtctcctccaccagccaaaaaactggccctttctgccaagaaggccagcaccctgtggagggcgaccggcaatgacctccgtccacctcccccctcaccatcctccgacctcacccaccccatgaaaacctctcaccccgtcgttgcctccacttggcccgtccatagagccagggctgtgtcacctgctccccaatcatccagccgcctgcaaccccccttcagcccccaccccacattgctgtccagtacccccaagcccccagggacgtcagaaccacggagctgctcctccatctcgacggcgctgcctcaggtcaacgaggaccttgtgtcccttccacaccagttgccagaggccagtgagcccccccggagcccctctgagaagaggaaaaagacctttgtgggagagccgcagaggctgggctcagagacgtgcctcccacagcacatcagggaggccactgcggctccccacgggaagaggaagaggaagaagaagaagcgcccggaggacacagctgccagcgccctgcaggaggggcagacacagagacagcctgggagccccatgtacaggagggagggccaggcacagctgcccgctgtcagacggcaggaagatggcacacagccacaggtgaatggccagcaggtgggatgtgttacggacggccaccacgcgagcagcaggaagcggaggaggaaaggagcagaaggtcttggtgaagaaggcggcctgcaccaggacccacttcggcacagctgctctcccatgggtgatggtgatccagaggccatggaagagtctccaaggaaaaagaaaaaaagaaagcaggagacacagcgggcagtagaagaggatgggcatctcaaatgcccaaggagtgccaagccccaagatgctgttgtccccgagtccagcagctgcgcaccatccgcgaatggctggtgtcctggggaccgcatggggctgagccaggcccctcctgtgtcttggaatggagagcgggagtctgatgtggtccaggaactgctcaaatactcatctgataaagcttacgggagaaaagttctgacctgggatggcaagatgtcggcggtcagtcaggatgctattgaagacagcagacaggcccggactgagaccgtggttgatgactgggacgaagagtttgaccgagggaaggaaaagaaaattaaaaaatttaagagagagaagaggagaaacttcaacgccttccagaaacttcagactcgacggaacttctggtctgtgactcacccagcaaaggctgccagcctcagctatcgccgctgactgtgcccctgtggaaggaggactaccgtggtttgttctgcagcctcctggagacaaggcgtcccttcccgggagctgtcggtctggatctgagggagctctctgtgtgggctctgctgtgctgggagcctgtcacggtaggagctctcccggtaccagtgtccacagaccgcccaacatagaggctttgaggcttctctagatcggaacctctttggtgacattcccgaccagccctgcaagagaaacgacagtgtgtgtgtgagcagaggtggctgcacacctgctggacatctttgccaggctgtgccttctcatgtttcatagacagtggtctgtgctggcagaggctgctgcccctggttggggctatcaggagagtgggggatggtggccacatgtcctccaggtggtctcccggtgcatagctggtggctctgggcaagccatcccttgcttctcggggctgacgccaccgttgtgtccgagcccgccctcccctgcttcctcagcgggaccccttcatctgttggccttacctgtcctcagaaaggaagaggtgaccccacccagccacctctcccttttatggaactcgagagggtggccctactgtgcaccccttccttgtgagtagctctcaactgtcctggagagcagaggctatttggggtcggaggagccctcgatacctgcgaatacatctgctttccaggctgctgtttattctgagacgactgtgctgtagcttcccttgcagctgcaataacccgcaggtcttcactgaggtggaggctttggggtagaattctccatttattttactacttaatacaaaacatttatttttgaccagtcctgtggcttccattagcaatatgtttcctttcccaaatatgcaaatagtggctttgtttgctcaattttgtgagtgctttggaatttaaatgattgtataactcaagaagattacttttctatgttgctcaagctgtgcctgccaacttgtaacttaataaatacaggaaatcctcag

SEQ ID NO: 333805 - DNA, 4416 bp, Homo sapiens
cattggtgtgaatcagagtcctccccaccttccaggaaatgcagagtagggcactgggcttcctcctgggcaccataagccccgaagctgcaccggcctccactactccctgggcccagtcctcagcctccaagccctccgaggagctctcctcatcttcctcctcactgactggaaagcgacaagactctgggacgatgaagaagccgcacaccactgaagagattggtgtgcccatatccaggaatggctccaccctgggcctgaagtcccagaacggctgcattcctccaaagctgccctcggggtccccttcccccaaactctcccagacacccacacacatgccaaccatcctagacgaccctggaaagaaggtgaagaagccagctcctccacagcacttttcccccagaactgctcaggggctgcctgggaccagcaactcgaatagcagcagatctgggagccaaaggcagggctcctgggacagcagggatgttgtcctctctacctcacctaagctcctggctacagccactgccaacgggcatgggctgaaggggaacgacgagagcgctggcctcgacaggaggggctccagcagctccagcccagagcactcggccagcagcgactccaccaaggccccccagacccccaggagtggagcggcccatctctgcgattctcaggaaacgaactgttccaccgctggccactccaaaacgccgccaagtggagcagattctaagacggtgaagctgaagtcccctgtcctgagcaacaccaccactgagcctgcaagcaccatgtctcctccaccagccaaaaaactggccctttctgccaagaaggccagcaccctgtggagggcgaccggcaatgacctccgtccacctcccccctcaccatcctccgacctcacccaccccatgaaaacctctcaccccgtcgttgcctccacttggcccgtccatagagccagggctgtgtcacctgctccccaatcatccagccgcctgcaaccccccttcagcccccaccccacattgctgtccagtacccccaagcccccagggacgtcagaaccacggagctgctcctccatctcgacggcgctgcctcaggtcaacgaggaccttgtgtcccttccacaccagttgccagaggccagtgagcccccccggagcccctctgagaagaggaaaaagacctttgtgggagagccgcagaggctgggctcagagacgtgcctcccacagcacatcagggaggccactgcggctccccacgggaagaggaagaggaagaagaagaagcgcccggaggacacagctgccagcgccctgcaggaggggcagacacagagacagcctgggagccccatgtacaggagggagggccaggcacagctgcccgctgtcagacggcaggaagatggcacacagccacaggtgaatggccagcaggtgggatgtgttacggacggccaccacgcgagcagcaggaagcggaggaggaaaggagcagaaggtcttggtgaagaaggcggcctgcaccaggacccacttcggcacagctgctctcccatgggtgatggtgatccagaggccatggaagagtctccaaggaaaaagaaaaaaagaaagcaggagacacagcgggcagtagaagaggatgggcatctcaaatgcccaaggagtgccaagccccaagatgctgttgtccccgagtccagcagctgcgcaccatccgcgaatggctggtgtcctggggaccgcatggggctgagccaggcccctcctgtgtcttggaatggagagcgggagtctgatgtggtccaggaactgctcaaatactcatctgataaagcttacgggagaaaagttctgacctgggatggcaagatgtcggcggtcagtcaggatgctattgaagacagcagacaggcccggactgagaccgtggttgatgactgggacgaagagtttgaccgagggaaggaaaagaaaattaaaaaatttaagagagagaagaggagaaacttcaacgccttccagaaacttcagactcgacggaacttctggtctgtgactcacccagcaaaggctgccagcctcagctatcgccgctgactgtgcccctgtggaaggaggactaccgtggtttgttctgcagcctcctggagacaaggcgtcccttcccgggagctgtcggtctggatctgagggagctctctgtgtgggctctgctgtgctgggagcctgtcacggtaggagctctcccggtaccagtgtccacagaccgcccaacatagaggctttgaggcttctctagatcggaacctctttggtgacattcccgaccagccctgcaagagaaacgacagtgtgtgtgtgagcagaggtggctgcacacctgctggacatctttgccaggctgtgccttctcatgtttcatagacagtggtctgtgctggcagaggctgctgcccctggttggggctatcaggagagtgggggatggtggccacatgtcctccaggtggtctcccggtgcatagctggtggctctgggcaagccatcccttgcttctcggggctgacgccaccgttgtgtccgagcccgccctcccctgcttcctcagcgggaccccttcatctgttggccttacctgtcctcagaaaggaagaggtgaccccacccagccacctctcccttttatggaactcgagagggtggccctactgtgcaccccttccttgtgagtagctctcaactgtcctggagagcagaggctatttggggtcggaggagccctcgatacctgcgaatacatctgctttccaggctgctgtttattctgagacgactgtgctgtagcttcccttgcagctgcaataacccgcaggtcttcactgaggtggaggctttggggtagaattctccatttattttactacttaatacaaaacatttatttttgaccagtcctgtggcttccattagcaatatgtttcctttcccaaatatgcaaatagtggctttgtttgctcaattttgtgagtgctttggaatttaaatgattgtataactcaagaagattacttttctatgttgctcaagctgtgcctgccaacttgtaacttaataaatacaggaaatcctcagagaaggtgatattttcaggaaaaagacaaatgccctcatagtagtgggaagtgtgaaggtgaccgtgaacatccttcctcatcgggtctgtccccgtcatttcctcccggagtcgtcgcaggtggagatggacaacgtggtgttggacttagacctccttcagtgtggctctgctgggccagaggcatcctgctgtcccgggtggctgcctcgctgtctgcaccccctctccctggggcagctttgcttcctgcccctgtgctcggggcctgggtggttactggcgtgtagatggaattgcttttttaatatgggaagatacatttatttttttccatgtgggtgggtgtctctttttggattttcttctgtttttacgtttctcttcttagaagggtgggagagaatcaagctcctgtggccacctgtgtcccagcagcagtgagtggagctgctcagggtgccctctcctgcggaccagtctctgaatgttcaaagatgagggcctggcttccgtgctctggctttgtaacttatctggaagggaaagcacatgccttcacgggcagggtatgttccttttcttctcggggtgttgacttgcattcctgtgtgaactgttccctctgccatgtttaccgtgtgatgttctgtagttgaaaatgttagttgtctgctggcacagaatttatctcgttcctttctctcccttctctcctccaaatcagtctcttcccttctccactagataactgtaaaaccttttcctggggtacatacattcgttaactcttgggcagtggtgagcacgagatgactttctgcagcgtttatcactgttgggtggagtcacgtcccttccctccaccgaagtcatcaaccagatagggaagggaaagatgaggcccagaaaacgagttcaaactctaggtcttgtacacgtatgtaagtaaatgtcaataacccaagcctttgtcatagcagtcacttggttgacttaggatctgggtctgttgaattttgtgcttgggaatggagctggagggagtggggcctgtgtacagcagctacctctcccaggtcctctcacttgcctgccccgcgtcctggttgcatggccgcacctgtgtgtgtgcagaggtctgtgtcccatcctctgcacctcctttccgggggcctggggagccccacgtgttgccaagatcttggtgcaataaaatactccggttttgtgaaaaaaaa

SEQ ID NO: 333806 - DNA, 4976 bp, Homo sapiens
ctttcggagttagcgcagcgcgaacgctgggtgcggcgcctttaagcgtcgcggtgacacgtgtgtgaggcgccggaggcccggatggtgcgcgtgctgggccgcgggccgaaggagtcgccagggctgcgtaggcttgtggcgcgcccgcggagaggccggggctctgacgcccgctctgcggcttcggtgtttgaacaggccacagtccaggagcgcttacattcaggagctccgcgtagcacctgcccaaccaaactcagccctccgttaagatcctggttccatgccgcagtaggacagcaggcccaagtctgcacatcccagtgatgcaccatgccaatagtggataagttgaaggaggccctgaaacccggccgcaaggactcggctgatgatggagaactggggaagcttcttgcctcctctgccaagaaggtccttttacagaaaatcgagttcgagccagccagcaagagcttctcctaccagctggaggccttaaagagcaaatatgtgttgctcaaccccaaaacagagggagctagtcgccacaagagtggagatgacccaccggccaggagacagggcagtgagcacacgtatgagagctgtggtgacggagtcccagccccgcagaaagtgcttttccccacggagcgactgtctctgaggtgggagcgggtcttccgcgtgggcgcaggactccacaaccttggcaacacctgctttctcaatgccaccatccagtgcttgacctacacaccacctctagccaactacctgctctccaaggagcatgctcgcagctgccaccagggaagcttctgcatgctgtgtgtcatgcagaaccacattgtccaggccttcgccaacagcggcaacgccatcaagcccgtctccttcatccgagacctgaaaaagatcgcccgacacttccgctttgggaaccaggaggacgcgcatgagttcctgcggtacaccatcgacgccatgcagaaagcctgcctgaatggctgtgccaagttggatcgtcaaacgcaggctactaccttggtccatcaaatttttggagggtatctcagatcacgcgtgaagtgctccgtgtgcaagagcgtctcggacacctacgacccctacttggacgtcgcgctggagatccggcaagctgcgaatattgtgcgtgctctggaactttttgtgaaagcagatgtcctgagtggagagaatgcctacatgtgtgctaaatgcaagaagaaggttccagccagcaagcgcttcaccatccacagaacatccaacgtcttaaccctttccctcaagcgctttgccaacttcagcggggggaagatcaccaaggatgtaggctatccggaattcctcaacatacgtccgtatatgtcccagaataatggtgatcctgtcatgtatggactctatgctgtcctggtgcactcgggctacagctgccatgccgggcactattactgctacgtgaaggcaagcaatggacagtggtaccagatgaatgattccttggtccattccagcaacgtcaaggtggttctgaaccagcaggcctacgtgctgttctatctgcgaattccaggctctaagaaaagtcccgagggcctcatctccaggacaggctcctcctcccttcccggccgcccgagtgtgattccagatcactccaagaagaacatcggcaatgggattatttcctccccactgactggaaagcgacaagactctgggacgatgaagaagccgcacaccactgaagagattggtgtgcccatatccaggaatggctccaccctgggcctgaagtcccagaacggctgcattcctccaaagctgccctcggggtccccttcccccaaactctcccagacacccacacacatgccaaccatcctagacgaccctggaaagaaggtgaagaagccagctcctccacagcacttttcccccagaactgctcaggggctgcctgggaccagcaactcgaatagcagcagatctgggagccaaaggcagggctcctgggacagcagggatgttgtcctctctacctcacctaagctcctggctacagccactgccaacgggcatgggctgaaggggaacgacgagagcgctggcctcgacaggaggggctccagcagctccagcccagagcactcggccagcagcgactccaccaaggccccccagacccccaggagtggagcggcccatctctgcgattctcaggaaacgaactgttccaccgctggccactccaaaacgccgccaagtggagcagattctaagacggtgaagctgaagtcccctgtcctgagcaacaccaccactgagcctgcaagcaccatgtctcctccaccagccaaaaaactggccctttctgccaagaaggccagcaccctgtggagggcgaccggcaatgacctccgtccacctcccccctcaccatcctccgacctcacccaccccatgaaaacctctcaccccgtcgttgcctccacttggcccgtccatagagccagggctgtgtcacctgctccccaatcatccagccgcctgcaaccccccttcagcccccaccccacattgctgtccagtacccccaagcccccagggacgtcagaaccacggagctgctcctccatctcgacggcgctgcctcaggtcaacgaggaccttgtgtcccttccacaccagttgccagaggccagtgagcccccccggagcccctctgagaagaggaaaaagacctttgtgggagagccgcagaggctgggctcagagacgtgcctcccacagcacatcagggaggccactgcggctccccacgggaagaggaagaggaagaagaagaagcgcccggaggacacagctgccagcgccctgcaggaggggcagacacagagacagcctgggagccccatgtacaggagggagggccaggcacagctgcccgctgtcagacggcaggaagatggcacacagccacaggtgaatggccagcaggtgggatgtgttacggacggccaccacgcgagcagcaggaagcggaggaggaaaggagcagaaggtcttggtgaagaaggcggcctgcaccaggacccacttcggcacagctgctctcccatgggtgatggtgatccagaggccatggaagagtctccaaggaaaaagaaaaaaagaaagcaggagacacagcgggcagtagaagaggatgggcatctcaaatgcccaaggagtgccaagccccaagatgctgttgtccccgagtccagcagctgcgcaccatccgcgaatggctggtgtcctggggaccgcatggggctgagccaggcccctcctgtgtcttggaatggagagcgggagtctgatgtggtccaggaactgctcaaatactcatctgataaagcttacgggagaaaagttctgacctgggatggcaagatgtcggcggtcagtcaggatgctattgaagacagcagacaggcccggactgagaccgtggttgatgactgggacgaagagtttgaccgagggaaggaaaagaaaattaaaaaatttaagagagagaagaggagaaacttcaacgccttccagaaacttcagactcgacggaacttctggtctgtgactcacccagcaaaggctgccagcctcagctatcgccgctgactgtgcccctgtggaaggaggactaccgtggtttgttctgcagcctcctggagacaaggcgtcccttcccgggagctgtcggtctggatctgagggagctctctgtgtgggctctgctgtgctgggagcctgtcacggtaggagctctcccggtaccagtgtccacagaccgcccaacatagaggctttgaggcttctctagatcggaacctctttggtgacattcccgaccagccctgcaagagaaacgacagtgtgtgtgtgagcagaggtggctgcacacctgctggacatctttgccaggctgtgccttctcatgtttcatagacagtggtctgtgctggcagaggctgctgcccctggttggggctatcaggagagtgggggatggtggccacatgtcctccaggtggtctcccggtgcatagctggtggctctgggcaagccatcccttgcttctcggggctgacgccaccgttgtgtccgagcccgccctcccctgcttcctcagcgggaccccttcatctgttggccttacctgtcctcagaaaggaagaggtgaccccacccagccacctctcccttttatggaactcgagagggtggccctactgtgcaccccttccttgtgagtagctctcaactgtcctggagagcagaggctatttggggtcggaggagccctcgatacctgcgaatacatctgctttccaggctgctgtttattctgagacgactgtgctgtagcttcccttgcagctgcaataacccgcaggtcttcactgaggtggaggctttggggtagaattctccatttattttactacttaatacaaaacatttatttttgaccagtcctgtggcttccattagcaatatgtttcctttcccaaatatgcaaatagtggctttgtttgctcaattttgtgagtgctttggaatttaaatgattgtataactcaagaagattacttttctatgttgctcaagctgtgcctgccaacttgtaacttaataaatacaggaaatcctcagagaaggtgatattttcaggaaaaagacaaatgccctcataggagtggggcctgtgtacagcagctacctctcccaggtcctctcacttgcctgccccgcgtcctggttgcatggccgcacctgtgtgtgtgcagaggtctgtgtcccatcctctgcacctcctttccgggggcctggggagccccacgtgttgccaagatcttggtgcaataaaatactccggttttgtgaaaaaaaa

SEQ ID NO: 333807 - DNA, 4177 bp, Homo sapiens
ctttcggagttagcgcagcgcgaacgctgggtgcggcgcctttaagcgtcgcggtgacacgtgtgtgaggcgccggaggcccggatggtgcgcgtgctgggccgcgggccgaaggagtcgccagggctgcgtaggcttgtggcgcgcccgcggagaggccggggctctgacgcccgctctgcggcttcggtgtttgaacaggccacagtccaggagcgcttacattcaggagctccgcgtagcacctgcccaaccaaactcagccctccgttaagatcctggttccatgccgcagtaggacagcaggcccaagtctgcacatcccagtgatgcaccatgccaatagtggataagttgaaggaggccctgaaacccggccgcaaggactcggctgatgatggagaactggggaagcttcttgcctcctctgccaagaaggtccttttacagaaaatcgagttcgagccagccagcaagagcttctcctaccagctggaggccttaaagagcaaatatgtgttgctcaaccccaaaacagagggagctagtcgccacaagagtggagatgacccaccggccaggagacagggcagtgagcacacgtatgagagctgtggtgacggagtcccagccccgcagaaagtgcttttccccacggagcgactgtctctgaggtgggagcgggtcttccgcgtgggcgcaggactccacaaccttggcaacacctgctttctcaatgccaccatccagtgcttgacctacacaccacctctagccaactacctgctctccaaggagcatgctcgcagctgccaccagggaagcttctgcatgctgtgtgtcatgcagaaccacattgtccaggccttcgccaacagcggcaacgccatcaagcccgtctccttcatccgagacctgaaaaagatcgcccgacacttccgctttgggaaccaggaggacgcgcatgagttcctgcggtacaccatcgacgccatgcagaaagcctgcctgaatggctgtgccaagttggatcgtcaaacgcaggctactaccttggtccatcaaatttttggagggtatctcagatcacgcgtgaagtgctccgtgtgcaagagcgtctcggacacctacgacccctacttggacgtcgcgctggagatccggcaagctgcgaatattgtgcgtgctctggaactttttgtgaaagcagatgtcctgagtggagagaatgcctacatgtgtgctaaatgcaagaagaaggttccagccagcaagcgcttcaccatccacagaacatccaacgtcttaaccctttccctcaagcgctttgccaacttcagcggggggaagatcaccaaggatgtaggctatccggaattcctcaacatacgtccgtatatgtcccagaataatggtgatcctgtcatgtatggactctatgctgtcctggtgcactcgggctacagctgccatgccgggcactattactgctacgtgaaggcaagcaatggacagtggtaccagatgaatgattccttggtccattccagcaacgtcaaggtggttctgaaccagcaggcctacgtgctgttctatctgcgaattccaggctctaagaaaagtcccgagggcctcatctccaggacaggctcctcctcccttcccggccgcccgagtgtgattccagatcactccaagaagaacatcggcaatgggattatttcctccccactgactggaaagcgacaagactctgggacgatgaagaagccgcacaccactgaagagattggtgtgcccatatccaggaatggctccaccctgggcctgaagtcccagaacggctgcattcctccaaagctgccctcggggtccccttcccccaaactctcccagacacccacacacatgccaaccatcctagacgaccctggaaagaaggtgaagaagccagctcctccacagcacttttcccccagaactgctcaggggctgcctgggaccagcaactcgaatagcagcagatctgggagccaaaggcagggctcctgggacagcagggatgttgtcctctctacctcacctaagctcctggctacagccactgccaacgggcatgggctgaaggggaacgacgagagcgctggcctcgacaggaggggctccagcagctccagcccagagcactcggccagcagcgactccaccaaggccccccagacccccaggagtggagcggcccatctctgcgattctcaggaaacgaactgttccaccgctggccactccaaaacgccgccaagtggagcagattctaagacggtgaagctgaagtcccctgtcctgagcaacaccaccactgagcctgcaagcaccatgtctcctccaccagccaaaaaactggccctttctgccaagaaggccagcaccctgtggagggcgaccggcaatgacctccgtccacctcccccctcaccatcctccgacctcacccaccccatgaaaacctctcaccccgtcgttgcctccacttggcccgtccatagagccagggctgtgtcacctgctccccaatcatccagccgcctgcaaccccccttcagcccccaccccacattgctgtccagtacccccaagcccccagggacgtcagaaccacggagctgctcctccatctcgacggcgctgcctcaggtcaacgaggaccttgtgtcccttccacaccagttgccagaggccagtgagcccccccggagcccctctgagaagaggaaaaagacctttgtgggagagccgcagaggctgggctcagagacgtgcctcccacagcacatcagggaggccactgcggctccccacgggaagaggaagaggaagaagaagaagcgcccggaggacacagctgccagcgccctgcaggaggggcagacacagagacagcctgggagccccatgtacaggagggagggccaggcacagctgcccgctgtcagacggcaggaagatggcacacagccacaggtgaatggccagcaggtgggatgtgttacggacggccaccacgcgagcagcaggaagcggaggaggaaaggagcagaaggtcttggtgaagaaggcggcctgcaccaggacccacttcggcacagctgctctcccatgggtgatggtgatccagaggccatggaagagtctccaaggaaaaagaaaaaaagaaagcaggagacacagcgggcagtagaagaggatgggcatctcaaatgcccaaggagtgccaagccccaagatgctgttgtccccgagtccagcagctgcgcaccatccgcgaatggctggtgtcctggggaccgcatggggctgagccaggcccctcctgtgtcttggaatggagagcgggagtctgatgtggtccaggaactgctcaaatactcatctgataaagcttacgggagaaaagttctgacctgggatggcaagatgtcggcggtcagtcaggatgctattgaagacagcagacaggcccggactgagaccgtggttgatgactgggacgaagagtttgaccgagggaaggaaaagaaaattaaaaaatttaagagagagaagaggagaaacttcaacgccttccagaaacttcagactcgacggaacttctggtctgtgactcacccagcaaaggctgccagcctcagctatcgccgctgactgtgcccctgtggaaggagaagggtgggagagaatcaagctcctgtggccacctgtgtcccagcagcagtgagtggagctgctcagggtgccctctcctgcggaccagtctctgaatgttcaaagatgagggcctggcttccgtgctctggctttgtaacttatctggaagggaaagcacatgccttcacgggcaggatgatcaagcggtgctgattcacgagagtggaagcctccagagcttggggctttctggctgctcttcattgacctgtgtgttcccagcacacgaacagcgcccctaacggagatttgttcagcgactgaatatacacctgtaaacgagtagcatgtatacattgattttgattacaaatggttctgtattatataccaccgttctgactgcttttttcacttatagcttggaaattgtcttctgttggtaatacagaaatctgtttcagtcttaaag

SEQ ID NO: 333808 - DNA, 4093 bp, Homo sapiens
ctttcggagttagcgcagcgcgaacgctgggtgcggcgcctttaagcgtcgcggtgacacgtgtgtgaggcgccggaggcccggatggtgcgcgtgctgggccgcgggccgaaggagtcgccagggctgcgtaggcttgtggcgcgcccgcggagaggccggggctctgacgcccgctctgcggcttcggtgtttgaacaggccacagtccaggagcgcttacattcaggagctccgcgtagcacctgcccaaccaaactcagccctccgttaagatcctggttccatgccgcagtaggacagcaggcccaagtctgcacatcccagtgatgcaccatgccaatagtggataagttgaaggaggccctgaaacccggccgcaaggactcggctgatgatggagaactggggaagcttcttgcctcctctgccaagaaggtccttttacagaaaatcgagttcgagccagccagcaagagcttctcctaccagctggaggccttaaagagcaaatatgtgttgctcaaccccaaaacagagggagctagtcgccacaagagtggagatgacccaccggccaggagacagggcagtgagcacacgtatgagagctgtggtgacggagtcccagccccgcagaaagtgcttttccccacggagcgactgtctctgaggtgggagcgggtcttccgcgtgggcgcaggactccacaaccttggcaacacctgctttctcaatgccaccatccagtgcttgacctacacaccacctctagccaactacctgctctccaaggagcatgctcgcagctgccaccagggaagcttctgcatgctgtgtgtcatgcagaaccacattgtccaggccttcgccaacagcggcaacgccatcaagcccgtctccttcatccgagacctgaaaaagatcgcccgacacttccgctttgggaaccaggaggacgcgcatgagttcctgcggtacaccatcgacgccatgcagaaagcctgcctgaatggctgtgccaagttggatcgtcaaacgcaggctactaccttggtccatcaaatttttggagggtatctcagatcacgcgtgaagtgctccgtgtgcaagagcgtctcggacacctacgacccctacttggacgtcgcgctggagatccggcaagctgcgaatattgtgcgtgctctggaactttttgtgaaagcagatgtcctgagtggagagaatgcctacatgtgtgctaaatgcaagaagaaggttccagccagcaagcgcttcaccatccacagaacatccaacgtcttaaccctttccctcaagcgctttgccaacttcagcggggggaagatcaccaaggatgtaggctatccggaattcctcaacatacgtccgtatatgtcccagaataatggtgatcctgtcatgtatggactctatgctgtcctggtgcactcgggctacagctgccatgccgggcactattactgctacgtgaaggcaagcaatggacagtggtaccagatgaatgattccttggtccattccagcaacgtcaaggtggttctgaaccagcaggcctacgtgctgttctatctgcgaattccaggctctaagaaaagtcccgagggcctcatctccaggacaggctcctcctcccttcccggccgcccgagtgtgattccagatcactccaagaagaacatcggcaatgggattatttcctccccactgactggaaagcgacaagactctgggacgatgaagaagccgcacaccactgaagagattggtgtgcccatatccaggaatggctccaccctgggcctgaagtcccagaacggctgcattcctccaaagctgccctcggggtccccttcccccaaactctcccagacacccacacacatgccaaccatcctagacgaccctggaaagaaggtgaagaagccagctcctccacagcacttttcccccagaactgctcaggggctgcctgggaccagcaactcgaatagcagcagatctgggagccaaaggcagggctcctgggacagcagggatgttgtcctctctacctcacctaagctcctggctacagccactgccaacgggcatgggctgaaggggaacgacgagagcgctggcctcgacaggaggggctccagcagctccagcccagagcactcggccagcagcgactccaccaaggccccccagacccccaggagtggagcggcccatctctgcgattctcaggaaacgaactgttccaccgctggccactccaaaacgccgccaagtggagcagattctaagacggtgaagctgaagtcccctgtcctgagcaacaccaccactgagcctgcaagcaccatgtctcctccaccagccaaaaaactggccctttctgccaagaaggccagcaccctgtggagggcgaccggcaatgacctccgtccacctcccccctcaccatcctccgacctcacccaccccatgaaaacctctcaccccgtcgttgcctccacttggcccgtccatagagccagggctgtgtcacctgctccccaatcatccagccgcctgcaaccccccttcagcccccaccccacattgctgtccagtacccccaagcccccagggacgtcagaaccacggagctgctcctccatctcgacggcgctgcctcaggtcaacgaggaccttgtgtcccttccacaccagttgccagaggccagtgagcccccccggagcccctctgagaagaggaaaaagacctttgtgggagagccgcagaggctgggctcagagacgtgcctcccacagcacatcagggaggccactgcggctccccacgggaagaggaagaggaagaagaagaagcgcccggaggacacagctgccagcgccctgcaggaggggcagacacagagacagcctgggagccccatgtacaggagggagggccaggcacagctgcccgctgtcagacggcaggaagatggcacacagccacaggtgaatggccagcaggtgggatgtgttacggacggccaccacgcgagcagcaggaagcggaggaggaaaggagcagaaggtcttggtgaagaaggcggcctgcaccaggacccacttcggcacagctgctctcccatgggtgatggtgatccagaggccatggaagagtctccaaggaaaaagaaaaaaagaaagcaggagacacagcgggcagtagaagaggatgggcatctcaaatgcccaaggagtgccaagccccaagatgctgttgtccccgagtccagcagctgcgcaccatccgcgaatggctggtgtcctggggaccgcatggggctgagccaggcccctcctgtgtcttggaatggagagcgggagtctgatgtggtccaggaactgctcaaatactcatctgataaagcttacgggagaaaagttctgacctgggatggcaagatgtcggcggtcagtcaggatgctattgaagacagcagacaggcccggactgagaccgtggttgatgactgggacgaagagtttgaccgagggaaggaaaagaaaattaaaaaatttaagagagagaagaggagaaacttcaacgccttccagaaacttcagactcgacggaacttctggtctgtgactcacccagcaaaggctgccagcctcagctatcgccgctgactgtgcccctgtggaaggagcctcctggagacaaggcgtcccttcccgggagctgtcggtctggatctgagggagctctctgtgtgggctctgctgtgctgggagcctgtcacgatgatcaagcggtgctgattcacgagagtggaagcctccagagcttggggctttctggctgctcttcattgacctgtgtgttcccagcacacgaacagcgcccctaacggagatttgttcagcgactgaatatacacctgtaaacgagtagcatgtatacattgattttgattacaaatggttctgtattatataccaccgttctgactgcttttttcacttatagcttggaaattgtcttctgttggtaatacagaaatctgtttcagtcttaaag

SEQ ID NO: 333809 - DNA, 3069 bp, Homo sapiens
gtaaaaagatcgttaaataaatgccttcagccatcgccatgcagaaataaatatctatcctccagacgcagtagcaaccgcgctgcgcccaaagtccccacggccacgcctaaccattataaaagtgttcagcgagagtgttggcgtgagtgtgaatgggtgtgcgctggggggcacggtggagcggtatgggccttcggcgtgtgcatgcacacgccgaatgcccaaactcgacggaacttctggtctgtgactcacccagcaaaggctgccagcctcagctatcgccgctgactgtgcccctgtggaaggaggtcggttccgagggggtgggtgtaagggtgaggtgggggtgtgtgtgccgtgtatgtgtgtaggggtgtggtggggtgtggcgtgtgtgtatgatgtatgtgggctgtgtatctggcacatgtgtgttgggtggtgtgtgtggtgtgggcgcgtctgtggtgtgtgtcctagtcacttggagaagggtgtgtgtgggatgcgtgtgtataagggggtgtgtgtgggatgcgtgtgtataagggggtgtgtgtagtgtgtgttgggtgtggggtgtgtacacctggcatctgtggcatgtgttctggtcacttggagaagggcatgtgtggggtgtgtgtgggatgtgggttgtgtgtatatctggcatgtgtcccagtcacttgcagaagggtgacttcttgccagccgcatcgagatgccatgcattgggttcctaggttggactcatacccgagggtggcagtgggaagattcgggtctcgtttctctctgtcaggactaccgtggtttgttctgcagcctcctggagacaaggcgtcccttcccgggagctgtcggtctggatctgagggagctctctgtgtgggctctgctgtgctgggagcctgtcacggtaggagctctcccggtaccagtgtccacagaccgcccaacatagaggctttgaggcttctctagatcggaacctctttggtgacattcccgaccagccctgcaagagaaacgacagtgtgtgtgtgagcagaggtggctgcacacctgctggacatctttgccaggctgtgccttctcatgtttcatagacagtggtctgtgctggcagaggctgctgcccctggttggggctatcaggagagtgggggatggtggccacatgtcctccaggtggtctcccggtgcatagctggtggctctgggcaagccatcccttgcttctcggggctgacgccaccgttgtgtccgagcccgccctcccctgcttcctcagcgggaccccttcatctgttggccttacctgtcctcagaaaggaagaggtgaccccacccagccacctctcccttttatggaactcgagagggtggccctactgtgcaccccttccttgtgagtagctctcaactgtcctggagagcagaggctatttggggtcggaggagccctcgatacctgcgaatacatctgctttccaggctgctgtttattctgagacgactgtgctgtagcttcccttgcagctgcaataacccgcaggtcttcactgaggtggaggctttggggtagaattctccatttattttactacttaatacaaaacatttatttttgaccagtcctgtggcttccattagcaatatgtttcctttcccaaatatgcaaatagtggctttgtttgctcaattttgtgagtgctttggaatttaaatgattgtataactcaagaagattacttttctatgttgctcaagctgtgcctgccaacttgtaacttaataaatacaggaaatcctcagagaaggtgatattttcaggaaaaagacaaatgccctcatagtagtgggaagtgtgaaggtgaccgtgaacatccttcctcatcgggtctgtccccgtcatttcctcccggagtcgtcgcaggtggagatggacaacgtggtgttggacttagacctccttcagtgtggctctgctgggccagaggcatcctgctgtcccgggtggctgcctcgctgtctgcaccccctctccctggggcagctttgcttcctgcccctgtgctcggggcctgggtggttactggcgtgtagatggaattgcttttttaatatgggaagatacatttatttttttccatgtgggtgggtgtctctttttggattttcttctgtttttacgtttctcttcttagaagggtgggagagaatcaagctcctgtggccacctgtgtcccagcagcagtgagtggagctgctcagggtgccctctcctgcggaccagtctctgaatgttcaaagatgagggcctggcttccgtgctctggctttgtaacttatctggaagggaaagcacatgccttcacgggcagggtatgttccttttcttctcggggtgttgacttgcattcctgtgtgaactgttccctctgccatgtttaccgtgtgatgttctgtagttgaaaatgttagttgtctgctggcacagaatttatctcgttcctttctctcccttctctcctccaaatcagtctcttcccttctccactagataactgtaaaaccttttcctggggtacatacattcgttaactcttgggcagtggtgagcacgagatgactttctgcagcgtttatcactgttgggtggagtcacgtcccttccctccaccgaagtcatcaaccagatagggaagggaaagatgaggcccagaaaacgagttcaaactctaggtcttgtacacgtatgtaagtaaatgtcaataacccaagcctttgtcatagcagtcacttggttgacttaggatctgggtctgttgaattttgtgcttgggaatggagctggagggagtggggcctgtgtacagcagctacctctcccaggtcctctcacttgcctgccccgcgtcctggttgcatggccgcacctgtgtgtgtgcagaggtctgtgtcccatcctctgcacctcctttccgggggcctggggagccccacgtgttgccaagatcttggtgcaataaaatactccggttttgtgaaaaaaaa

SEQ ID NO: 333810 - DNA, 2091 bp, Homo sapiens
ctttcggagttagcgcagcgcgaacgctgggtgcggcgcctttaagcgtcgcggtgacacgtgtgtgaggcgccggaggcccggatggtgcgcgtgctgggccgcgggccgaaggagtcgccagggctgcgtaggcttgtggcgcgcccgcggagaggccggggctctgacgcccgctctgcggcttcggtgtttgaacaggccacagtccaggagcgcttacattcaggagctccgcgtagcacctgcccaaccaaactcagccctccgttaagatcctggttccatgccgcagtaggacagcaggcccaagtctgcacatcccagtgatgcaccatgccaatagtggataagttgaaggaggccctgaaacccggccgcaaggactcggctgatgatggagaactggggaagcttcttgcctcctctgccaagaaggtccttttacagaaaatcgagttcgagccagccagcaagagcttctcctaccagctggaggccttaaagagcaaatatgtgttgctcaaccccaaaacagagggagctagtcgccacaagagtggagatgacccaccggccaggagacagggcagtgagcacacgtatgagagctgtggtgacggagtcccagccccgcagaaagtgcttttccccacggagcgactgtctctgaggtgggagcgggtcttccgcgtgggcgcaggactccacaaccttggcaacacctgctttctcaatgccaccatccagtgcttgacctacacaccacctctagccaactacctgctctccaaggagcatgctcgcagctgccaccagggaagcttctgcatgctgtgtgtcatgcagaaccacattgtccaggccttcgccaacagcggcaacgccatcaagcccgtctccttcatccgagacctgaaaaagatcgcccgacacttccgctttgggaaccaggaggacgcgcatgagttcctgcggtacaccatcgacgccatgcagaaagcctgcctgaatggctgtgccaagttggatcgtcaaacgcaggctactaccttggtccatcaaatttttggagggtatctcagatcacgcgtgaagtgctccgtgtgcaagagcgtctcggacacctacgacccctacttggacgtcgcgctggagatccggcaagctgcgaatattgtgcgtgctctggaactttttgtgaaagcagatgtcctgagtggagagaatgcctacatgtgtgctaaatgcaagaagaaggttccagccagcaagcgcttcaccatccacagaacatccaacgtcttaaccctttccctcaagcgctttgccaacttcagcggggggaagatcaccaaggatgtaggctatccggaattcctcaacatacgtccgtatatgtcccagaataatggtgatcctgtcatgtatggactctatgctgtcctggtgcactcgggctacagctgccatgccgggcactattactgctacgtgaaggcaagcaatggacagtggtaccagatgaatgattccttggtccattccagcaacgtcaaggtggttctgaaccagcaggcctacgtgctgttctatctgcgaattccaggctctaagaaaagtcccgagggcctcatctccaggacaggctcctcctcccttcccggccgcccgagtgtgattccagatcactccaagaagaacatcggcaatgggattatttcctccccactgactggaaagacggagtctcattctgtcgcccaggctggagtgcagtggcgcaaccttggctcgctgcaacctccacctcccagtggagacggggtttcactttattagccaggatggtctctatctgctgacctcctgatccacccgcctcagcctcccaaagtgctgggattacagacgtgagccactgtgcccggcctgttctcacatttaacggggaaaatgtgagtagtttgtaccaatgttaatttcctgatttgggtaattctgctgtggttatgtaagagagtgtctttgttctttggaaatacacatggacatattttggggtaaaagaacatcatgtctgcaatttac

SEQ ID NO: 333811 - DNA, 313 bp, Homo sapiens
ttccaacctgggtaatgtcacttcttgctcagagcatgtttttattcagacttcgagaccaaacatgacatctttgttcctcagacgagggcatgggtttagaaagaactgaactctttggctgtggtttagggtttagctaagagggcatcgctgggggttccatgctgaccgaccacacatgggcgtcgagccgtcctcctcttgtccttctcttcaccacaaggtggcactcaaaattgttgactaattatgagtagactagttggtaaatgacactcttgaagtgaagccacaggggacctgggaacct

SEQ ID NO: 333812 - DNA, 3877 bp, Homo sapiens
ctttcggagttagcgcagcgcgaacgctgggtgcggcgcctttaagcgtcgcggtgacacgtgtgtgaggcgccggaggcccggatggtgcgcgtgctgggccgcgggccgaaggagtcgccagggctgcgtaggcttgtggcgcgcccgcggagaggccggggctctgacgcccgctctgcggcttcggtgtttgaacaggccacagtccaggagcgcttacattcaggagctccgcgtagcacctgcccaaccaaactcagccctccgttaagatcctggttccatgccgcagtaggacagcaggcccaagtctgcacatcccagtgatgcaccatgccaatagtggataagttgaaggaggccctgaaacccggccgcaaggactcggctgatgatggagaactggggaagcttcttgcctcctctgccaagaaggtccttttacagaaaatcgagttcgagccagccagcaagagcttctcctaccagctggaggccttaaagagcaaatatgtgttgctcaaccccaaaacagagggagctagtcgccacaagagtggagatgacccaccggccaggagacagggcagtgagcacacgtatgagagctgtggtgacggagtcccagccccgcagaaagtgcttttccccacggagcgactgtctctgaggtgggagcgggtcttccgcgtgggcgcaggactccacaaccttggcaacacctgctttctcaatgccaccatccagtgcttgacctacacaccacctctagccaactacctgctctccaaggagcatgctcgcagctgccaccagggaagcttctgcatgctgtgtgtcatgcagaaccacattgtccaggccttcgccaacagcggcaacgccatcaagcccgtctccttcatccgagacctgaaaaagatcgcccgacacttccgctttgggaaccaggaggacgcgcatgagttcctgcggtacaccatcgacgccatgcagaaagcctgcctgaatggctgtgccaagttggatcgtcaaacgcaggctactaccttggtccatcaaatttttggagggtatctcagatcacgcgtgaagtgctccgtgtgcaagagcgtctcggacacctacgacccctacttggacgtcgcgctggagatccggcaagctgcgaatattgtgcgtgctctggaactttttgtgaaagcagatgtcctgagtggagagaatgcctacatgtgtgctaaatgcaagaagaaggttccagccagcaagcgcttcaccatccacagaacatccaacgtcttaaccctttccctcaagcgctttgccaacttcagcggggggaagatcaccaaggatgtaggctatccggaattcctcaacatacgtccgtatatgtcccagaataatggtgatcctgtcatgtatggactctatgctgtcctggtgcactcgggctacagctgccatgccgggcactattactgctacgtgaaggcaagcaatggacagtggtaccagatgaatgattccttggtccattccagcaacgtcaaggtggttctgaaccagcaggcctacgtgctgttctatctgcgaattccaggctctaagaaaagtcccgagggcctcatctccaggacaggctcctcctcccttcccggccgcccgagtgtgattccagatcactccaagaagaacatcggcaatgggattatttcctccccactgactggaaagcgacaagactctgggacgatgaagaagccgcacaccactgaagagattggtgtgcccatatccaggaatggctccaccctgggcctgaagtcccagaacggctgcattcctccaaagctgccctcggggtccccttcccccaaactctcccagacacccacacacatgccaaccatcctagacgaccctggaaagaaggtgaagaagccagctcctccacagcatcctggctacagccactgccaacgggcatgggctgaaggggaacgacgagagcgctggcctcgacaggaggggctccagcagctccagcccagagcactcggccagcagcgactccaccaaggccccccagacccccaggagtggagcggcccatctctgcgattctcaggaaacgaactgttccaccgctggccactccaaaacgccgccaagtggagcagattctaagacggtgaagctgaagtcccctgtcctgagcaacaccaccactgagcctgcaagcaccatgtctcctccaccagccaaaaaactggccctttctgccaagaaggccagcaccctgtggagggcgaccggcaatgacctccgtccacctcccccctcaccatcctccgacctcacccaccccatgaaaacctctcaccccgtcgttgcctccacttggcccgtccatagagccagggctgtgtcacctgctccccaatcatccagccgcctgcaaccccccttcagcccccaccccacattgctgtccagtacccccaagcccccagggacgtcagaaccacggagctgctcctccatctcgacggcgctgcctcaggtcaacgaggaccttgtgtcccttccacaccagttgccagaggccagtgagcccccccggagcccctctgagaagaggaaaaagacctttgtgggagagccgcagaggctgggctcagagacgtgcctcccacagcacatcagggaggccactgcggctccccacgggaagaggaagaggaagaagaagaagcgcccggaggacacagctgccagcgccctgcaggaggggcagacacagagacagcctgggagccccatgtacaggagggagggccaggcacagctgcccgctgtcagacggcaggaagatggcacacagccacaggtgaatggccagcaggtgggatgtgttacggacggccaccacgcgagcagcaggaagcggaggaggaaaggagcagaaggtcttggtgaagaaggcggcctgcaccaggacccacttcggcacagctgctctcccatgggtgatggtgatccagaggccatggaagagtctccaaggaaaaagaaaaaaagaaagcaggagacacagcgggcagtagaagaggatgggcatctcaaatgcccaaggagtgccaagccccaagatgctgttgtccccgagtccagcagctgcgcaccatccgcgaatggctggtgtcctggggaccgcatggggctgagccaggcccctcctgtgtcttggaatggagagcgggagtctgatgtggtccaggaactgctcaaatactcatctgataaagcttacgggagaaaagttctgacctgggatggcaagatgtcggcggtcagtcaggatgctattgaagacagcagacaggcccggactgagaccgtggttgatgactgggacgaagagtttgaccgagggaaggaaaagaaaattaaaaaatttaagagagagaagaggagaaacttcaacgccttccagaaacttcagactcgacggaacttctggtctgtgactcacccagcaaaggctgccagcctcagctatcgccgctgactgtgcccctgtggaaggagatgatcaagcggtgctgattcacgagagtggaagcctccagagcttggggctttctggctgctcttcattgacctgtgtgttcccagcacacgaacagcgcccctaacggagatttgttcagcgactgaatatacacctgtaaacgagtagcatgtatacattgattttgattacaaatggttctgtattatataccaccgttctgactgcttttttcacttatagcttggaaattgtcttctgttggtaatacagaaatctgtttcagtcttaaag

SEQ ID NO: 333813 - DNA, 5980 bp, Homo sapiens
ctttcggagttagcgcagcgcgaacgctgggtgcggcgcctttaagcgtcgcggtgacacgtgtgtgaggcgccggaggcccggatggtgcgcgtgctgggccgcgggccgaaggagtcgccagggctgcgtaggcttgtggcgcgcccgcggagaggccggggctctgacgcccgctctgcggcttcggtgtttgaacaggccacagtccaggagcgcttacattcaggagctccgcgtagcacctgcccaaccaaactcagccctccgttaagatcctggttccatgccgcagtaggacagcaggcccaagtctgcacatcccagtgatgcaccatgccaatagtggataagttgaaggaggccctgaaacccggccgcaaggactcggctgatgatggagaactggggaagcttcttgcctcctctgccaagaaggtccttttacagaaaatcgagttcgagccagccagcaagagcttctcctaccagctggaggccttaaagagcaaatatgtgttgctcaaccccaaaacagagggagctagtcgccacaagagtggagatgacccaccggccaggagacagggcagtgagcacacgtatgagagctgtggtgacggagtcccagccccgcagaaagtgcttttccccacggagcgactgtctctgaggtgggagcgggtcttccgcgtgggcgcaggactccacaaccttggcaacacctgctttctcaatgccaccatccagtgcttgacctacacaccacctctagccaactacctgctctccaaggagcatgctcgcagctgccaccagggaagcttctgcatgctgtgtgtcatgcagaaccacattgtccaggccttcgccaacagcggcaacgccatcaagcccgtctccttcatccgagacctgaaaaagatcgcccgacacttccgctttgggaaccaggaggacgcgcatgagttcctgcggtacaccatcgacgccatgcagaaagcctgcctgaatggctgtgccaagttggatcgtcaaacgcaggctactaccttggtccatcaaatttttggagggtatctcagatcacgcgtgaagtgctccgtgtgcaagagcgtctcggacacctacgacccctacttggacgtcgcgctggagatccggcaagctgcgaatattgtgcgtgctctggaactttttgtgaaagcagatgtcctgagtggagagaatgcctacatgtgtgctaaatgcaagaagaaggttccagccagcaagcgcttcaccatccacagaacatccaacgtcttaaccctttccctcaagcgctttgccaacttcagcggggggaagatcaccaaggatgtaggctatccggaattcctcaacatacgtccgtatatgtcccagaataatggtgatcctgtcatgtatggactctatgctgtcctggtgcactcgggctacagctgccatgccgggcactattactgctacgtgaaggcaagcaatggacagtggtaccagatgaatgattccttggtccattccagcaacgtcaaggtggttctgaaccagcaggcctacgtgctgttctatctgcgaattccaggctctaagaaaagtcccgagggcctcatctccaggacaggctcctcctcccttcccggccgcccgagtgtgattccagatcactccaagaagaacatcggcaatgggattatttcctccccactgactggaaagcgacaagactctgggacgatgaagaagccgcacaccactgaagagattggtgtgcccatatccaggaatggctccaccctgggcctgaagtcccagaacggctgcattcctccaaagctgccctcggggtccccttcccccaaactctcccagacacccacacacatgccaaccatcctagacgaccctggaaagaaggtgaagaagccagctcctccacagcacttttcccccagaactgctcaggggctgcctgggaccagcaactcgaatagcagcagatctgggagccaaaggcagggctcctgggacagcagggatgttgtcctctctacctcacctaagctcctggctacagccactgccaacgggcatgggctgaaggggaacgacgagagcgctggcctcgacaggaggggctccagcagctccagcccagagcactcggccagcagcgactccaccaaggccccccagacccccaggagtggagcggcccatctctgcgattctcaggaaacgaactgttccaccgctggccactccaaaacgccgccaagtggagcagattctaagacggtgaagctgaagtcccctgtcctgagcaacaccaccactgagcctgcaagcaccatgtctcctccaccagccaaaaaactggccctttctgccaagaaggccagcaccctgtggagggcgaccggcaatgacctccgtccacctcccccctcaccatcctccgacctcacccaccccatgaaaacctctcaccccgtcgttgcctccacttggcccgtccatagagccagggctgtgtcacctgctccccaatcatccagccgcctgcaaccccccttcagcccccaccccacattgctgtccagtacccccaagcccccagggacgtcagaaccacggagctgctcctccatctcgacggcgctgcctcaggtcaacgaggaccttgtgtcccttccacaccagttgccagaggccagtgagcccccccggagcccctctgagaagaggaaaaagacctttgtgggagagccgcagaggctgggctcagagacgtgcctcccacagcacatcagggaggccactgcggctccccacgggaagaggaagaggaagaagaagaagcgcccggaggacacagctgccagcgccctgcaggaggggcagacacagagacagcctgggagccccatgtacaggagggagggccaggcacagctgcccgctgtcagacggcaggaagatggcacacagccacaggtgaatggccagcaggtgggatgtgttacggacggccaccacgcgagcagcaggaagcggaggaggaaaggagcagaaggtcttggtgaagaaggcggcctgcaccaggacccacttcggcacagctgctctcccatgggtgatggtgatccagaggccatggaagagtctccaaggaaaaagaaaaaaagaaagcaggagacacagcgggcagtagaagaggatgggcatctcaaatgcccaaggagtgccaagccccaagatgctgttgtccccgagtccagcagctgcgcaccatccgcgaatggctggtgtcctggggaccgcatggggctgagccaggcccctcctgtgtcttggaatggagagcgggagtctgatgtggtccaggaactgctcaaatactcatctgataaagcttacgggagaaaagttctgacctgggatggcaagatgtcggcggtcagtcaggatgctattgaagacagcagacaggcccggactgagaccgtggttgatgactgggacgaagagtttgaccgagggaaggaaaagaaaattaaaaaatttaagagagagaagaggagaaacttcaacgccttccagaaacttcagactcgacggaacttctggtctgtgactcacccagcaaaggctgccagcctcagctatcgccgctgactgtgcccctgtggaaggaggactaccgtggtttgttctgcagcctcctggagacaaggcgtcccttcccgggagctgtcggtctggatctgagggagctctctgtgtgggctctgctgtgctgggagcctgtcacggtaggagctctcccggtaccagtgtccacagaccgcccaacatagaggctttgaggcttctctagatcggaacctctttggtgacattcccgaccagccctgcaagagaaacgacagtgtgtgtgtgagcagaggtggctgcacacctgctggacatctttgccaggctgtgccttctcatgtttcatagacagtggtctgtgctggcagaggctgctgcccctggttggggctatcaggagagtgggggatggtggccacatgtcctccaggtggtctcccggtgcatagctggtggctctgggcaagccatcccttgcttctcggggctgacgccaccgttgtgtccgagcccgccctcccctgcttcctcagcgggaccccttcatctgttggccttacctgtcctcagaaaggaagaggtgaccccacccagccacctctcccttttatggaactcgagagggtggccctactgtgcaccccttccttgtgagtagctctcaactgtcctggagagcagaggctatttggggtcggaggagccctcgatacctgcgaatacatctgctttccaggctgctgtttattctgagacgactgtgctgtagcttcccttgcagctgcaataacccgcaggtcttcactgaggtggaggctttggggtagaattctccatttattttactacttaatacaaaacatttatttttgaccagtcctgtggcttccattagcaatatgtttcctttcccaaatatgcaaatagtggctttgtttgctcaattttgtgagtgctttggaatttaaatgattgtataactcaagaagattacttttctatgttgctcaagctgtgcctgccaacttgtaacttaataaatacaggaaatcctcagagaaggtgatattttcaggaaaaagacaaatgccctcatagtagtgggaagtgtgaaggtgaccgtgaacatccttcctcatcgggtctgtccccgtcatttcctcccggagtcgtcgcaggtggagatggacaacgtggtgttggacttagacctccttcagtgtggctctgctgggccagaggcatcctgctgtcccgggtggctgcctcgctgtctgcaccccctctccctggggcagctttgcttcctgcccctgtgctcggggcctgggtggttactggcgtgtagatggaattgcttttttaatatgggaagatacatttatttttttccatgtgggtgggtgtctctttttggattttcttctgtttttacgtttctcttcttagaagggtgggagagaatcaagctcctgtggccacctgtgtcccagcagcagtgagtggagctgctcagggtgccctctcctgcggaccagtctctgaatgttcaaagatgagggcctggcttccgtgctctggctttgtaacttatctggaagggaaagcacatgccttcacgggcagggtatgttccttttcttctcggggtgttgacttgcattcctgtgtgaactgttccctctgccatgtttaccgtgtgatgttctgtagttgaaaatgttagttgtctgctggcacagaatttatctcgttcctttctctcccttctctcctccaaatcagtctcttcccttctccactagataactgtaaaaccttttcctggggtacatacattcgttaactcttgggcagtggtgagcacgagatgactttctgcagcgtttatcactgttgggtggagtcacgtcccttccctccaccgaagtcatcaaccagatagggaagggaaagatgaggcccagaaaacgagttcaaactctaggtcttgtacacgtatgtaagtaaatgtcaataacccaagcctttgtcatagcagtcacttggttgacttaggatctgggtctgttgaattttgtgcttgggaatggagctggagggagtggggcctgtgtacagcagctacctctcccaggtcctctcacttgcctgccccgcgtcctggttgcatggccgcacctgtgtgtgtgcagaggtctgtgtcccatcctctgcacctcctttccgggggcctggggagccccacgtgttgccaagatcttggtgcaataaaatactccggttttgtgaaaaaaaa

SEQ ID NO: 333814 - DNA, 4893 bp, Homo sapiens
tgcttaatgtgattttgagaggagcagaaggtcgaaatctcattgatgaagattccactattacagagcagttgttgctgttattaacttagcgttaagacaacatttttcagagcacgaatcaatcatcattaatctttctcatgcaccttcttcatagatgcaagaagaaggttccagccagcaagcgcttcaccatccacagaacatccaacgtcttaaccctttccctcaagcgctttgccaacttcagcggggggaagatcaccaaggatgtaggctatccggaattcctcaacatacgtccgtatatgtcccagaataatggtgatcctgtcatgtatggactctatgctgtcctggtgcactcgggctacagctgccatgccgggcactattactgctacgtgaaggcaagcaatggacagtggtaccagatgaatgattccttggtccattccagcaacgtcaaggtggttctgaaccagcaggcctacgtgctgttctatctgcgaattccaggctctaagaaaagtcccgagggcctcatctccaggacaggctcctcctcccttcccggccgcccgagtgtgattccagatcactccaagaagaacatcggcaatgggattatttcctccccactgactggaaagcgacaagactctgggacgatgaagaagccgcacaccactgaagagattggtgtgcccatatccaggaatggctccaccctgggcctgaagtcccagaacggctgcattcctccaaagctgccctcggggtccccttcccccaaactctcccagacacccacacacatgccaaccatcctagacgaccctggaaagaaggtgaagaagccagctcctccacagcacttttcccccagaactgctcaggggctgcctgggaccagcaactcgaatagcagcagatctgggagccaaaggcagggctcctgggacagcagggatgttgtcctctctacctcacctaagctcctggctacagccactgccaacgggcatgggctgaaggggaacgacgagagcgctggcctcgacaggaggggctccagcagctccagcccagagcactcggccagcagcgactccaccaaggccccccagacccccaggagtggagcggcccatctctgcgattctcaggaaacgaactgttccaccgctggccactccaaaacgccgccaagtggagcagattctaagacggtgaagctgaagtcccctgtcctgagcaacaccaccactgagcctgcaagcaccatgtctcctccaccagccaaaaaactggccctttctgccaagaaggccagcaccctgtggagggcgaccggcaatgacctccgtccacctcccccctcaccatcctccgacctcacccaccccatgaaaacctctcaccccgtcgttgcctccacttggcccgtccatagagccagggctgtgtcacctgctccccaatcatccagccgcctgcaaccccccttcagcccccaccccacattgctgtccagtacccccaagcccccagggacgtcagaaccacggagctgctcctccatctcgacggcgctgcctcaggtcaacgaggaccttgtgtcccttccacaccagttgccagaggccagtgagcccccccggagcccctctgagaagaggaaaaagacctttgtgggagagccgcagaggctgggctcagagacgtgcctcccacagcacatcagggaggccactgcggctccccacgggaagaggaagaggaagaagaagaagcgcccggaggacacagctgccagcgccctgcaggaggggcagacacagagacagcctgggagccccatgtacaggagggagggccaggcacagctgcccgctgtcagacggcaggaagatggcacacagccacaggtgaatggccagcaggtgggatgtgttacggacggccaccacgcgagcagcaggaagcggaggaggaaaggagcagaaggtcttggtgaagaaggcggcctgcaccaggacccacttcggcacagctgctctcccatgggtgatggtgatccagaggccatggaagagtctccaaggaaaaagaaaaaaagaaagcaggagacacagcgggcagtagaagaggatgggcatctcaaatgcccaaggagtgccaagccccaagatgctgttgtccccgagtccagcagctgcgcaccatccgcgaatggctggtgtcctggggaccgcatggggctgagccaggcccctcctgtgtcttggaatggagagcgggagtctgatgtggtccaggaactgctcaaatactcatctgataaagcttacgggagaaaagttctgacctgggatggcaagatgtcggcggtcagtcaggatgctattgaagacagcagacaggcccggactgagaccgtggttgatgactgggacgaagagtttgaccgagggaaggaaaagaaaattaaaaaatttaagagagagaagaggagaaacttcaacgccttccagaaacttcagactcgacggaacttctggtctgtgactcacccagcaaaggctgccagcctcagctatcgccgctgactgtgcccctgtggaaggaggactaccgtggtttgttctgcagcctcctggagacaaggcgtcccttcccgggagctgtcggtctggatctgagggagctctctgtgtgggctctgctgtgctgggagcctgtcacggtaggagctctcccggtaccagtgtccacagaccgcccaacatagaggctttgaggcttctctagatcggaacctctttggtgacattcccgaccagccctgcaagagaaacgacagtgtgtgtgtgagcagaggtggctgcacacctgctggacatctttgccaggctgtgccttctcatgtttcatagacagtggtctgtgctggcagaggctgctgcccctggttggggctatcaggagagtgggggatggtggccacatgtcctccaggtggtctcccggtgcatagctggtggctctgggcaagccatcccttgcttctcggggctgacgccaccgttgtgtccgagcccgccctcccctgcttcctcagcgggaccccttcatctgttggccttacctgtcctcagaaaggaagaggtgaccccacccagccacctctcccttttatggaactcgagagggtggccctactgtgcaccccttccttgtgagtagctctcaactgtcctggagagcagaggctatttggggtcggaggagccctcgatacctgcgaatacatctgctttccaggctgctgtttattctgagacgactgtgctgtagcttcccttgcagctgcaataacccgcaggtcttcactgaggtggaggctttggggtagaattctccatttattttactacttaatacaaaacatttatttttgaccagtcctgtggcttccattagcaatatgtttcctttcccaaatatgcaaatagtggctttgtttgctcaattttgtgagtgctttggaatttaaatgattgtataactcaagaagattacttttctatgttgctcaagctgtgcctgccaacttgtaacttaataaatacaggaaatcctcagagaaggtgatattttcaggaaaaagacaaatgccctcatagtagtgggaagtgtgaaggtgaccgtgaacatccttcctcatcgggtctgtccccgtcatttcctcccggagtcgtcgcaggtggagatggacaacgtggtgttggacttagacctccttcagtgtggctctgctgggccagaggcatcctgctgtcccgggtggctgcctcgctgtctgcaccccctctccctggggcagctttgcttcctgcccctgtgctcggggcctgggtggttactggcgtgtagatggaattgcttttttaatatgggaagatacatttatttttttccatgtgggtgggtgtctctttttggattttcttctgtttttacgtttctcttcttagaagggtgggagagaatcaagctcctgtggccacctgtgtcccagcagcagtgagtggagctgctcagggtgccctctcctgcggaccagtctctgaatgttcaaagatgagggcctggcttccgtgctctggctttgtaacttatctggaagggaaagcacatgccttcacgggcagggtatgttccttttcttctcggggtgttgacttgcattcctgtgtgaactgttccctctgccatgtttaccgtgtgatgttctgtagttgaaaatgttagttgtctgctggcacagaatttatctcgttcctttctctcccttctctcctccaaatcagtctcttcccttctccactagataactgtaaaaccttttcctggggtacatacattcgttaactcttgggcagtggtgagcacgagatgactttctgcagcgtttatcactgttgggtggagtcacgtcccttccctccaccgaagtcatcaaccagatagggaagggaaagatgaggcccagaaaacgagttcaaactctaggtcttgtacacgtatgtaagtaaatgtcaataacccaagcctttgtcatagcagtcacttggttgacttaggatctgggtctgttgaattttgtgcttgggaatggagctggagggagtggggcctgtgtacagcagctacctctcccaggtcctctcacttgcctgccccgcgtcctggttgcatggccgcacctgtgtgtgtgcagaggtctgtgtcccatcctctgcacctcctttccgggggcctggggagccccacgtgttgccaagatcttggtgcaataaaatactccggttttgtgaaaaaaaa

SEQ ID NO: 333815 - DNA, 5571 bp, Homo sapiens
ctttcggagttagcgcagcgcgaacgctgggtgcggcgcctttaagcgtcgcggtgacacgtgtgtgaggcgccggaggcccggatggtgcgcgtgctgggccgcgggccgaaggagtcgccagggctgcgtaggcttgtggcgcgcccgcggagaggccggggctctgacgcccgctctgcggcttcggtgtttgaacaggccacagtccaggagcgcttacattcaggagctccgcgtagcacctgcccaaccaaactcagccctccgttaagatcctggttccatgccgcagtaggacagcaggcccaagtctgcacatcccagtgatgcaccatgccaatagtggataagttgaaggaggccctgaaacccggccgcaaggactcggctgatgatggagaactggggaagcttcttgcctcctctgccaagaaggtccttttacagaaaatcgagttcgagccagccagcaagagcttctcctaccagctggaggccttaaagagcaaatatgtgttgctcaaccccaaaacagagggagctagtcgccacaagagtggagatgacccaccggccaggagacagggcagtgagcacacgtatgagagctgtggtgacggagtcccagccccgcagaaagtgcttttccccacggagcgactgtctctgaggtgggagcgggtcttccgcgtgggcgcaggactccacaaccttggcaacacctgctttctcaatgccaccatccagtgcttgacctacacaccacctctagccaactacctgctctccaaggagcatgctcgcagctgccaccagggaagcttctgcatgctgtgtgtcatgcagaaccacattgtccaggccttcgccaacagcggcaacgccatcaagcccgtctccttcatccgagacctgaaaaagatcgcccgacacttccgctttgggaaccaggaggacgcgcatgagttcctgcggtacaccatcgacgccatgcagaaagcctgcctgaatggctgtgccaagttggatcgtcaaacgcaggctactaccttggtccatcaaatttttggagggtatctcagatcacgcgtgaagtgctccgtgtgcaagagcgtctcggacacctacgacccctacttggacgtcgcgctggagatccggcaagctgcgaatattgtgcgtgctctggaactttttgtgaaagcagatgtcctgagtggagagaatgcctacatgtgtgctaaatgcaagaagaaggttccagccagcaagcgcttcaccatccacagaacatccaacgtcttaaccctttccctcaagcgctttgccaacttcagcggggggaagatcaccaaggatgtaggctatccggaattcctcaacatacgtccgtatatgtcccagaataatggtgatcctgtcatgtatggactctatgctgtcctggtgcactcgggctacagctgccatgccgggcactattactgctacgtgaaggcaagcaatggacagtggtaccagatgaatgattccttggtccattccagcaacgtcaaggtggttctgaaccagcaggcctacgtgctgttctatctgcgtctcccagacacccacacacatgccaaccatcctagacgaccctggaaagaaggtgaagaagccagctcctccacagcatcctggctacagccactgccaacgggcatgggctgaaggggaacgacgagagcgctggcctcgacaggaggggctccagcagctccagcccagagcactcggccagcagcgactccaccaaggccccccagacccccaggagtggagcggcccatctctgcgattctcaggaaacgaactgttccaccgctggccactccaaaacgccgccaagtggagcagattctaagacggtgaagctgaagtcccctgtcctgagcaacaccaccactgagcctgcaagcaccatgtctcctccaccagccaaaaaactggccctttctgccaagaaggccagcaccctgtggagggcgaccggcaatgacctccgtccacctcccccctcaccatcctccgacctcacccaccccatgaaaacctctcaccccgtcgttgcctccacttggcccgtccatagagccagggctgtgtcacctgctccccaatcatccagccgcctgcaaccccccttcagcccccaccccacattgctgtccagtacccccaagcccccagggacgtcagaaccacggagctgctcctccatctcgacggcgctgcctcaggtcaacgaggaccttgtgtcccttccacaccagttgccagaggccagtgagcccccccggagcccctctgagaagaggaaaaagacctttgtgggagagccgcagaggctgggctcagagacgtgcctcccacagcacatcagggaggccactgcggctccccacgggaagaggaagaggaagaagaagaagcgcccggaggacacagctgccagcgccctgcaggaggggcagacacagagacagcctgggagccccatgtacaggagggagggccaggcacagctgcccgctgtcagacggcaggaagatggcacacagccacaggtgaatggccagcaggtgggatgtgttacggacggccaccacgcgagcagcaggaagcggaggaggaaaggagcagaaggtcttggtgaagaaggcggcctgcaccaggacccacttcggcacagctgctctcccatgggtgatggtgatccagaggccatggaagagtctccaaggaaaaagaaaaaaagaaagcaggagacacagcgggcagtagaagaggatgggcatctcaaatgcccaaggagtgccaagccccaagatgctgttgtccccgagtccagcagctgcgcaccatccgcgaatggctggtgtcctggggaccgcatggggctgagccaggcccctcctgtgtcttggaatggagagcgggagtctgatgtggtccaggaactgctcaaatactcatctgataaagcttacgggagaaaagttctgacctgggatggcaagatgtcggcggtcagtcaggatgctattgaagacagcagacaggcccggactgagaccgtggttgatgactgggacgaagagtttgaccgagggaaggaaaagaaaattaaaaaatttaagagagagaagaggagaaacttcaacgccttccagaaacttcagactcgacggaacttctggtctgtgactcacccagcaaaggctgccagcctcagctatcgccgctgactgtgcccctgtggaaggaggactaccgtggtttgttctgcagcctcctggagacaaggcgtcccttcccgggagctgtcggtctggatctgagggagctctctgtgtgggctctgctgtgctgggagcctgtcacggtaggagctctcccggtaccagtgtccacagaccgcccaacatagaggctttgaggcttctctagatcggaacctctttggtgacattcccgaccagccctgcaagagaaacgacagtgtgtgtgtgagcagaggtggctgcacacctgctggacatctttgccaggctgtgccttctcatgtttcatagacagtggtctgtgctggcagaggctgctgcccctggttggggctatcaggagagtgggggatggtggccacatgtcctccaggtggtctcccggtgcatagctggtggctctgggcaagccatcccttgcttctcggggctgacgccaccgttgtgtccgagcccgccctcccctgcttcctcagcgggaccccttcatctgttggccttacctgtcctcagaaaggaagaggtgaccccacccagccacctctcccttttatggaactcgagagggtggccctactgtgcaccccttccttgtgagtagctctcaactgtcctggagagcagaggctatttggggtcggaggagccctcgatacctgcgaatacatctgctttccaggctgctgtttattctgagacgactgtgctgtagcttcccttgcagctgcaataacccgcaggtcttcactgaggtggaggctttggggtagaattctccatttattttactacttaatacaaaacatttatttttgaccagtcctgtggcttccattagcaatatgtttcctttcccaaatatgcaaatagtggctttgtttgctcaattttgtgagtgctttggaatttaaatgattgtataactcaagaagattacttttctatgttgctcaagctgtgcctgccaacttgtaacttaataaatacaggaaatcctcagagaaggtgatattttcaggaaaaagacaaatgccctcatagtagtgggaagtgtgaaggtgaccgtgaacatccttcctcatcgggtctgtccccgtcatttcctcccggagtcgtcgcaggtggagatggacaacgtggtgttggacttagacctccttcagtgtggctctgctgggccagaggcatcctgctgtcccgggtggctgcctcgctgtctgcaccccctctccctggggcagctttgcttcctgcccctgtgctcggggcctgggtggttactggcgtgtagatggaattgcttttttaatatgggaagatacatttatttttttccatgtgggtgggtgtctctttttggattttcttctgtttttacgtttctcttcttagaagggtgggagagaatcaagctcctgtggccacctgtgtcccagcagcagtgagtggagctgctcagggtgccctctcctgcggaccagtctctgaatgttcaaagatgagggcctggcttccgtgctctggctttgtaacttatctggaagggaaagcacatgccttcacgggcagggtatgttccttttcttctcggggtgttgacttgcattcctgtgtgaactgttccctctgccatgtttaccgtgtgatgttctgtagttgaaaatgttagttgtctgctggcacagaatttatctcgttcctttctctcccttctctcctccaaatcagtctcttcccttctccactagataactgtaaaaccttttcctggggtacatacattcgttaactcttgggcagtggtgagcacgagatgactttctgcagcgtttatcactgttgggtggagtcacgtcccttccctccaccgaagtcatcaaccagatagggaagggaaagatgaggcccagaaaacgagttcaaactctaggtcttgtacacgtatgtaagtaaatgtcaataacccaagcctttgtcatagcagtcacttggttgacttaggatctgggtctgttgaattttgtgcttgggaatggagctggagggagtggggcctgtgtacagcagctacctctcccaggtcctctcacttgcctgccccgcgtcctggttgcatggccgcacctgtgtgtgtgcagaggtctgtgtcccatcctctgcacctcctttccgggggcctggggagccccacgtgttgccaagatcttggtgcaataaaatactccggttttgtgaaaaaaaa

SEQ ID NO: 333816 - DNA, 4818 bp, Homo sapiens
ctttcggagttagcgcagcgcgaacgctgggtgcggcgcctttaagcgtcgcggtgacacgtgtgtgaggcgccggaggcccggatggtgcgcgtgctgggccgcgggccgaaggagtcgccagggctgcgtaggcttgtggcgcgcccgcggagaggccggggctctgacgcccgctctgcggcttcggtgtttgaacaggccacagtccaggagcgcttacattcaggagctccgcgtagcacctgcccaaccaaactcagccctccgttaagatcctggttccatgccgcagtaggacagcaggcccaagtctgcacatcccagtgatgcaccatgccaatagtggataagttgaaggaggccctgaaacccggccgcaaggactcggctgatgatggagaactggggaagcttcttgcctcctctgccaagaaggtccttttacagaaaatcgagttcgagccagccagcaagagcttctcctaccagctggaggccttaaagagcaaatatgtgttgctcaaccccaaaacagagggagctagtcgccacaagagtggagatgacccaccggccaggagacagggcagtgagcacacgtatgagagctgtggtgacggagtcccagccccgcagaaagtgcttttccccacggagcgactgtctctgaggtgggagcgggtcttccgcgtgggcgcaggactccacaaccttggcaacacctgctttctcaatgccaccatccagtgcttgacctacacaccacctctagccaactacctgctctccaaggagcatgctcgcagctgccaccagggaagcttctgcatgctgtgtgtcatgcagaaccacattgtccaggccttcgccaacagcggcaacgccatcaagcccgtctccttcatccgagacctgaaaaagatcgcccgacacttccgctttgggaaccaggaggacgcgcatgagttcctgcggtacaccatcgacgccatgcagaaagcctgcctgaatggctgtgccaagttggatcgtcaaacgcaggctactaccttggtccatcaaatttttggagggtatctcagatcacgcgtgaagtgctccgtgtgcaagagcgtctcggacacctacgacccctacttggacgtcgcgctggagatccggcaagctgcgaatattgtgcgtgctctggaactttttgtgaaagcagatgtcctgagtggagagaatgcctacatgtgtgctaaatgcaagaagaaggttccagccagcaagcgcttcaccatccacagaacatccaacgtcttaaccctttccctcaagcgctttgccaacttcagcggggggaagatcaccaaggatgtaggctatccggaattcctcaacatacgtccgtatatgtcccagaataatggtgatcctgtcatgtatggactctatgctgtcctggtgcactcgggctacagctgccatgccgggcactattactgctacgtgaaggcaagcaatggacagtggtaccagatgaatgattccttggtccattccagcaacgtcaaggtggttctgaaccagcaggcctacgtgctgttctatctgcgaattccaggctctaagaaaagtcccgagggcctcatctccaggacaggctcctcctcccttcccggccgcccgagtgtgattccagatcactccaagaagaacatcggcaatgggattatttcctccccactgactggaaagcgacaagactctgggacgatgaagaagccgcacaccactgaagagattggtgtgcccatatccaggaatggctccaccctgggcctgaagtcccagaacggctgcattcctccaaagctgccctcggggtccccttcccccaaactctcccagacacccacacacatgccaaccatcctagacgaccctggaaagaaggtgaagaagccagctcctccacagcacttttcccccagaactgctcaggggctgcctgggaccagcaactcgaatagcagcagatctgggagccaaaggcagggctcctgggacagcagggatgttgtcctctctacctcacctaagctcctggctacagccactgccaacgggcatgggctgaaggggaacgacgagagcgctggcctcgacaggaggggctccagcagctccagcccagagcactcggccagcagcgactccaccaaggccccccagacccccaggagtggagcggcccatctctgcgattctcaggaaacgaactgttccaccgctggccactccaaaacgccgccaagtggagcagattctaagacggtgaagctgaagtcccctgtcctgagcaacaccaccactgagcctgcaagcaccatgtctcctccaccagccaaaaaactggccctttctgccaagaaggccagcaccctgtggagggcgaccggcaatgacctccgtccacctcccccctcaccatcctccgacctcacccaccccatgaaaacctctcaccccgtcgttgcctccacttggcccgtccatagagccagggctgtgtcacctgctccccaatcatccagccgcctgcaaccccccttcagcccccaccccacattgctgtccagtacccccaagcccccagggacgtcagaaccacggagctgctcctccatctcgacggcgctgcctcaggtcaacgaggaccttgtgtcccttccacaccagttgccagaggccagtgagcccccccggagcccctctgagaagaggaaaaagacctttgtgggagagccgcagaggctgggctcagagacgtgcctcccacagcacatcagggaggccactgcggctccccacgggaagaggaagaggaagaagaagaagcgcccggaggacacagctgccagcgccctgcaggaggggcagacacagagacagcctgggagccccatgtacaggagggagggccaggcacagctgcccgctgtcagacggcaggaagatggcacacagccacaggtgaatggccagcaggtgggatgtgttacggacggccaccacgcgagcagcaggaagcggaggaggaaaggagcagaaggtcttggtgaagaaggcggcctgcaccaggacccacttcggcacagctgctctcccatgggtgatggtgatccagaggccatggaagagtctccaaggaaaaagaaaaaaagaaagcaggagacacagcgggcagtagaagaggatgggcatctcaaatgcccaaggagtgccaagccccaagatgctgttgtccccgagtccagcagctgcgcaccatccgcgaatggctggtgtcctggggaccgcatggggctgagccaggcccctcctgtgtcttggaatggagagcgggagtctgatgtggtccaggaactgctcaaatactcatctgataaagcttacgggagaaaagttctgacctgggatggcaagatgtcggcggtcagtcaggatgctattgaagacagcagacaggcccggactgagaccgtggttgatgactgggacgaagagtttgaccgagggaaggaaaagaaaattaaaaaatttaagagagagaagaggagaaacttcaacgccttccagaaacttcagactcgacggaacttctggtctgtgactcacccagcaaaggctgccagcctcagctatcgccgctgactgtgcccctgtggaaggaggactaccgtggtttgttctgcagcctcctggagacaaggcgtcccttcccgggagctgtcggtctggatctgagggagctctctgtgtgggctctgctgtgctgggagcctgtcacggtaggagctctcccggtaccagtgtccacagaccgcccaacatagaggctttgaggcttctctagatcggaacctctttggtgacattcccgaccagccctgcaagagaaacgacagtgtgtgtgtgagcagaggtggctgcacacctgctggacatctttgccaggctgtgccttctcatgtttcatagacagtggtctgtgctggcagaggctgctgcccctggttggggctatcaggagagtgggggatggtggccacatgtcctccaggtggtctcccggtgcatagctggtggctctgggcaagccatcccttgcttctcggggctgacgccaccgttgtgtccgagcccgccctcccctgcttcctcagcgggaccccttcatctgttggccttacctgtcctcagaaaggaagaggtgaccccacccagccacctctcccttttatggaactcgagagggtggccctactgtgcaccccttccttgtgagtagctctcaactgtcctggagagcagaggctatttggggtcggaggagccctcgatacctgcgaatacatctgctttccaggctgctgtttattctgagacgactgtgctgtagcttcccttgcagctgcaataacccgcaggtcttcactgaggtggaggctttggggtagaattctccatttattttactacttaatacaaaacatttatttttgaccagtcctgtggcttccattagcaatatgtttcctttcccaaatatgcaaatagtggctttgtttgctcaattttgtgagtgctttggaatttaaatgattgtataactcaagaagattacttttctatgttgctcaagctgtgcctgccaacttgtaacttaataaatacaggaaatcctcagagaaggtgatattttcaggaaaaagacaaatgccctcatatgctcggggcctgggtggttacctgcgtgttggcgataac

SEQ ID NO: 333817 - DNA, 3259 bp, Homo sapiens
taaaaaaaaagaaaaaagaaaaaatatctcctctgataaataccagtggattgatccttgaagcgacagtggtgtggacagtagtgtccatcattgtatgtgcagggccgttcaaggatgctggatcaggtgtcccgggccaggccaggatctgccgtttcatcaggtcacagtagcctgcacattggcgtcaacaggcttggctcagttaggatgggaaacgcgactggttttccctctactgtctccgtggctgcgtgtggagcgtccgctaatgcgtgtggggggaagaatgttgcagggacctgcgtgcactgggtcacagctggggtggcaccttctccatgttgcaggcgggtgtctgtgcgctcctgctccccttccaatttgctcagagctgactgctgcctctcacttccaagcagctgctctcccatgggtgatggtgatccagaggccatggaagagtctccaaggaaaaagaaaaaaagaaagcaggagacacagcgggcagtagaagaggatgggcatctcaaatgcccaaggagtgccaagccccaagatgctgttgtccccgagtccagcagctgcgcaccatccgcgaatggctggtgtcctggggaccgcatggggctgagccaggcccctcctgtgtcttggaatggagagcgggagtctgatgtggtccaggaactgctcaaatactcatctgataaagcttacgggagaaaagttctgacctgggatggcaagatgtcggcggtcagtcaggatgctattgaagacagcagacaggcccggactgagaccgtggttgatgactgggacgaagagtttgaccgagggaaggaaaagaaaattaaaaaatttaagagagagaagaggagaaacttcaacgccttccagaaacttcagactcgacggaacttctggtctgtgactcacccagcaaaggctgccagcctcagctatcgccgctgactgtgcccctgtggaaggaggactaccgtggtttgttctgcagcctcctggagacaaggcgtcccttcccgggagctgtcggtctggatctgagggagctctctgtgtgggctctgctgtgctgggagcctgtcacggtaggagctctcccggtaccagtgtccacagaccgcccaacatagaggctttgaggcttctctagatcggaacctctttggtgacattcccgaccagccctgcaagagaaacgacagtgtgtgtgtgagcagaggtggctgcacacctgctggacatctttgccaggctgtgccttctcatgtttcatagacagtggtctgtgctggcagaggctgctgcccctggttggggctatcaggagagtgggggatggtggccacatgtcctccaggtggtctcccggtgcatagctggtggctctgggcaagccatcccttgcttctcggggctgacgccaccgttgtgtccgagcccgccctcccctgcttcctcagcgggaccccttcatctgttggccttacctgtcctcagaaaggaagaggtgaccccacccagccacctctcccttttatggaactcgagagggtggccctactgtgcaccccttccttgtgagtagctctcaactgtcctggagagcagaggctatttggggtcggaggagccctcgatacctgcgaatacatctgctttccaggctgctgtttattctgagacgactgtgctgtagcttcccttgcagctgcaataacccgcaggtcttcactgaggtggaggctttggggtagaattctccatttattttactacttaatacaaaacatttatttttgaccagtcctgtggcttccattagcaatatgtttcctttcccaaatatgcaaatagtggctttgtttgctcaattttgtgagtgctttggaatttaaatgattgtataactcaagaagattacttttctatgttgctcaagctgtgcctgccaacttgtaacttaataaatacaggaaatcctcagagaaggtgatattttcaggaaaaagacaaatgccctcatagtagtgggaagtgtgaaggtgaccgtgaacatccttcctcatcgggtctgtccccgtcatttcctcccggagtcgtcgcaggtggagatggacaacgtggtgttggacttagacctccttcagtgtggctctgctgggccagaggcatcctgctgtcccgggtggctgcctcgctgtctgcaccccctctccctggggcagctttgcttcctgcccctgtgctcggggcctgggtggttactggcgtgtagatggaattgcttttttaatatgggaagatacatttatttttttccatgtgggtgggtgtctctttttggattttcttctgtttttacgtttctcttcttagaagggtgggagagaatcaagctcctgtggccacctgtgtcccagcagcagtgagtggagctgctcagggtgccctctcctgcggaccagtctctgaatgttcaaagatgagggcctggcttccgtgctctggctttgtaacttatctggaagggaaagcacatgccttcacgggcagggtatgttccttttcttctcggggtgttgacttgcattcctgtgtgaactgttccctctgccatgtttaccgtgtgatgttctgtagttgaaaatgttagttgtctgctggcacagaatttatctcgttcctttctctcccttctctcctccaaatcagtctcttcccttctccactagataactgtaaaaccttttcctggggtacatacattcgttaactcttgggcagtggtgagcacgagatgactttctgcagcgtttatcactgttgggtggagtcacgtcccttccctccaccgaagtcatcaaccagatagggaagggaaagatgaggcccagaaaacgagttcaaactctaggtcttgtacacgtatgtaagtaaatgtcaataacccaagcctttgtcatagcagtcacttggttgacttaggatctgggtctgttgaattttgtgcttgggaatggagctggagggagtggggcctgtgtacagcagctacctctcccaggtcctctcacttgcctgccccgcgtcctggttgcatggccgcacctgtgtgtgtgcagaggtctgtgtcccatcctctgcacctcctttccgggggcctggggagccccacgtgttgccaagatcttggtgcaataaaatactccggttttgtgaaaaaaaa

SEQ ID NO: 333818 - DNA, 2354 bp, Homo sapiens
ccacagatattagaggcggcaccggttgtatttcagtgcggggactggcgtttagtttcaggttatcggcgctgggcgtacaccttcgagaaggaggactaccgtggtttgttctgcagcctcctggagacaaggcgtcccttcccgggagctgtcggtctggatctgagggagctctctgtgtgggctctgctgtgctgggagcctgtcacggtaggagctctcccggtaccagtgtccacagaccgcccaacatagaggctttgaggcttctctagatcggaacctctttggtgacattcccgaccagccctgcaagagaaacgacagtgtgtgtgtgagcagaggtggctgcacacctgctggacatctttgccaggctgtgccttctcatgtttcatagacagtggtctgtgctggcagaggctgctgcccctggttggggctatcaggagagtgggggatggtggccacatgtcctccaggtggtctcccggtgcatagctggtggctctgggcaagccatcccttgcttctcggggctgacgccaccgttgtgtccgagcccgccctcccctgcttcctcagcgggaccccttcatctgttggccttacctgtcctcagaaaggaagaggtgaccccacccagccacctctcccttttatggaactcgagagggtggccctactgtgcaccccttccttgtgagtagctctcaactgtcctggagagcagaggctatttggggtcggaggagccctcgatacctgcgaatacatctgctttccaggctgctgtttattctgagacgactgtgctgtagcttcccttgcagctgcaataacccgcaggtcttcactgaggtggaggctttggggtagaattctccatttattttactacttaatacaaaacatttatttttgaccagtcctgtggcttccattagcaatatgtttcctttcccaaatatgcaaatagtggctttgtttgctcaattttgtgagtgctttggaatttaaatgattgtataactcaagaagattacttttctatgttgctcaagctgtgcctgccaacttgtaacttaataaatacaggaaatcctcagagaaggtgatattttcaggaaaaagacaaatgccctcatagtagtgggaagtgtgaaggtgaccgtgaacatccttcctcatcgggtctgtccccgtcatttcctcccggagtcgtcgcaggtggagatggacaacgtggtgttggacttagacctccttcagtgtggctctgctgggccagaggcatcctgctgtcccgggtggctgcctcgctgtctgcaccccctctccctggggcagctttgcttcctgcccctgtgctcggggcctgggtggttactggcgtgtagatggaattgcttttttaatatgggaagatacatttatttttttccatgtgggtgggtgtctctttttggattttcttctgtttttacgtttctcttcttagaagggtgggagagaatcaagctcctgtggccacctgtgtcccagcagcagtgagtggagctgctcagggtgccctctcctgcggaccagtctctgaatgttcaaagatgagggcctggcttccgtgctctggctttgtaacttatctggaagggaaagcacatgccttcacgggcagggtatgttccttttcttctcggggtgttgacttgcattcctgtgtgaactgttccctctgccatgtttaccgtgtgatgttctgtagttgaaaatgttagttgtctgctggcacagaatttatctcgttcctttctctcccttctctcctccaaatcagtctcttcccttctccactagataactgtaaaaccttttcctggggtacatacattcgttaactcttgggcagtggtgagcacgagatgactttctgcagcgtttatcactgttgggtggagtcacgtcccttccctccaccgaagtcatcaaccagatagggaagggaaagatgaggcccagaaaacgagttcaaactctaggtcttgtacacgtatgtaagtaaatgtcaataacccaagcctttgtcatagcagtcacttggttgacttaggatctgggtctgttgaattttgtgcttgggaatggagctggagggagtggggcctgtgtacagcagctacctctcccaggtcctctcacttgcctgccccgcgtcctggttgcatggccgcacctgtgtgtgtgcagaggtctgtgtcccatcctctgcacctcctttccgggggcctggggagccccacgtgttgccaagatcttggtgcaataaaatactccggttttgtgaaaaaaaa

SEQ ID NO: 333819 - DNA, 2929 bp, Homo sapiens
ctttcggagttagcgcagcgcgaacgctgggtgcggcgcctttaagcgtcgcggtgacacgtgtgtgaggcgccggaggcccggatggtgcgcgtgctgggccgcgggccgaaggagtcgccagggctgcgtaggcttgtggcgcgcccgcggagaggccggggctctgacgcccgctctgcggcttcggtgtttgaacaggccacagtccaggagcgcttacattcaggagctccgcgtagcacctgcccaaccaaactcagccctccgttaagatcctggttccatgccgcagtaggacagcaggcccaagtctgcacatcccagtgatgcaccatgccaatagtggataagttgaaggaggccctgaaacccggccgcaaggactcggctgatgatggagaactggggaagcttcttgcctcctctgccaagaaggtccttttacagaaaatcgagttcgagccagccagcaagagcttctcctaccagctggaggccttaaagagcaaatatgtgttgctcaaccccaaaacagagggagctagtcgccacaagagtggagatgacccaccggccaggagacagggcagtgagcacacgtatgagagctgtggtgacggagtcccagccccgcagaaagtgcttttccccacggagcgactgtctctgaggtgggagcgggtcttccgcgtgggcgcaggactccacaaccttggcaacacctgctttctcaatgccaccatccagtgcttgacctacacaccacctctagccaactacctgctctccaaggagcatgctcgcagctgccaccagggaagcttctgcatgctgtgtgtcatgcagaaccacattgtccaggccttcgccaacagcggcaacgccatcaagcccgtctccttcatccgagacctgaaaaagatcgcccgacacttccgctttgggaaccaggaggacgcgcatgagttcctgcggtacaccatcgacgccatgcagaaagcctgcctgaatggctgtgccaagttggatcgtcaaacgcaggctactaccttggtccatcaaatttttggagggtatctcagatcacgcgtgaagtgctccgtgtgcaagagcgtctcggacacctacgacccctacttggacgtcgcgctggagatccggcaagctgcgaatattgtgcgtgctctggaactttttgtgaaagcagatgtcctgagtggagagaatgcctacatgtgtgctaaatgcaagaagaaggttccagccagcaagcgcttcaccatccacagaacatccaacgtcttaaccctttccctcaagcgctttgccaacttcagcggggggaagatcaccaaggatgtaggctatccggaattcctcaacatacgtccgtatatgtcccagaataatggtgatcctgtcatgtatggactctatgctgtcctggtgcactcgggctacagctgccatgccgggcactattactgctacgtgaaggcaagcaatggacagtggtaccagatgaatgattccttggtccattccagcaacgtcaaggtggttctgaaccagcaggcctacgtgctgttctatctgcgaattccaggctctaagaaaagtcccgagggcctcatctccaggacaggctcctcctcccttcccggccgcccgagtgtgattccagatcactccaagaagaacatcggcaatgggattatttcctccccactgactggaaagcgacaagactctgggacgatgaagaagccgcacaccactgaagagattggtgtgcccatatccaggaatggctccaccctgggcctgaagtcccagaacggctgcattcctccaaagctgccctcggggtccccttcccccaaactctcccagacacccacacacatgccaaccatcctagacgaccctggaaagaaggtgaagaagccagctcctccacagcacttttcccccagaactgctcaggggctgcctgggaccagcaactcgaatagcagcagatctgggagccaaaggcagggctcctgggacagcagggatgttgtcctctctacctcacctaagctcctggctacagccactgccaacgggcatgggctgaaggggaacgacgagagcgctggcctcgacaggaggggctccagcagctccagcccagagcactcggccagcagcgactccaccaaggccccccagacccccaggagtggagcggcccatctctgcgattctcaggaaacgaactgttccaccgctggccactccaaaacgccgccaagtggagcagattctaagacggtgaagctgaagtcccctgtcctgagcaacaccaccactgagcctgcaagcaccatgtctcctccaccagccaaaaaactggccctttctgccaagaaggccagcaccctgtggagggcgaccggcaatgacctccgtccacctcccccctcaccatcctccgacctcacccaccccatgaaaacctctcaccccgtcgttgcctccacttggcccgtccatagagccaggtaagctttgggccgggatcttctgggtgccaactggttctccctgtggttgcgtgtgcttggctggtgaggagttggacgaatcgccaacctcacaggacagacaaagcattggggcagccaggaggtacaggggggcgtcactgaccaagatccccctcttctgtgttcccctgtggtaaaggagctttgggtggtgaaggcagttcggcctctgcagtcctgatgtcttagttctgtctttgttggtggtctgtctgcgacatccttgtggtgatgtggtgtgctggggactgacctgtcctgtatccctaccagccccatgacagtacttcccagtcgaagagaaaggcgaagtgaggccttggcgagaggct

SEQ ID NO: 333820 - DNA, 292 bp, Homo sapiens
tgagaggagcagaaggtcgaaatctcattgatgaagattccactattacagagcagttgttgctgttattaacttagcgttaagacaacatttttcagagcacgaatcaatcatcattaatctttctcatgcaccttcttcatagatgcaagaagaaggttccagccagcaagcgcttcaccatccacagaacatccaacgtcttaaccctttccctcaagcgctttgccaacttcagcggggggaagatcaccaaggtgagcgctcgtgacaccatcccaggcagctccgt

SEQ ID NO: 333821 - DNA, 359 bp, Homo sapiens
ctggctgcattactccatggccatcttcactctcagactagtctagtggaagatggccaggggggcagtggcctggaaactccaccaggaaacagttcagagaggcctcaagttcttcggcctcagagaagacctgaagggatgcagttgctgtttgtaaatcttaaatggctgtcttgggctcagggtgcccctgtggaaaaactcaggaaggatataaatgggtggcagatgcaagaactggctgctttgcagctagtaggcgtgtgctgcagtgtgggcgtccggaccctggtaggagtttgatctagcagcgtttgtccagtaggactttccgccatggagtaaatggcagtatc

SEQ ID NO: 333822 - DNA, 316 bp, Homo sapiens
cacctacagtggagtagcaagggcttcactctcagactagtctagtggaagatggccaggggggcagtggcctggaaactccaccaggaaacagttcagagaggcctcaagttcttcggcctcagagaagacctgaagggatgcagttgctgtttgtaaatcttaaatggctgtcttgggctcagggtgcccctgtggaaaaactcaggaaggatataaatgggtggcagatgcaagaagctgcgctaggctgtatgctaagtacgagcgatctttgtacagtcgagggcctacggaccatgttaaagcatgactg

SEQ ID NO: 333823 - DNA, 366 bp, Homo sapiens
cagcacacaccctccactctccaaccttgcccaagtgctggtccgtcacggcaccaggacagggcatggagacttgggctgattcttttctctcccttcctccctcttttttttcttctctcactcctccttttcctttcctgctgtttcctgctctcctgtttctgtcctgcagtgtctggagctccagagaggctggccctggggtggggtccacatggacatgggcgtaagcaggtttgatggtcatgggcataggcaggttcgatggccagagttctttcagctcacagtaagttttgttttgttttgttttgttttgttttgttttgttttgttttagatggagtcttgctttgtcgccca

SEQ ID NO: 333824 - DNA, 338 bp, Homo sapiens
tggggtgggggtgaggatcatagtgatttctttttaaaagctagtatgactagtgagaatggatgtccaagggcttttctcttcctcccccgagtccacgattcttcatttgtgatcagggttggggtaacttcaccttggtgatcatatattctttttacaaaccaatccagccaagatatatgtgcttttctaaacagcttgtaaaagcaaaaacacaatgtatacacatataaaactgatttttttttttttgcttatatactttgctcaggtggagaacaaggtatgaaagccattatatggtgtcccttggggaccatcccataagtccaggg

SEQ ID NO: 333825 - DNA, 923 bp, Homo sapiens
ccacgaggaacatgaccacacaggtcagcagcatcccacctatcataaagtacttgtcctggaaagccacgctcagtggctgaacagcattcccacagcctgcaagtgtgtgtgtgtgtgaaagagagaggggggcccagaggccgccttttgaaatgtttgcctgtctgaactgtgaagacacttgggagtgattgtggtctaatttccaacctgctctgttttctgtgacatcttggagggggagctagtgccaccaccatgcgcggtgcttaggaaatgaaagaagtcccgggtctgtctctctcactctcgctctcactgggggagggaaagaatggctttggtggctttgttcacacagctgatgcgtgccctgggaaggtgtccacagtgagccctgtgtgcaggactgtccacacggttcacaccttgtcaccatcaggcctttctggctcctgatagggtggagcaaaagtggaaaggaaaggaaagaggccttttctcacagccattatattaaatagtaggtcgattcacatcctcgtgctcctggccacccctctagtggaggcgggggtgaattcttaggtcgagctgatgcaagaaactccggtagccagcctctgtgaccttgtacatgagtttggtgtgcctattgtgatttaaaacaggtgggttatcaagaggaacttgagatctctttattacatggacatttacttcagggggaccactgtaagaaaagccaaactccaagaccaagtaagttagaggagtcttgattttttagacttcactgcggagttctgtacaccctttgccctgatgaatttgaatgggtttgatttgcaaatttggatttacacccattgttttggaagcacatcagctgaataaagttgaggtttattttatttaga

SEQ ID NO: 333826 - DNA, 437 bp, Homo sapiens
ttgatgtttgtttttttttctgttctcttctgccccaggggactcagaagaagatccttgacattgccaacatgctgggcttgtccaacacagtgatgcggctcatcgagaagcgggctttccaggacaagtactttatgataggtgggatgctgctgacctgtgtggtcatgttcctcgtggtgcagtacctgacatgagccagccacgctcagtggctgaacagcattcccacagcctgcaagtgtgtgtgtgtgtgaaagagagaggggggcccagaggccgccttttgaaatgtttgcctgtctgaactgtgaagacacttgggagtgattgtggtctaatttccaacctgctctgttttctgtgacatcttggagggggagctagtgccaccaccatgcgcggtgcttaggaaatgaaagaagtcccgggtc

SEQ ID NO: 333827 - DNA, 672 bp, Homo sapiens
accggaaggggggctgtgaggacgtgttccgaggaagccagacccggagccgtggcctgccgggccggcgacatggatcccctgttccagcaaacgcacaagcaggtccacgagatccagtcttgcatgggacgcctggagacggcagacaagcagtctgtgcacatagtagaaaacgaaatccaagcaagcatagaccagatattcagccgtctagaacgtctggagattttgtccagcaaggagccccctaacaaaaggcaaaatgccagacttcgggttgaccagttaaagtatgatgtccagcacctgcagactgcgctcagaaacttccagcatcggcgccatgcaagggagcagcaggagagacagcgagaagagcttctgtctcgaaccttcaccactaacgggactcagaagaagatccttgacattgccaacatgctgggcttgtccaacacagtgatgcggctcatcgagaagcgggctttccaggacaagtactttatgatagagaatagcatcttgctctgttgcccaggctggagtgcaatagcacaataagagctcactgcagtctcgaactcctggtctcaagtgatcctcctgcctcagcctcccaagtagctgagactacaggagcgtgccatcacacctgtgtaattgacttat

SEQ ID NO: 333828 - DNA, 500 bp, Homo sapiens
accggaaggggggctgtgaggacgtgttccgaggaagccagacccggagccgtggcctgccgggccggcgacatggatcccctgttccagcaaacgcacaagcaggtccacgagatccagtcttgcatgggacgcctggagacggcagacaagcagtctgtgcacagtgagtaattaactgtggagaccagagtcctttctctgatgacagggtgctaatgggctgggcttcctgactgcactctgccttgggggcttaatgattcagcgtggaatgagttttgttgttagggtggacagaaaaaccctatggcaaagtcactgatttccctgagtgtgccctttggaatcccacaagtcttatcccccattacccctccactcaacctgacatggccctatgggaatggaagcgcttgcctccatctatcttaatctaattacctagtccttagaggaatgtactccataaaaattcagagatgtttaactggaattgg

SEQ ID NO: 333829 - DNA, 298 bp, Homo sapiens
ccacgaggaacatgaccacacaggtcagcagcatcccacctatcataaagtacttgtcctggaaagccacgctcagtggctgaacagcattcccacagcctgcaagtgtgtgtgtgtgtgaaagagagaggggggcccagaggccgccttttgaaatgtttgcctgtctgaactgtgaagacacttgggagtgattgtggtctaatttccaacctgctctgttttctgtgacatcttggagggggagctagtgccaccaccatgcgcggtgcttaggaaatgaaagaagtcccgggtc

SEQ ID NO: 333830 - DNA, 3991 bp, Homo sapiens
accggaaggggggctgtgaggacgtgttccgaggaagccagacccggagccgtggcctgccgggccggcgacatggatcccctgttccagcaaacgcacaagcaggtccacgagatccagtcttgcatgggacgcctggagacggcagacaagcagtctgtgcacatagtagaaaacgaaatccaagcaagcatagaccagatattcagccgtctagaacgtctggagattttgtccagcaaggagccccctaacaaaaggcaaaatgccagacttcgggttgaccagttaaagtatgatgtccagcacctgcagactgcgctcagaaacttccagcatcggcgccatgcaagggagcagcaggagagacagcgagaagagcttctgtctcgaaccttcaccactaacgactctgacaccaccataccaatggacgaatcactgcagtttaactcctccctccagaaagttcacaacggcatggatgacctcattttagatgggcacaatattttagatggactgaggacccagagactgaccttgaaggggactcagaagaagatccttgacattgccaacatgctgggcttgtccaacacagtgatgcggctcatcgagaagcgggctttccaggacaagtactttatgataggtgggatgctgctgacctgtgtggtcatgttcctcgtggtgcagtacctgacatgagccagccacgctcagtggctgaacagcattcccacagcctgcaagtgtgtgtgtgtgtgaaagagagaggggggcccagaggccgccttttgaaatgtttgcctgtctgaactgtgaagacacttgggagtgattgtggtctaatttccaacctgctctgttttctgtgacatcttggagggggagctagtgccaccaccatgcgcggtgcttaggaaatgaaagaagtcccgggtctgtctctctcactctcgctctcactgggggagggaaagaatggctttggtggctttgttcacacagctgatgcgtgccctgggaaggtgtccacagtgagccctgtgtgcaggactgtccacacggttcacaccttgtcaccatcaggcctttctggctcctgatagggtggagcaaaagtggaaaggaaaggaaagaggccttttctcacagccattatattaaatagtaggtcgattcacatcctcgtgctcctggccaccctcccctgtgcctcagtgacatgtagatgactgactgccaatacttgtcaccattccctggaagcagctacctaggggaaacaagatgtagtgctattgccgataacaagtaagattttccacactacagctgggtgtttctcttttctaaagtgaggccagtgttatttcccgggagtgttcagtcttgaccctagtcactgattttttctagttgttaatagagtggttggcttttaaggttcagagactgtggcttggcacctgcgcccaggctttgtgggcctttgccccttagaaagtagctgtaggcaaagatttgtgattttccaattacagtctcagctctagttttagtatctctaattctttggttcccttctcttccctgaaatatattagcacctgccagccaggccctcattttgcccagccagtgtgggcagatcccaccgtggagacatctgtagtgtgtatgtccttgtaacactctgttttcagggactacaacctttttccttctgtgaccagccccggattcaggctgtactaataccaggtatattgtggaatttagtataaaggccaatctgtcctgaagtccatctaatgtggtgaatcactgaaagtctcagaaagacctggttagtgtatgttctcatttaccacaggcctaccagccctgggcacagcagcttcatggcaagacataaaatgacactcaaaatccttcagatctggaaaccggctcagtattaaccctacctttggttgtcctgccctacctgctctgttagtttcttgttgcttgaactgtcttctgtcttatttcccttcctttctgtgttcctcttcacctctcttgttcccctccccgctgctctgtagtcatgttggtcctttcaggcacctctgtggcatagctcccctttggtaagttttcttaattgtcatagattaactgagtttcctggatgctaatttcacactttcggttggaggagatctccattgttcccacccctccgggccaaatgggccccaggtttccaaggaaggagcaatctgtgactcctaaaatgggttggggccctgccagagttaaagcagtgactggagggtggactggggggttgcagcatctttagacctagatctgtctaactctggggaggcacattgacatttccattacacacagcactgctgcggtgccagggacctagcgcaggacttttggtaatccataaaatggattctgagactgcgacggcaaggctgtcctgtcccccaggcacccaaggatcctgccagacagcacactttggaggaaggtctgcagggagcagctgagccatttgttcttgaactctgggaggcagaagtccccgcacccatcatgcgtggactgataggacatcttttcgtggtgtgcaccagtgctttccacacttgacagtggttggctttgatgaaccctcatgctgcaccttcagagccagtcctctagtttggaataaaaattgcagaggtggtttttgggtctttaccacctgcggctggtggacagcagccagtgtgtctggacacccaggggcattgagactgcatgttgtcacatgaccacttctcttcacacatctgctttcagtgcctggtgaaaaatagaccttggcctaacagtgtgactctctccaccgcctcagtgtagggaagggtccaggccagggaaggagcaccctctagtggaggcgggggtgaattcttaggtcgagctgatgcaagaaactccggtagccagcctctgtgaccttgtacatgagtttggtgtgcctattgtgatttaaaacaggtgggttatcaagaggaacttgagatctctttattacatggacatttacttcagggggaccactgtaagaaaagccaaactccaagaccaagtaagttagaggagtcttgattttttagacttcactgcggagttctgtacaccctttgccctgatgaatttgaatgggtttgatttgcaaatttggatttacacccattgttttggaagcacatcagctgaataaagttgaggtttattttatttagaaaatcacattttgtaaaagaattcgatattcatttttataactaatggccccctttttttatgtttctaggccagagattctcaaacactgctccatggccaggggctgggctggctgcttcagaagcagtggggaagctttttaaaattacatattcctggggcctaccccagatctgaattagaaccttttttaaatctctaaggtgattttattttattttttatttttgagacagtctcgctctgtcacccaggctggagtgcagtggcgcaatcttggctcactgcatcctctgcctcctgggttcaggtgatcctcatacttcggcctcccaaagttctagggttacaggtgttagccactgtacctggcctctaaggtgattctgatgtgtgtattttggaaccactgtctcctagacagaaagcttctgtctcaaagatgatcacattggtgtaaagagcaaaacttgttaagtccaaaataaattcttactgtttatatcctaccttagtccaaaaaagatttgaggagactttgaggaaataactgaaacagatacaaagaagtgaggcacaagaacaaatcaagtcagtgtagaatgtcgacatcaggacaaggaactcaaacgttgtaacaccctaagaaatgtttggggaaccctaatttgacttt

SEQ ID NO: 333831 - DNA, 4106 bp, Homo sapiens
accggaaggggggctgtgaggacgtgttccgaggaagccagacccggagccgtggcctgccgggccggcgacatggatcccctgttccagcaaacgcacaagcaggtccacgagatccagtcttgcatgggacgcctggagacggcagacaagcagtctgtgcacatagtagaaaacgaaatccaagcaagcatagaccagatattcagccgtctagaacgtctggagattttgtccagcaaggagccccctaacaaaaggcaaaatgccagacttcgggttgaccagttaaagtatgatgtccagcacctgcagactgcgctcagaaacttccagcatcggcgccatgcaagggagcagcaggagagacagcgagaagagcttctgtctcgaaccttcaccactaacgactctgacaccaccataccaatggacgaatcactgcagtttaactcctccctccagaaagttcacaacggcatggatgacctcattttagatgggcacaatattttagatggactgaggacccagagactgaccttgaaggggactcagaagaagatccttgacattgccaacatgctgggcttgtccaacacagtgatgcggctcatcgagaagcgggctttccaggacaagtactttatgataggtgggatgctgctgacctgtgtggtcatgttcctcgtggtgcagtacctgacatgagccagccacgctcagtggctgaacagcattcccacagcctgcaagtgtgtgtgtgtgtgaaagagagaggggggcccagaggccgccttttgaaatgtttgcctgtctgaactgtgaagacacttgggagtgattgtggtctaatttccaacctgctctgttttctgtgacatcttggagggggagctagtgccaccaccatgcgcggtgcttaggaaatgaaagaagtcccgggtctgtctctctcactctcgctctcactgggggagggaaagaatggctttggtggctttgttcacacagctgatgcgtgccctgggaaggtgtccacagtgagccctgtgtgcaggactgtccacacggttcacaccttgtcaccatcaggcctttctggctcctgatagggtggagcaaaagtggaaaggaaaggaaagaggccttttctcacagccattatattaaatagtaggtcgattcacatcctcgtgctcctggccaccctcccctgtgcctcagtgacatgtagatgactgactgccaatacttgtcaccattccctggaagcagctacctaggggaaacaagatgtagtgctattgccgataacaagtaagattttccacactacagctgggtgtttctcttttctaaagtgaggccagtgttatttcccgggagtgttcagtcttgaccctagtcactgattttttctagttgttaatagagtggttggcttttaaggttcagagactgtggcttggcacctgcgcccaggctttgtgggcctttgccccttagaaagtagctgtaggcaaagatttgtgattttccaattacagtctcagctctagttttagtatctctaattctttggttcccttctcttccctgaaatatattagcacctgccagccaggccctcattttgcccagccagtgtgggcagatcccaccgtggagacatctgtagtgtgtatgtccttgtaacactctgttttcagggactacaacctttttccttctgtgaccagccccggattcaggctgtactaataccaggtatattgtggaatttagtataaaggccaatctgtcctgaagtccatctaatgtggtgaatcactgaaagtctcagaaagacctggttagtgtatgttctcatttaccacaggcctaccagccctgggcacagcagcttcatggcaagacataaaatgacactcaaaatccttcagatctggaaaccggctcagtattaaccctacctttggttgtcctgccctacctgctctgttagtttcttgttgcttgaactgtcttctgtcttatttcccttcctttctgtgttcctcttcacctctcttgttcccctccccgctgctctgtagtcatgttggtcctttcaggcacctctgtggcatagctcccctttggtaagttttcttaattgtcatagattaactgagtttcctggatgctaatttcacactttcggttggaggagatctccattgttcccacccctccgggccaaatgggccccaggtttccaaggaaggagcaatctgtgactcctaaaatgggttggggccctgccagagttaaagcagtgactggagggtggactggggggttgcagcatctttagacctagatctgtctaactctggggaggcacattgacatttccattacacacagcactgctgcggtgccagggacctagcgcaggacttttggtaatccataaaatggattctgagactgcgacggcaaggctgtcctgtcccccaggcacgaaggtctgcagggagcagctgagccatttgttcttgaactctgggaggcagaagtccccgcacccatcatgcgtggactgataggacatcttttcgtggtgtgcaccagtgctttccacacttgacagtggttggctttgatgaaccctcatgctgcaccttcagagccagtcctctagtttggaataaaaattgcagaggtggtttttgggtctttaccacctgcggctggtggacagcagccagtgtgtctggacacccaggggcattgagactgcatgttgtcacatgaccacttctcttcacacatctgctttcagtgcctggtgaaaaatagaccttggcctaacagtgtgactctctccaccgcctcagtgtagggaagggtccaggccagggaaggagcaccctctagtggaggcgggggtgaattcttaggtcgagctgatgcaagaaactccggtagccagcctctgtgaccttgtacatgagtttggtgtgcctattgtgatttaaaacaggtgggttatcaagaggaacttgagatctctttattacatggacatttacttcagggggaccactgtaagaaaagccaaactccaagaccaagtaagttagaggagtcttgattttttagacttcactgcggagttctgtacaccctttgccctgatgaatttgaatgggtttgatttgcaaatttggatttacacccattgttttggaagcacatcagctgaataaagttgaggtttattttatttagaaaatcacattttgtaaaagaattcgatattcatttttataactaatggccccctttttttatgtttctaggccagagattctcaaacactgctccatggccaggggctgggctggctgcttcagaagcagtggggaagctttttaaaattacatattcctggggcctaccccagatctgaattagaaccttttttaaatctctaaggtgattttattttattttttatttttgagacagtctcgctctgtcacccaggctggagtgcagtggcgcaatcttggctcactgcatcctctgcctcctgggttcaggtgatcctcatacctcagcctcctgagtagctggaactacaagtgtgtgccaccatgtctggctaattttttttttttttttgtattttttagtagagacagggttttactatgttgaccagattggtcttaaactcctggcctcaagtgatctgcctgcttcggcctcccaaagttctagggttacaggtgttagccactgtacctggcctctaaggtgattctgatgtgtgtattttggaaccactgtctcctagacagaaagcttctgtctcaaagatgatcacattggtgtaaagagcaaaacttgttaagtccaaaataaattcttactgtttatatcctaccttagtccaaaaaagatttgaggagactttgaggaaataactgaaacagatacaaagaagtgaggcacaagaacaaatcaagtcagtgtagaatgtcgacatcaggacaaggaactcaaacgttgtaacaccctaagaaatgtttggggaaccctaatttgacttt

SEQ ID NO: 333832 - DNA, 3897 bp, Homo sapiens
accggaaggggggctgtgaggacgtgttccgaggaagccagacccggagccgtggcctgccgggccggcgacatggatcccctgttccagcaaacgcacaagcaggtccacgagatccagtcttgcatgggacgcctggagacggcagacaagcagtctgtgcacatagtagaaaacgaaatccaagcaagcatagaccagatattcagccgtctagaacgtctggagattttgtccagcaaggagccccctaacaaaaggcaaaatgccagacttcgggttgaccagttaaagtatgatgtccagcacctgcagactgcgctcagaaacttccagcatcggcgccatgcaagggagcagcaggagagacagcgagaagagcttctgtctcgaaccttcaccactaacgactctgacaccaccataccaatggacgaatcactgcagtttaactcctccctccagaaagttcacaacggcatggatgacctcattttagatgggcacaatattttagatggactgaggacccagagactgaccttgaaggggactcagaagaagatccttgacattgccaacatgctgggcttgtccaacacagtgatgcggctcatcgagaagcgggctttccaggacaagtactttatgataggtgggatgctgctgacctgtgtggtcatgttcctcgtggtgcagtacctgacatgagccagccacgctcagtggctgaacagcattcccacagcctgcaagtgtgtgtgtgtgtgaaagagagaggggggcccagaggccgccttttgaaatgtttgcctgtctgaactgtgaagacacttgggagtgattgtggtctaatttccaacctgctctgttttctgtgacatcttggagggggagctagtgccaccaccatgcgcggtgcttaggaaatgaaagaagtcccgggtctgtctctctcactctcgctctcactgggggagggaaagaatggctttggtggctttgttcacacagctgatgcgtgccctgggaaggtgtccacagtgagccctgtgtgcaggactgtccacacggttcacaccttgtcaccatcaggcctttctggctcctgatagggtggagcaaaagtggaaaggaaaggaaagaggccttttctcacagccattatattaaatagtaggtcgattcacatcctcgtgctcctggccaccctcccctgtgcctcagtgacatgtagatgactgactgccaatacttgtcaccattccctggaagcagctacctaggggaaacaagatgtagtgctattgccgataacaagtaagattttccacactacagctgggtgtttctcttttctaaagtgaggccagtgttatttcccgggagtgttcagtcttgaccctagtcactgattttttctagttgttaatagagtggttggcttttaaggttcagagactgtggcttggcacctgcgcccaggctttgtgggcctttgccccttagaaagtagctgtaggcaaagatttgtgattttccaattacagtctcagctctagttttagtatctctaattctttggttcccttctcttccctgaaatatattagcacctgccagccaggccctcattttgcccagccagtgtgggcagatcccaccgtggagacatctgtagtgtgtatgtccttgtaacactctgttttcagggactacaacctttttccttctgtgaccagccccggattcaggctgtactaataccaggtatattgtggaatttagtataaaggccaatctgtcctgaagtccatctaatgtggtgaatcactgaaagtctcagaaagacctggttagtgtatgttctcatttaccacaggcctaccagccctgggcacagcagcttcatggcaagacataaaatgacactcaaaatccttcagatctggaaaccggctcagtattaaccctacctttggttgtcctgccctacctgctctgttagtttcttgttgcttgaactgtcttctgtcttatttcccttcctttctgtgttcctcttcacctctcttgttcccctccccgctgctctgtagtcatgttggtcctttcaggcacctctgtggcatagctcccctttggtaagttttcttaattgtcatagattaactgagtttcctggatgctaatttcacactttcggttggaggagatctccattgttcccacccctccgggccaaatgggccccaggtttccaaggaaggagcaatctgtgactcctaaaatgggttggggccctgccagagttaaagcagtgactggagggtggactggggggttgcagcatctttagacctagatctgtctaactctggggaggcacattgacatttccattacacacagcactgctgcggtgccagggacctagcgcaggacttttggtaatccataaaatggattctgagactgcgacggcaaggctgtcctgtcccccaggcacccaaggatcctgccagacagcacactttggaggaaggtctgcagggagcagctgagccatttgttcttgaactctgggaggcagaagtccccgcacccatcatgcgtggactgataggacatcttttcgtggtgtgcaccagtgctttccacacttgacagtggttggctttgatgaaccctcatgctgcaccttcagagccagtcctctagtttggaataaaaattgcagaggtggtttttgggtctttaccacctgcggctggtggacagcagccagtgtgtctggacacccaggggcattgagactgcatgttgtcacatgaccacttctcttcacacatctgctttcagtgcctggtgaaaaatagaccttggcctaacagtgtgactctctccaccgcctcagtgtagggaagggtccaggccagggaaggagcaccctctagtggaggcgggggtgaattcttaggtcgagctgatgcaagaaactccggtagccagcctctgtgaccttgtacatgagtttggtgtgcctattgtgatttaaaacaggtgggttatcaagaggaacttgagatctctttattacatggacatttacttcagggggaccactgtaagaaaagccaaactccaagaccaagtaagttagaggagtcttgattttttagacttcactgcggagttctgtacaccctttgccctgatgaatttgaatgggtttgatttgcaaatttggatttacacccattgttttggaagcacatcagctgaataaagttgaggtttattttatttagaaaatcacattttgtaaaagaattcgatattcatttttataactaatggccccctttttttatgtttctaggccagagattctcaaacactgctccatggccaggggctgggctggctgcttcagaagcagtggggaagctttttaaaattacatattcctggggcctaccccagatctgaattagaaccttttttaaatctctaaggtgattttattttattttttatttttgagacagaaaaaaaaaaaaaaaaagcccacctgaaagcctgtctctttccacttggttggcccttccagggggattatcgagcatgtggttttttcatagtgccttttccttattcagggttcgtcagaggggttaacaggaatcaaaatcgtggggctaaattaggttaaaggaggccaaagtttcacgcaagtggtccctacgcgggaaaaatttccctcgcgagagggagccgggacacacaaggaacacgcgacgggaaggggaggcccggtggacaaagcaggggtatagccgctagggtggagcctgggtccggacgctgccgggccgggtgtagccccgcaagatg

SEQ ID NO: 333833 - DNA, 3069 bp, Homo sapiens
accggaaggggggctgtgaggacgtgttccgaggaagccagacccggagccgtggcctgccgggccggcgacatggatcccctgttccagcaaacgcacaagcaggtccacgagatccagtcttgcatgggacgcctggagacggcagacaagcagtctgtgcacatagtagaaaacgaaatccaagcaagcatagaccagatattcagccgtctagaacgtctggagattttgtccagcaaggagccccctaacaaaaggcaaaatgccagacttcgggttgaccagttaaagtatgatgtccagcacctgcagactgcgctcagaaacttccagcatcggcgccatgcaagggagcagcaggagagacagcgagaagagcttctgtctcgaaccttcaccactaacgactctgacaccaccataccaatggacgaatcactgcagtttaactcctccctccagaaagttcacaacggcatggatgacctcattttagatgggcacaatattttagatggactgaggacccagagactgaccttgaaggggactcagaagaagatccttgacattgccaacatgctgggcttgtccaacacagtgatgcggctcatcgagaagcgggctttccaggacaagtactttatgataggtgggatgctgctgacctgtgtggtcatgttcctcgtggtgcagtacctgacatgagccagccacgctcagtggctgaacagcattcccacagcctgcaagtgtgtgtgtgtgtgaaagagagaggggggcccagaggccgccttttgaaatgtttgcctgtctgaactgtgaagacacttgggagtgattgtggtctaatttccaacctgctctgttttctgtgacatcttggagggggagctagtgccaccaccatgcgcggtgcttaggaaatgaaagaagtcccgggtctgtctctctcactctcgctctcactgggggagggaaagaatggctttggtggctttgttcacacagctgatgcgtgccctgggaaggtgtccacagtgagccctgtgtgcaggactgtccacacggttcacaccttgtcaccatcaggcctttctggctcctgatagggtggagcaaaagtggaaaggaaaggaaagaggccttttctcacagccattatattaaatagtaggtcgattcacatcctcgtgctcctggccaccctcccctgtgcctcagtgacatgtagatgactgactgccaatacttgtcaccattccctggaagcagctacctaggggaaacaagatgtagtgctattgccgataacaagtaagattttccacactacagctgggtgtttctcttttctaaagtgaggccagtgttatttcccgggagtgttcagtcttgaccctagtcactgattttttctagttgttaatagagtggttggcttttaaggttcagagactgtggcttggcacctgcgcccaggctttgtgggcctttgccccttagaaagtagctgtaggcaaagatttgtgattttccaattacagtctcagctctagttttagtatctctaattctttggttcccttctcttccctgaaatatattagcacctgccagccaggccctcattttgcccagccagtgtgggcagatcccaccgtggagacatctgtagtgtgtatgtccttgtaacactctgttttcagggactacaacctttttccttctgtgaccagccccggattcaggctgtactaataccaggtatattgtggaatttagtataaaggccaatctgtcctgaagtccatctaatgtggtgaatcactgaaagtctcagaaagacctggttagtgtatgttctcatttaccacaggcctaccagccctgggcacagcagcttcatggcaagacataaaatgacactcaaaatccttcagatctggaaaccggctcagtattaaccctacctttggttgtcctgccctacctgctctgttagtttcttgttgcttgaactgtcttctgtcttatttcccttcctttctgtgttcctcttcacctctcttgttcccctccccgctgctctgtagtcatgttggtcctttcaggcacctctgtggcatagctcccctttggtaagttttcttaattgtcatagattaactgagtttcctggatgctaatttcacactttcggttggaggagatctccattgttcccacccctccgggccaaatgggccccaggtttccaaggaaggagcaatctgtgactcctaaaatgggttggggccctgccagagttaaagcagtgactggagggtggactggggggttgcagcatctttagacctagatctgtctaactctggggaggcacattgacatttccattacacacagcactgctgcggtgccagggacctagcgcaggacttttggtaatccataaaatggattctgagactgcgacggcaaggctgtcctgtcccccaggcacccaaggatcctgccagacagcacactttggaggaaggtctgcagggagcagctgagccatttgttcttgaactctgggaggcagaagtccccgcacccatcatgcgtggactgataggacatcttttcgtggtgtgcaccagtgtgactctctccaccgcctcagtgtagggaagggtccaggccagggaaggagcaccctctagtggaggcgggggtgaattcttaggtcgagctgatgcaagaaactccggtagccagcctctgtgaccttgtacatgagtttggtgtgcctattgtgatttaaaacaggtgggttatcaagaggaacttgagatctctttattacatggacatttacttcagggggaccactgtaagaaaagccaaactccaagaccaagtaagttagaggagtcttgattttttagacttcactgcggagttctgtacaccctttgccctgatgaatttgaatgggtttgatttgcaaatttggatttacacccattgttttggaagcacatcagctgaataaagttgaggtttattttatttaga

SEQ ID NO: 333834 - DNA, 2746 bp, Homo sapiens
accggaaggggggctgtgaggacgtgttccgaggaagccagacccggagccgtggcctgccgggccggcgacatggatcccctgttccagcaaacgcacaagcaggtccacgagatccagtcttgcatgggacgcctggagacggcagacaagcagtctgtgcacatagtagaaaacgaaatccaagcaagcatagaccagatattcagccgtctagaacgtctggagattttgtccagcaaggagccccctaacaaaaggcaaaatgccagacttcgggttgaccagttaaagtatgatgtccagcacctgcagactgcgctcagaaacttccagcatcggcgccatgcaagggagcagcaggagagacagcgagaagagcttctgtctcgaaccttcaccactaacgactctgacaccaccataccaatggacgaatcactgcagtttaactcctccctccagaaagttcacaacggcatggatgacctcattttagatgggcacaatattttagatggactgaggacccagagactgaccttgaaggggactcagaagaagatccttgacattgccaacatgctgggcttgtccaacacagtgatgcggctcatcgagaagcgggctttccaggacaagtactttatgataggtgggatgctgctgacctgtgtggtcatgttcctcgtggtgcagtacctgacatgagccagccacgctcagtggctgaacagcattcccacagcctgcaagtgtgtgtgtgtgtgaaagagagaggggggcccagaggccgccttttgaaatgtttgcctgtctgaactgtgaagacacttgggagtgattgtggtctaatttccaacctgctctgttttctgtgacatcttggagggggagctagtgccaccaccatgcgcggtgcttaggaaatgaaagaagtcccgggtctgtctctctcactctcgctctcactgggggagggaaagaatggctttggtggctttgttcacacagctgatgcgtgccctgggaaggtgtccacagtgagccctgtgtgcaggactgtccacacggttcacaccttgtcaccatcaggcctttctggctcctgatagggtggagcaaaagtggaaaggaaaggaaagaggccttttctcacagccattatattaaatagtaggtcgattcacatcctcgtgctcctggccaccctcccctgtgcctcagtgacatgtagatgactgactgccaatacttgtcaccattccctggaagcagctacctaggggaaacaagatgtagtgctattgccgataacaagtaagattttccacactacagctgggtgtttctcttttctaaagtgaggccagtgttatttcccgggagtgttcagtcttgaccctagtcactgattttttctagttgttaatagagtggttggcttttaaggttcagagactgtggcttggcacctgcgcccaggctttgtgggcctttgccccttagaaagtagctgtaggcaaagatttgtgattttccaattacagtctcagctctagttttagtatctctaattctttggttcccttctcttccctgaaatatattagcacctgccagccaggccctcattttgcccagccagtgtgggcagatcccaccgtggagacatctgtagtgtgtatgtccttgtaacactctgttttcagggactacaacctttttccttctgtgaccagccccggattcaggctgtactaataccaggtatattgtggaatttagtataaaggccaatctgtcctgaagtccatctaatgtggtgaatcactgaaagtctcagaaagacctggttagtgtatgttctcatttaccacaggcctaccagccctgggcacagcagcttcatggcaagacataaaatgacactcaaaatccttcagatctggaaaccggctcagtattaaccctacctttggttgtcctgccctacctgctctgttagtttcttgttgcttgaactgtcttctgtcttatttcccttcctttctgtgttcctcttcacctctcttgttcccctccccgctgctctgtagtcatgttggtcctttcaggcacctctgtggcatagctcccctttggtaagttttcttaattgtcatagattaactgagtttcctggatgctaatttcacactttcggttggaggagatctccattgttcccacccctccgggccaaatgggccccaggtttccaaggaaggagcaatctgtgactcctaaaatgggttggggccctgccagagttaaagcagtgactggagggtggactggggggttgcagcatctttagacctagatctgtctaactctggggaggcacattgacatttccattacacacagcactgctgcggtgccagggacctagcgcaggacttttggtaatccataaaatggattctgagactgcgacggcaaggctgtcctgtcccccaggcacccaaggatcctgccagacagcacactttggaggaaggtctgcagggagcagctgagccatttgttcttgaactctgggaggcagaagtccccgcacccatcatgcgtggactgataggacatcttttcgtggtgtgcaccagtgctttccacacttgacagtggttggctttgatgaaccctcatgctgcaccttcagagccagtcctctagtttggaataaaaattgcagaggtgg

SEQ ID NO: 333835 - DNA, 4346 bp, Homo sapiens
accggaaggggggctgtgaggacgtgttccgaggaagccagacccggagccgtggcctgccgggccggcgacatggatcccctgttccagcaaacgcacaaggttcatctatattgtagcctgttaccagaatttcattctgttttatgacggaataatattccgttttatgtgtctaccacattttgttatccattcatctgttgatggacacttgagttgtttccaccattgggctgttgagaataatactgctatgaactctggtgtagaagtatctgttttagtttctcttctcaattttttgaggcaggtccacgagatccagtcttgcatgggacgcctggagacggcagacaagcagtctgtgcacatagtagaaaacgaaatccaagcaagcatagaccagatattcagccgtctagaacgtctggagattttgtccagcaaggagccccctaacaaaaggcaaaatgccagacttcgggttgaccagttaaagtatgatgtccagcacctgcagactgcgctcagaaacttccagcatcggcgccatgcaagggagcagcaggagagacagcgagaagagcttctgtctcgaaccttcaccactaacgactctgacaccaccataccaatggacgaatcactgcagtttaactcctccctccagaaagttcacaacggcatggatgacctcattttagatgggcacaatattttagatggactgaggacccagagactgaccttgaaggggactcagaagaagatccttgacattgccaacatgctgggcttgtccaacacagtgatgcggctcatcgagaagcgggctttccaggacaagtactttatgataggtgggatgctgctgacctgtgtggtcatgttcctcgtggtgcagtacctgacatgagccagccacgctcagtggctgaacagcattcccacagcctgcaagtgtgtgtgtgtgtgaaagagagaggggggcccagaggccgccttttgaaatgtttgcctgtctgaactgtgaagacacttgggagtgattgtggtctaatttccaacctgctctgttttctgtgacatcttggagggggagctagtgccaccaccatgcgcggtgcttaggaaatgaaagaagtcccgggtctgtctctctcactctcgctctcactgggggagggaaagaatggctttggtggctttgttcacacagctgatgcgtgccctgggaaggtgtccacagtgagccctgtgtgcaggactgtccacacggttcacaccttgtcaccatcaggcctttctggctcctgatagggtggagcaaaagtggaaaggaaaggaaagaggccttttctcacagccattatattaaatagtaggtcgattcacatcctcgtgctcctggccaccctcccctgtgcctcagtgacatgtagatgactgactgccaatacttgtcaccattccctggaagcagctacctaggggaaacaagatgtagtgctattgccgataacaagtaagattttccacactacagctgggtgtttctcttttctaaagtgaggccagtgttatttcccgggagtgttcagtcttgaccctagtcactgattttttctagttgttaatagagtggttggcttttaaggttcagagactgtggcttggcacctgcgcccaggctttgtgggcctttgccccttagaaagtagctgtaggcaaagatttgtgattttccaattacagtctcagctctagttttagtatctctaattctttggttcccttctcttccctgaaatatattagcacctgccagccaggccctcattttgcccagccagtgtgggcagatcccaccgtggagacatctgtagtgtgtatgtccttgtaacactctgttttcagggactacaacctttttccttctgtgaccagccccggattcaggctgtactaataccaggtatattgtggaatttagtataaaggccaatctgtcctgaagtccatctaatgtggtgaatcactgaaagtctcagaaagacctggttagtgtatgttctcatttaccacaggcctaccagccctgggcacagcagcttcatggcaagacataaaatgacactcaaaatccttcagatctggaaaccggctcagtattaaccctacctttggttgtcctgccctacctgctctgttagtttcttgttgcttgaactgtcttctgtcttatttcccttcctttctgtgttcctcttcacctctcttgttcccctccccgctgctctgtagtcatgttggtcctttcaggcacctctgtggcatagctcccctttggtaagttttcttaattgtcatagattaactgagtttcctggatgctaatttcacactttcggttggaggagatctccattgttcccacccctccgggccaaatgggccccaggtttccaaggaaggagcaatctgtgactcctaaaatgggttggggccctgccagagttaaagcagtgactggagggtggactggggggttgcagcatctttagacctagatctgtctaactctggggaggcacattgacatttccattacacacagcactgctgcggtgccagggacctagcgcaggacttttggtaatccataaaatggattctgagactgcgacggcaaggctgtcctgtcccccaggcacccaaggatcctgccagacagcacactttggaggaaggtctgcagggagcagctgagccatttgttcttgaactctgggaggcagaagtccccgcacccatcatgcgtggactgataggacatcttttcgtggtgtgcaccagtgctttccacacttgacagtggttggctttgatgaaccctcatgctgcaccttcagagccagtcctctagtttggaataaaaattgcagaggtggtttttgggtctttaccacctgcggctggtggacagcagccagtgtgtctggacacccaggggcattgagactgcatgttgtcacatgaccacttctcttcacacatctgctttcagtgcctggtgaaaaatagaccttggcctaacagtgtgactctctccaccgcctcagtgtagggaagggtccaggccagggaaggagcaccctctagtggaggcgggggtgaattcttaggtcgagctgatgcaagaaactccggtagccagcctctgtgaccttgtacatgagtttggtgtgcctattgtgatttaaaacaggtgggttatcaagaggaacttgagatctctttattacatggacatttacttcagggggaccactgtaagaaaagccaaactccaagaccaagtaagttagaggagtcttgattttttagacttcactgcggagttctgtacaccctttgccctgatgaatttgaatgggtttgatttgcaaatttggatttacacccattgttttggaagcacatcagctgaataaagttgaggtttattttatttagaaaatcacattttgtaaaagaattcgatattcatttttataactaatggccccctttttttatgtttctaggccagagattctcaaacactgctccatggccaggggctgggctggctgcttcagaagcagtggggaagctttttaaaattacatattcctggggcctaccccagatctgaattagaaccttttttaaatctctaaggtgattttattttattttttatttttgagacagtctcgctctgtcacccaggctggagtgcagtggcgcaatcttggctcactgcatcctctgcctcctgggttcaggtgatcctcatacctcagcctcctgagtagctggaactacaagtgtgtgccaccatgtctggctaattttttttttttttttgtattttttagtagagacagggttttactatgttgaccagattggtcttaaactcctggcctcaagtgatctgcctgcttcggcctcccaaagttctagggttacaggtgttagccactgtacctggcctctaaggtgattctgatgtgtgtattttggaaccactgtctcctagacagaaagcttctgtctcaaagatgatcacattggtgtaaagagcaaaacttgttaagtccaaaataaattcttactgtttatatcctaccttagtccaaaaaagatttgaggagactttgaggaaataactgaaacagatacaaagaagtgaggcacaagaacaaatcaagtcagtgtagaatgtcgacatcaggacaaggaactcaaacgttgtaacaccctaagaaatgtttggggaaccctaatttgacttt

SEQ ID NO: 333836 - DNA, 1810 bp, Homo sapiens
accggaaggggggctgtgaggacgtgttccgaggaagccagacccggagccgtggcctgccgggccggcgacatggatcccctgttccagcaaacgcacaagcaggtccacgagatccagtcttgcatgggacgcctggagacggcagacaagcagtctgtgcacatagtagaaaacgaaatccaagcaagcatagaccagatattcagccgtctagaacgtctggagattttgtccagcaaggagccccctaacaaaaggcaaaatgccagacttcgggttgaccagttaaagtatgatgtccagcacctgcagactgcgctcagaaacttccagcatcggcgccatgcaagggagcagcaggagagacagcgagaagagcttctgtctcgaaccttcaccactaacgactctgacaccaccataccaatggacgaatcactgcagtttaactcctccctccagaaagttcacaacggcatggatgacctcattttagatgggcacaatattttagatggactgaggacccagagactgaccttgaaggggactcagaagaagatccttgacattgccaacatgctgggcttgtccaacacagtgatgcggctcatcgagaagcgggctttccaggacaagtactttatgataggtgggatgctgctgacctgtgtggtcatgttcctcgtggtgcagtacctgacatgagccagccacgctcagtggctgaacagcattcccacagcctgcaagtgtgtgtgtgtgtgaaagagagaggggggcccagaggccgccttttgaaatgtttgcctgtctgaactgtgaagacacttgggagtgattgtggtctaatttccaacctgctctgttttctgtgacatcttggagggggagctagtgccaccaccatgcgcggtgcttaggaaatgaaagaagtcccgggtctgtctctctcactctcgctctcactgggggagggaaagaatggctttggtggctttgttcacacagctgatgcgtgccctgggaaggtgtccacagtgagccctgtgtgcaggactgtccacacggttcacaccttgtcaccatcaggcctttctggctcctgatagggtggagcaaaagtggaaaggaaaggaaagaggccttttctcacagccattatattaaatagtaggtcgattcacatcctcgtgctcctggccaccctcccctgtgcctcagtgacatgtagatgactgactgccaatacttgtcaccattccctggaagcagctacctaggggaaacaagatgtagtgctattgccgataacaagtaagattttccacactacagctgggtgtttctcttttctaaagtgaggccagtgttatttcccgggagtgttcagtcttgaccctagtcactgattttttctagttgttaatagagtggttggcttttaaggttcagagactgtggcttggcacctgcgcccaggctttgtgggcctttgccccttagaaagtagctgtaggcaaagatttgtgattttccaattacagtctcagctctagttttagtatctctaattctttggttcccttctcttccctgaaatatattagcacctgccagccaggccctcattttgcccagccagtgtgggcagatcccaccgtggagacatctgtagtgtgtatgtccttgtaacactctgttttcagggactacaacctttttccttctgtgaccagccccggattcaggctgtactaataccaggtatattgtggaatttagtataaaggccaatctgtcctga

SEQ ID NO: 333837 - DNA, 4084 bp, Homo sapiens
accggaaggggggctgtgaggacgtgttccgaggaagccagacccggagccgtggcctgccgggccggcgacatggatcccctgttccagcaaacgcacaagcaggtccacgagatccagtcttgcatgggacgcctggagacggcagacaagcagtctgtgcacatagtagaaaacgaaatccaagcaagcatagaccagatattcagccgtctagaacgtctggagattttgtccagcaaggagccccctaacaaaaggcaaaatgccagacttcgggttgaccagttaaagtatgatgtccagcacctgcagactgcgctcagaaacttccagcatcggcgccatgcaagggagcagcaggagagacagcgagaagagcttctgtctcgaaccttcaccactaacgactctgacaccaccataccaatggacgaatcactagatgggcacaatattttagatggactgaggacccagagactgaccttgaaggggactcagaagaagatccttgacattgccaacatgctgggcttgtccaacacagtgatgcggctcatcgagaagcgggctttccaggacaagtactttatgataggtgggatgctgctgacctgtgtggtcatgttcctcgtggtgcagtacctgacatgagccagccacgctcagtggctgaacagcattcccacagcctgcaagtgtgtgtgtgtgtgaaagagagaggggggcccagaggccgccttttgaaatgtttgcctgtctgaactgtgaagacacttgggagtgattgtggtctaatttccaacctgctctgttttctgtgacatcttggagggggagctagtgccaccaccatgcgcggtgcttaggaaatgaaagaagtcccgggtctgtctctctcactctcgctctcactgggggagggaaagaatggctttggtggctttgttcacacagctgatgcgtgccctgggaaggtgtccacagtgagccctgtgtgcaggactgtccacacggttcacaccttgtcaccatcaggcctttctggctcctgatagggtggagcaaaagtggaaaggaaaggaaagaggccttttctcacagccattatattaaatagtaggtcgattcacatcctcgtgctcctggccaccctcccctgtgcctcagtgacatgtagatgactgactgccaatacttgtcaccattccctggaagcagctacctaggggaaacaagatgtagtgctattgccgataacaagtaagattttccacactacagctgggtgtttctcttttctaaagtgaggccagtgttatttcccgggagtgttcagtcttgaccctagtcactgattttttctagttgttaatagagtggttggcttttaaggttcagagactgtggcttggcacctgcgcccaggctttgtgggcctttgccccttagaaagtagctgtaggcaaagatttgtgattttccaattacagtctcagctctagttttagtatctctaattctttggttcccttctcttccctgaaatatattagcacctgccagccaggccctcattttgcccagccagtgtgggcagatcccaccgtggagacatctgtagtgtgtatgtccttgtaacactctgttttcagggactacaacctttttccttctgtgaccagccccggattcaggctgtactaataccaggtatattgtggaatttagtataaaggccaatctgtcctgaagtccatctaatgtggtgaatcactgaaagtctcagaaagacctggttagtgtatgttctcatttaccacaggcctaccagccctgggcacagcagcttcatggcaagacataaaatgacactcaaaatccttcagatctggaaaccggctcagtattaaccctacctttggttgtcctgccctacctgctctgttagtttcttgttgcttgaactgtcttctgtcttatttcccttcctttctgtgttcctcttcacctctcttgttcccctccccgctgctctgtagtcatgttggtcctttcaggcacctctgtggcatagctcccctttggtaagttttcttaattgtcatagattaactgagtttcctggatgctaatttcacactttcggttggaggagatctccattgttcccacccctccgggccaaatgggccccaggtttccaaggaaggagcaatctgtgactcctaaaatgggttggggccctgccagagttaaagcagtgactggagggtggactggggggttgcagcatctttagacctagatctgtctaactctggggaggcacattgacatttccattacacacagcactgctgcggtgccagggacctagcgcaggacttttggtaatccataaaatggattctgagactgcgacggcaaggctgtcctgtcccccaggcacccaaggatcctgccagacagcacactttggaggaaggtctgcagggagcagctgagccatttgttcttgaactctgggaggcagaagtccccgcacccatcatgcgtggactgataggacatcttttcgtggtgtgcaccagtgctttccacacttgacagtggttggctttgatgaaccctcatgctgcaccttcagagccagtcctctagtttggaataaaaattgcagaggtggtttttgggtctttaccacctgcggctggtggacagcagccagtgtgtctggacacccaggggcattgagactgcatgttgtcacatgaccacttctcttcacacatctgctttcagtgcctggtgaaaaatagaccttggcctaacagtgtgactctctccaccgcctcagtgtagggaagggtccaggccagggaaggagcaccctctagtggaggcgggggtgaattcttaggtcgagctgatgcaagaaactccggtagccagcctctgtgaccttgtacatgagtttggtgtgcctattgtgatttaaaacaggtgggttatcaagaggaacttgagatctctttattacatggacatttacttcagggggaccactgtaagaaaagccaaactccaagaccaagtaagttagaggagtcttgattttttagacttcactgcggagttctgtacaccctttgccctgatgaatttgaatgggtttgatttgcaaatttggatttacacccattgttttggaagcacatcagctgaataaagttgaggtttattttatttagaaaatcacattttgtaaaagaattcgatattcatttttataactaatggccccctttttttatgtttctaggccagagattctcaaacactgctccatggccaggggctgggctggctgcttcagaagcagtggggaagctttttaaaattacatattcctggggcctaccccagatctgaattagaaccttttttaaatctctaaggtgattttattttattttttatttttgagacagtctcgctctgtcacccaggctggagtgcagtggcgcaatcttggctcactgcatcctctgcctcctgggttcaggtgatcctcatacctcagcctcctgagtagctggaactacaagtgtgtgccaccatgtctggctaattttttttttttttttgtattttttagtagagacagggttttactatgttgaccagattggtcttaaactcctggcctcaagtgatctgcctgcttcggcctcccaaagttctagggttacaggtgttagccactgtacctggcctctaaggtgattctgatgtgtgtattttggaaccactgtctcctagacagaaagcttctgtctcaaagatgatcacattggtgtaaagagcaaaacttgttaagtccaaaataaattcttactgtttatatcctaccttagtccaaaaaagatttgaggagactttgaggaaataactgaaacagatacaaagaagtgaggcacaagaacaaatcaagtcagtgtagaatgtcgacatcaggacaaggaactcaaacgttgtaacaccctaagaaatgtttggggaaccctaatttgacttt

SEQ ID NO: 333838 - DNA, 948 bp, Homo sapiens
accggaaggggggctgtgaggacgtgttccgaggaagccagacccggagccgtggcctgccgggccggcgacatggatcccctgttccagcaaacgcacaagcaggtccacgagatccagtcttgcatgggacgcctggagacggcagacaagcagtctgtgcacatagtagaaaacgaaatccaagcaagcatagaccagatattcagccgtctagaacgtctggagattttgtccagcaaggagccccctaacaaaaggcaaaatgccagacttcgggttgaccagttaaagtatgatgtccagcacctgcagactgcgctcagaaacttccagcatcggcgccatgcaagggagcagcaggagagacagcgagaagagcttctgtctcgaaccttcaccactaacgactctgacaccaccataccaatggacgaatcactgcagtttaactcctccctccagaaagttcacaacggcatggatgacctcattttagatgggcacaatattttagatggactgaggacccagagactgaccttgaaggggactcagaagaagatccttgacattgccaacatgctgggcttgtccaacacagtgatgcggctcatcgagaagcgggctttccaggacaagtactttatgataggtgggatgctgctgacctgtgtggtcatgttcctcgtggtgcagtacctgacatgagccagccacgctcagtggctgaacagcattcccacagcctgcaagtgtgtgtgtgtgtgaaagagagaggggggcccagaggccgccttttgaaatgtttgcctgtctgaactgtgaagacacttgggagtgattgtggtctaatttccaacctgctctgttttctgtgacatcttggagggggagctagtgccaccaccatgcgcggtgcttaggaaatgaaagaagtcccgggtc

SEQ ID NO: 333839 - DNA, 2346 bp, Homo sapiens
accggaaggggggctgtgaggacgtgttccgaggaagccagacccggagccgtggcctgccgggccggcgacatggatcccctgttccagcaaacgcacaagcaggtccacgagatccagtcttgcatgggacgcctggagacggcagacaagcagtctgtgcacatagtagaaaacgaaatccaagcaagcatagaccagatattcagccgtctagaacgtctggagattttgtccagcaaggagccccctaacaaaaggcaaaatgccagacttcgggttgaccagttaaagtatgatgtccagcacctgcagactgcgctcagaaacttccagcatcggcgccatgcaagggagcagcaggagagacagcgagaagagcttctgtctcgaaccttcaccactaacgactctgacaccaccataccaatggacgaatcactgcagtttaactcctccctccagaaagttcacaacggcatggatgacctcattttagatgggcacaatattttagatggactgaggacccagagactgaccttgaaggtggggtccctgctgggggacagagagaaggcctcttgttttagcctcatccaacagtttagtaactgtgtttatattttgattacgtgtcctcaaattgtgatattttgatgacaagacagagcccttgagtttgggatcctttctgttggagttgagttattgtgagcctgaaagtacccagttcctttgccagtgcttgaaacaaaccatgaagtggcctctcttaggatccaggtcttttcccatttactgaacttatcatgaaagtgagtgctactacgaggggtccaatcacaggctgagaaattgtgttacagaatctactcttggaagaatgaagacgtggctgtcctttggtacctcgctttaaggtggctttcccttaggacccctactgtggactgccttataactaaaaccttttgtattttagtaactgaatccccactgtgcagtgttagggctgcctggttgtttgcagtagattagagctttagaagcttctagagcttctaaagcccgtgctggtgatcccagcgactcttcactccctagccttaggtattcctagaagccctgaccagttggcactgctgagactccagcccctgggagtggtttacagaaacattacacagactctgatgtcagtcatgatgtttcagcctctgcccttttcctgtatcaaccctgatggataatagggcgtgggttctgtctgttatcagggtgtggtcccctgtgaatgaagcactcccagccactgagctgtgagaaacagtcactcggaagtgtgagctttatcttagtttttgttggatcatgttgagtctgtcagctccacaggacttcagtacgtttctgaacagtccctgccatctctacgggggagagggtcaggcaagctgcaagtgacactcacctcctgctgacagttgcagtgtctcagatggcctggaagggtggtctccagcagcctgctgggcgctcccctttcatgagagccacctgcagtgacctgaactgatacatgttgattagtctgccctttctttagaaaactgctactctccttttcatatctcagaaaaacagtagaggccttttaggaccaaactccatgtcacactgatgaagagccagtgggggttagagcgtcctgttaaggcacatgctagcttcccactcaagtctggcagcgctggggcatcagcacacctcttgccacccacactgataccagaggggaaggctgtgaggtggctgggggttgagacttgaggtttctaactttcctctgcacacctgtggctacctggtgtttgtctcttgattccctccacctgcctcacaccctgcctccgtcgggattttccacctacaccattcaaaaggaacataggagagggcatgaaggggctaggctgaagcactctgatgactggggccaatttgtggctgaaaatgaatacattttttgaaatttatggtcattttcaagtgatttagaaggttgatccttagcctcatacagtgatgaaataatctgtgtgttcagagccaagcaggactttagcaagagtctgattgtattgtcactatctcggggaaaaaaaaatacaaatacatttctctgatctctgatggcaatgaagtttgacttgtaatttctctggctgaggcttcttaattgctttctgggcagaatgtagattttggattcctgtccatgatgcctaatgttgatctcactttccttgtttctctcagttgctcattaatgtgtatttatta

SEQ ID NO: 333840 - DNA, 892 bp, Homo sapiens
accggaaggggggctgtgaggacgtgttccgaggaagccagacccggagccgtggcctgccgggccggcgacatggatcccctgttccagcaaacgcacaagcaggtccacgagatccagtcttgcatgggacgcctggagacggcagacaagcagtctgtgcacatagtagaaaacgaaatccaagcaagcatagaccagatattcagccgtctagaacgtctggagattttgtccagcaaggagccccctaacaaaaggcaaaatgccagacttcgggttgaccagttaaagtatgatgtccagcacctgcagactgcgctcagaaacttccagcatcggcgccatgcaagggagcagcaggagagacagcgagaagagcttctgtctcgaaccttcaccactaacgactctgacaccaccataccaatggacgaatcactgcagtttaactcctccctccagaaagttcacaacggcatggatgacctcattttagatgggcacaatattttagatggactgaggacccagagactgaccttgaaggggactcagaagaagatccttgacattgccaacatgctgggcttgtccaacacagtgatgcggctcatcgagaagcgggctttccaggacaagtactttatgatagccaaggatcctgccagacagcacactttggaggaaggtctgcagggagcagctgagccatttgttcttgaactctgggaggcagaagtccccgcacccatcatgcgtggactgataggacatcttttcgtggtgtgcaccagtgctttccacacttgacagtggttggctttgatgaaccctcatgctgcaccttcagagccagtcctctagtttggaataaaaattgcagaggtgg

SEQ ID NO: 333841 - DNA, 830 bp, Homo sapiens
accggaaggggggctgtgaggacgtgttccgaggaagccagacccggagccgtggcctgccgggccggcgacatggatcccctgttccagcaaacgcacaagcaggtccacgagatccagtcttgcatgggacgcctggagacggcagacaagcagtctgtgcacatagtagaaaacgaaatccaagcaagcatagaccagatattcagccgtctagaacgtctggagattttgtccagcaaggagccccctaacaaaaggcaaaatgccagacttcgggttgaccagttaaagtatgatgtccagcacctgcagactgcgctcagaaacttccagcatcggcgccatgcaagggagcagcaggagagacagcgagaagagcttctgtctcgaaccttcaccactaacgactctgacaccaccataccaatggacgaatcactgcagtttaactcctccctccagaaagttcacaacggcatggatgacctcattttagatgggcacaatattttagatggactgaggacccagagactgaccttgaaggggactcagaagaagatccttgacattgccaacatgctgggcttgtccaacacagtgatgcggctcatcgagaagcgggctttccaggacaagtactttatgatagctatgtgagaggccacctgagaataaagtgatccgagaagaaagcaaaacagagagagagacagagaaagagatggcaatatcagttaagtccctggattgagccatgcctgaagcctcagaacttcccaatttggagagccaatcaataaatccttttcctacttaaaaaggtt

SEQ ID NO: 333842 - DNA, 807 bp, Homo sapiens
accggaaggggggctgtgaggacgtgttccgaggaagccagacccggagccgtggcctgccgggccggcgacatggatcccctgttccagcaaacgcacaagcaggtccacgagatccagtcttgcatgggacgcctggagacggcagacaagcagtctgtgcacatagtagaaaacgaaatccaagcaagcatagaccagatattcagccgtctagaacgtctggagattttgtccagcaaggagccccctaacaaaaggcaaaatgccagacttcgggttgaccagttaaagtatgatgtccagcacctgcagactgcgctcagaaacttccagcatcggcgccatgcaagggagcagcaggagagacagcgagaagagcttctgtctcgaaccttcaccactaacgggactcagaagaagatccttgacattgccaacatgctgggcttgtccaacacagtgatgcggctcatcgagaagcgggctttccaggacaagtactttatgataggtgggatgctgctgacctgtgtggtcatgttcctcgtggtgcagtacctgacatgagccagccacgctcagtggctgaacagcattcccacagcctgcaagtgtgtgtgtgtgtgaaagagagaggggggcccagaggccgccttttgaaatgtttgcctgtctgaactgtgaagacacttgggagtgattgtggtctaatttccaacctgctctgttttctgtgacatcttggagggggagctagtgccaccaccatgcgcggtgcttaggaaatgaaagaagtcccgggtc

SEQ ID NO: 333843 - DNA, 1890 bp, Homo sapiens
accggaaggggggctgtgaggacgtgttccgaggaagccagacccggagccgtggcctgccgggccggcgacatggatcccctgttccagcaaacgcacaagtgagggccggtcggggagcgggcaggggctagacgaggcgaggccaggtgagcctggcttctggggctgaggcctcggacgtcagccagggtagaggccgagtttttccgccagggcactgctggggatgcctccgaagtgcttaatccttggcgggactcccaggtcagccacagacagtgggttcaggctggggcctggagacgtggggcagatgactcctggggtctgcaagttcgtgactacctgctgggtagactgggtgacgggaaactggcacctgcaggttataaaactttgtccagcacttgtcaactcggtgctcctggttggtagacctcgagaggagacacggagtaggagacacggcccctggccgtaggagtgtactgtttaattggagagtcaaggcaggtccacgagatccagtcttgcatgggacgcctggagacggcagacaagcagtctgtgcacatagtagaaaacgaaatccaagcaagcatagaccagatattcagccgtctagaacgtctggagattttgtccagcaaggagccccctaacaaaaggcaaaatgccagacttcgggttgaccagttaaagtatgatgtccagcacctgcagactgcgctcagaaacttccagcatcggcgccatgcaagggagcagcaggagagacagcgagaagagcttctgtctcgaaccttcaccactaacgtaagccaggcccgtggtgagggtcggcctgcacttgacagatcgtgggggctggagttcagatctctgagcgccatctgttttgggggtgtctgaagaagactgatgatgaggaaaccaactggaaatgacaggaactttgtgcattgccacagagactagacctagacagagaatccctttttctaagacaaaaacctgaagaggaagcagttaaattgaaggggaataggcagaggtgaaaattacctggttgggctggtctgagacagaaaggtggaagttcacatggtggaaacgtttttctgatcagatagagacagatgattagaacttaggccatttgtagagaaggcagcatttcaaagctgcctgcgggcagttgccattgtgccgagtatgtgtgtggctccagtgtcaggtgcattaagatgtttttgcccctagtctgagcagcaatttggaggaatttgttaacagatgtttagggttagatggactgcttgcctgagtctgtctgaaagtgtgttggtttgcatgtttgatttttcagaacccattgtccctgccctttagtcttaaccagatcatttcctgcacatggctgtagaacatactggccttttctgtgtcctgcataatatattccactaaatgaagtgtgctttggctttttgtattttgtttttttacagaggattattttctaaagagatgttagctttctaagccagttgttaaaattcacatcatttcctgctttgtagatgtttaaccctcaatgctgcatccttgctttgcaataaattttcccaagtgtttcaggctgtgccaacatagtttttgcttccccagactaagcagtcaagtcacagtgtttaacagttcaaaaatttaatgaactataagacacactaaaagatgtttggattttagatcgttataatgtagtattcaggccttttttaggccaaggatgatcgcttgggattattttgttttttgccagcctggcgtgatgctgtgcacaccgtcagttcttaataaacattgacttgccagatgaaactt

SEQ ID NO: 333844 - DNA, 1109 bp, Homo sapiens
gaaaaggaaacctctaattttctggggcccaggtacactcagagaggaaaaatggcccagggtgggagaacacacagggccctctcttcccccactctgcccgcctttcagccttgcaagaaaatctggcttttccctcggggtgtttgcctcgctgcttctcccccccagacatcacctccctcacagcccagctccatgttcacccccaccaggaagtcttcctttctaaaccgtttttctctgcatcctctcagagtggctatatttggttcctgcaatataacttcgtatatattgcatcagggagagggggagattcctgaagctgggttgttattttttgtgaagctatttttttggtgcattttctttctattccagaaaattcttatagtgggtggatgtcatttatctacccagcatctcgtctttggactacaaatccttatccccttctgctggtgccattgtctctccttcctgtggaaaacctgtgccacgggactcagcgagggctgcctcctccagcagggtcagcgcctgaagcaggcctggtccatgcaggactgggtcagcagcccaaagcagtcggtttggggtgaccacatgactgcgcggtgggccgatcagaatcttccctggaattcccatagacactgctggtttcctgaccaacatccattcctcccctattctcactagctacacgccacttttgttgatctagcaagaagtccagttgaagatatttgtgcctctagactttcttgcaggtaggggtcaggtcacccagttctggtcaataagatatgggcagaagttgctgggagagacttctgggaaagggtttcaaaaggaacatggctcctttagtccactcttaactgatggctgagatggagacatcttaacctgaaggcttttattccagctatgtgagaggccacctgagaataaagtgatccgagaagaaagcaaaacagagagagagacagagaaagagatggcaatatcagttaagtccctggattgagccatgcctgaagcctcagaacttcccaatttggagagccaatcaataaatccttttcctacttaaaaaggtt

SEQ ID NO: 333845 - DNA, 4138 bp, Homo sapiens
accggaaggggggctgtgaggacgtgttccgaggaagccagacccggagccgtggcctgccgggccggcgacatggatcccctgttccagcaaacgcacaagcaggtccacgagatccagtcttgcatgggacgcctggagacggcagacaagcagtctgtgcacatagtagaaaacgaaatccaagcaagcatagaccagatattcagccgtctagaacgtctggagattttgtccagcaaggagccccctaacaaaaggcaaaatgccagacttcgggttgaccagttaaagtatgatgtccagcacctgcagactgcgctcagaaacttccagcatcggcgccatgcaagggagcagcaggagagacagcgagaagagcttctgtctcgaaccttcaccactaacgactctgacaccaccataccaatggacgaatcactgcagtttaactcctccctccagaaagttcacaacggcatggatgacctcattttagatgggcacaatattttagatggactgaggacccagagactgaccttgaaggggactcagaagaagatccttgacattgccaacatgctgggcttgtccaacacagtgatgcggctcatcgagaagcgggctttccaggacaagtactttatgataggtgggatgctgctgacctgtgtggtcatgttcctcgtggtgcagtacctgacatgagccagccacgctcagtggctgaacagcattcccacagcctgcaagtgtgtgtgtgtgtgaaagagagaggggggcccagaggccgccttttgaaatgtttgcctgtctgaactgtgaagacacttgggagtgattgtggtctaatttccaacctgctctgttttctgtgacatcttggagggggagctagtgccaccaccatgcgcggtgcttaggaaatgaaagaagtcccgggtctgtctctctcactctcgctctcactgggggagggaaagaatggctttggtggctttgttcacacagctgatgcgtgccctgggaaggtgtccacagtgagccctgtgtgcaggactgtccacacggttcacaccttgtcaccatcaggcctttctggctcctgatagggtggagcaaaagtggaaaggaaaggaaagaggccttttctcacagccattatattaaatagtaggtcgattcacatcctcgtgctcctggccaccctcccctgtgcctcagtgacatgtagatgactgactgccaatacttgtcaccattccctggaagcagctacctaggggaaacaagatgtagtgctattgccgataacaagtaagattttccacactacagctgggtgtttctcttttctaaagtgaggccagtgttatttcccgggagtgttcagtcttgaccctagtcactgattttttctagttgttaatagagtggttggcttttaaggttcagagactgtggcttggcacctgcgcccaggctttgtgggcctttgccccttagaaagtagctgtaggcaaagatttgtgattttccaattacagtctcagctctagttttagtatctctaattctttggttcccttctcttccctgaaatatattagcacctgccagccaggccctcattttgcccagccagtgtgggcagatcccaccgtggagacatctgtagtgtgtatgtccttgtaacactctgttttcagggactacaacctttttccttctgtgaccagccccggattcaggctgtactaataccaggtatattgtggaatttagtataaaggccaatctgtcctgaagtccatctaatgtggtgaatcactgaaagtctcagaaagacctggttagtgtatgttctcatttaccacaggcctaccagccctgggcacagcagcttcatggcaagacataaaatgacactcaaaatccttcagatctggaaaccggctcagtattaaccctacctttggttgtcctgccctacctgctctgttagtttcttgttgcttgaactgtcttctgtcttatttcccttcctttctgtgttcctcttcacctctcttgttcccctccccgctgctctgtagtcatgttggtcctttcaggcacctctgtggcatagctcccctttggtaagttttcttaattgtcatagattaactgagtttcctggatgctaatttcacactttcggttggaggagatctccattgttcccacccctccgggccaaatgggccccaggtttccaaggaaggagcaatctgtgactcctaaaatgggttggggccctgccagagttaaagcagtgactggagggtggactggggggttgcagcatctttagacctagatctgtctaactctggggaggcacattgacatttccattacacacagcactgctgcggtgccagggacctagcgcaggacttttggtaatccataaaatggattctgagactgcgacggcaaggctgtcctgtcccccaggcacccaaggatcctgccagacagcacactttggaggaaggtctgcagggagcagctgagccatttgttcttgaactctgggaggcagaagtccccgcacccatcatgcgtggactgataggacatcttttcgtggtgtgcaccagtgctttccacacttgacagtggttggctttgatgaaccctcatgctgcaccttcagagccagtcctctagtttggaataaaaattgcagaggtggtttttgggtctttaccacctgcggctggtggacagcagccagtgtgtctggacacccaggggcattgagactgcatgttgtcacatgaccacttctcttcacacatctgctttcagtgcctggtgaaaaatagaccttggcctaacagtgtgactctctccaccgcctcagtgtagggaagggtccaggccagggaaggagcaccctctagtggaggcgggggtgaattcttaggtcgagctgatgcaagaaactccggtagccagcctctgtgaccttgtacatgagtttggtgtgcctattgtgatttaaaacaggtgggttatcaagaggaacttgagatctctttattacatggacatttacttcagggggaccactgtaagaaaagccaaactccaagaccaagtaagttagaggagtcttgattttttagacttcactgcggagttctgtacaccctttgccctgatgaatttgaatgggtttgatttgcaaatttggatttacacccattgttttggaagcacatcagctgaataaagttgaggtttattttatttagaaaatcacattttgtaaaagaattcgatattcatttttataactaatggccccctttttttatgtttctaggccagagattctcaaacactgctccatggccaggggctgggctggctgcttcagaagcagtggggaagctttttaaaattacatattcctggggcctaccccagatctgaattagaaccttttttaaatctctaaggtgattttattttattttttatttttgagacagtctcgctctgtcacccaggctggagtgcagtggcgcaatcttggctcactgcatcctctgcctcctgggttcaggtgatcctcatacctcagcctcctgagtagctggaactacaagtgtgtgccaccatgtctggctaattttttttttttttttgtattttttagtagagacagggttttactatgttgaccagattggtcttaaactcctggcctcaagtgatctgcctgcttcggcctcccaaagttctagggttacaggtgttagccactgtacctggcctctaaggtgattctgatgtgtgtattttggaaccactgtctcctagacagaaagcttctgtctcaaagatgatcacattggtgtaaagagcaaaacttgttaagtccaaaataaattcttactgtttatatcctaccttagtccaaaaaagatttgaggagactttgaggaaataactgaaacagatacaaagaagtgaggcacaagaacaaatcaagtcagtgtagaatgtcgacatcaggacaaggaactcaaacgttgtaacaccctaagaaatgtttggggaaccctaatttgacttt

SEQ ID NO: 333846 - DNA, 3312 bp, Homo sapiens
accggaaggggggctgtgaggacgtgttccgaggaagccagacccggagccgtggcctgccgggccggcgacatggatcccctgttccagcaaacgcacaagcaggtccacgagatccagtcttgcatgggacgcctggagacggcagacaagcagtctgtgcacatagtagaaaacgaaatccaagcaagcatagaccagatattcagccgtctagaacgtctggagattttgtccagcaaggagccccctaacaaaaggcaaaatgccagacttcgggttgaccagttaaagtatgatgtccagcacctgcagactgcgctcagaaacttccagcatcggcgccatgcaagggagcagcaggagagacagcgagaagagcttctgtctcgaaccttcaccactaacgactctgacaccaccataccaatggacgaatcactgcagtttaactcctccctccagaaagttcacaacggcatggatgacctcattttagatgggcacaatattttagatggactgaggacccagagactgaccttgaaggggactcagaagaagatccttgacattgccaacatgctgggcttgtccaacacagtgatgcggctcatcgagaagcgggctttccaggacaagtactttatgataggtgggatgctgctgacctgtgtggtcatgttcctcgtggtgcagtacctgacatgagccagccacgctcagtggctgaacagcattcccacagcctgcaagtgtgtgtgtgtgtgaaagagagaggggggcccagaggccgccttttgaaatgtttgcctgtctgaactgtgaagacacttgggagtgattgtggtctaatttccaacctgctctgttttctgtgacatcttggagggggagctagtgccaccaccatgcgcggtgcttaggaaatgaaagaagtcccgggtctgtctctctcactctcgctctcactgggggagggaaagaatggctttggtggctttgttcacacagctgatgcgtgccctgggaaggtgtccacagtgagccctgtgtgcaggactgtccacacggttcacaccttgtcaccatcaggcctttctggctcctgatagggtggagcaaaagtggaaaggaaaggaaagaggccttttctcacagccattatattaaatagtaggtcgattcacatcctcgtgctcctggccaccctcccctgtgcctcagtgacatgtagatgactgactgccaatacttgtcaccattccctggaagcagctacctaggggaaacaagatgtagtgctattgccgataacaagtaagattttccacactacagctgggtgtttctcttttctaaagtgaggccagtgttatttcccgggagtgttcagtcttgaccctagtcactgattttttctagttgttaatagagtggttggcttttaaggttcagagactgtggcttggcacctgcgcccaggctttgtgggcctttgccccttagaaagtagctgtaggcaaagatttgtgattttccaattacagtctcagctctagttttagtatctctaattctttggttcccttctcttccctgaaatatattagcacctgccagccaggccctcattttgcccagccagtgtgggcagatcccaccgtggagacatctgtagtgtgtatgtccttgtaacactctgttttcagggactacaacctttttccttctgtgaccagccccggattcaggctgtactaataccaggtatattgtggaatttagtataaaggccaatctgtcctgaagtccatctaatgtggtgaatcactgaaagtctcagaaagacctggttagtgtatgttctcatttaccacaggcctaccagccctgggcacagcagcttcatggcaagacataaaatgacactcaaaatccttcagatctggaaaccggctcagtattaaccctacctttggttgtcctgccctacctgctctgttagtttcttgttgcttgaactgtcttctgtcttatttcccttcctttctgtgttcctcttcacctctcttgttcccctccccgctgctctgtagtcatgttggtcctttcaggcacctctgtggcatagctcccctttggtaagttttcttaattgtcatagattaactgagtttcctggatgctaatttcacactttcggttggaggagatctccattgttcccacccctccgggccaaatgggccccaggtttccaaggaaggagcaatctgtgactcctaaaatgggttggggccctgccagagttaaagcagtgactggagggtggactggggggttgcagcatctttagacctagatctgtctaactctggggaggcacattgacatttccattacacacagcactgctgcggtgccagggacctagcgcaggacttttggtaatccataaaatggattctgagactgcgacggcaaggctgtcctgtcccccaggcacccaaggatcctgccagacagcacactttggaggaaggtctgcagggagcagctgagccatttgttcttgaactctgggaggcagaagtccccgcacccatcatgcgtggactgataggacatcttttcgtggtgtgcaccagtgctttccacacttgacagtggttggctttgatgaaccctcatgctgcaccttcagagccagtcctctagtttggaataaaaattgcagaggtggtttttgggtctttaccacctgcggctggtggacagcagccagtgtgtctggacacccaggggcattgagactgcatgttgtcacatgaccacttctcttcacacatctgctttcagtgcctggtgaaaaatagaccttggcctaacagtgtgactctctccaccgcctcagtgtagggaagggtccaggccagggaaggagcaccctctagtggaggcgggggtgaattcttaggtcgagctgatgcaagaaactccggtagccagcctctgtgaccttgtacatgagtttggtgtgcctattgtgatttaaaacaggtgggttatcaagaggaacttgagatctctttattacatggacatttacttcagggggaccactgtaagaaaagccaaactccaagaccaagtaagttagaggagtcttgattttttagacttcactgcggagttctgtacaccctttgccctgatgaatttgaatgggtttgatttgcaaatttggatttacacccattgttttggaagcacatcagctgaataaagttgaggtttattttatttaga

SEQ ID NO: 333847 - DNA, 3081 bp, Homo sapiens
accggaaggggggctgtgaggacgtgttccgaggaagccagacccggagccgtggcctgccgggccggcgacatggatcccctgttccagcaaacgcacaagcaggtccacgagatccagtcttgcatgggacgcctggagacggcagacaagcagtctgtgcacatagtagaaaacgaaatccaagcaagcatagaccagatattcagccgtctagaacgtctggagattttgtccagcaaggagccccctaacaaaaggcaaaatgccagacttcgggttgaccagttaaagtatgatgtccagcacctgcagactgcgctcagaaacttccagcatcggcgccatgcaagggagcagcaggagagacagcgagaagagcttctgtctcgaaccttcaccactaacgactctgacaccaccataccaatggacgaatcactgcagtttaactcctccctccagaaagttcacaacggcatggatgacctcattttagatgggcacaatattttagatggactgaggacccagagactgaccttgaaggggactcagaagaagatccttgacattgccaacatgctgggcttgtccaacacagtgatgcggctcatcgagaagcgggctttccaggacaagtactttatgataggtgggatgctgctgacctgtgtggtcatgttcctcgtggtgcagtacctgacatgagccagccacgctcagtggctgaacagcattcccacagcctgcaagtgtgtgtgtgtgtgaaagagagaggggggcccagaggccgccttttgaaatgtttgcctgtctgaactgtgaagacacttgggagtgattgtggtctaatttccaacctgctctgttttctgtgacatcttggagggggagctagtgccaccaccatgcgcggtgcttaggaaatgaaagaagtcccgggtctgtctctctcactctcgctctcactgggggagggaaagaatggctttggtggctttgttcacacagctgatgcgtgccctgggaaggtgtccacagtgagccctgtgtgcaggactgtccacacggttcacaccttgtcaccatcaggcctttctggctcctgatagggtggagcaaaagtggaaaggaaaggaaagaggccttttctcacagccattatattaaatagtaggtcgattcacatcctcgtgctcctggccaccctcccctgtgcctcagtgacatgtagatgactgactgccaatacttgtcaccattccctggaagcagctacctaggggaaacaagatgtagtgctattgccgataacaagtaagattttccacactacagctgggtgtttctcttttctaaagtgaggccagtgttatttcccgggagtgttcagtcttgaccctagtcactgattttttctagttgttaatagagtggttggcttttaaggttcagagactgtggcttggcacctgcgcccaggctttgtgggcctttgccccttagaaagtagctgtaggcaaagatttgtgattttccaattacagtctcagctctagttttagtatctctaattctttggttcccttctcttccctgaaatatattagcacctgccagccaggccctcattttgcccagccagtgtgggcagatcccaccgtggagacatctgtagtgtgtatgtccttgtaacactctgttttcagggactacaacctttttccttctgtgaccagccccggattcaggctgtactaataccaggtatattgtggaatttagtataaaggccaatctgtcctgaagtccatctaatgtggtgaatcactgaaagtctcagaaagacctggttagtgtatgttctcatttaccacaggcctaccagccctgggcacagcagcttcatggcaagacataaaatgacactcaaaatccttcagatctggaaaccggctcagtattaaccctacctttggttgtcctgccctacctgctctgttagtttcttgttgcttgaactgtcttctgtcttatttcccttcctttctgtgttcctcttcacctctcttgttcccctccccgctgctctgtagtcatgttggtcctttcaggcacctctgtggcatagctcccctttggtaagttttcttaattgtcatagattaactgagtttcctggatgctaatttcacactttcggttggaggagatctccattgttcccacccctccgggccaaatgggccccaggtttccaaggaaggagcaatctgtgactcctaaaatgggttggggccctgccagagttaaagcagtgactggagggtggactggggggttgcagcatctttagacctagatctgtctaactctggggaggcacattgacatttccattacacacagcactgctgcggtgccagggacctagcgcaggacttttggtaatccataaaatggattctgagactgcgacggcaaggctgtcctgtcccccaggcacccaaggatcctgccagacagcacactttggaggaaggtctgcagggagcagctgagccatttgttcttgaactctgggaggcagaagtccccgcacccatcatgcgtggactgataggacatcttttcgtggtgtgcaccggtgcacagagagcacgcagagagcagagagacagagagagagagagacatcacaccgacgagaccagaactgacagcacacgcaccccagcacagcacaccccacgccaaccaccacaccccccccccacccccccaccacaccaccacccacaccccccccctctcccatctcacatctatcacctatatctacccaacccccgcactcacaccccattctccatccaccacgtactacaccacccgcttcccttaactttcaccacccacccacccccccctcccgcatcaatcgcacaccacaccacacaacaaaacggcaccccctccctcggcgatcaccatcatccaaccaaccccccaacctcgccactcgccctgccccaataccacctatcgtcatcaacacacacaaaacattcaccccct

SEQ ID NO: 333848 - DNA, 4186 bp, Homo sapiens
accggaaggggggctgtgaggacgtgttccgaggaagccagacccggagccgtggcctgccgggccggcgacatggatcccctgttccagcaaacgcacaagtgagggccggtcggggagcgggcaggggctagacgaggcgaggccaggcaggtccacgagatccagtcttgcatgggacgcctggagacggcagacaagcagtctgtgcacatagtagaaaacgaaatccaagcaagcatagaccagatattcagccgtctagaacgtctggagattttgtccagcaaggagccccctaacaaaaggcaaaatgccagacttcgggttgaccagttaaagtatgatgtccagcacctgcagactgcgctcagaaacttccagcatcggcgccatgcaagggagcagcaggagagacagcgagaagagcttctgtctcgaaccttcaccactaacgactctgacaccaccataccaatggacgaatcactgcagtttaactcctccctccagaaagttcacaacggcatggatgacctcattttagatgggcacaatattttagatggactgaggacccagagactgaccttgaaggggactcagaagaagatccttgacattgccaacatgctgggcttgtccaacacagtgatgcggctcatcgagaagcgggctttccaggacaagtactttatgataggtgggatgctgctgacctgtgtggtcatgttcctcgtggtgcagtacctgacatgagccagccacgctcagtggctgaacagcattcccacagcctgcaagtgtgtgtgtgtgtgaaagagagaggggggcccagaggccgccttttgaaatgtttgcctgtctgaactgtgaagacacttgggagtgattgtggtctaatttccaacctgctctgttttctgtgacatcttggagggggagctagtgccaccaccatgcgcggtgcttaggaaatgaaagaagtcccgggtctgtctctctcactctcgctctcactgggggagggaaagaatggctttggtggctttgttcacacagctgatgcgtgccctgggaaggtgtccacagtgagccctgtgtgcaggactgtccacacggttcacaccttgtcaccatcaggcctttctggctcctgatagggtggagcaaaagtggaaaggaaaggaaagaggccttttctcacagccattatattaaatagtaggtcgattcacatcctcgtgctcctggccaccctcccctgtgcctcagtgacatgtagatgactgactgccaatacttgtcaccattccctggaagcagctacctaggggaaacaagatgtagtgctattgccgataacaagtaagattttccacactacagctgggtgtttctcttttctaaagtgaggccagtgttatttcccgggagtgttcagtcttgaccctagtcactgattttttctagttgttaatagagtggttggcttttaaggttcagagactgtggcttggcacctgcgcccaggctttgtgggcctttgccccttagaaagtagctgtaggcaaagatttgtgattttccaattacagtctcagctctagttttagtatctctaattctttggttcccttctcttccctgaaatatattagcacctgccagccaggccctcattttgcccagccagtgtgggcagatcccaccgtggagacatctgtagtgtgtatgtccttgtaacactctgttttcagggactacaacctttttccttctgtgaccagccccggattcaggctgtactaataccaggtatattgtggaatttagtataaaggccaatctgtcctgaagtccatctaatgtggtgaatcactgaaagtctcagaaagacctggttagtgtatgttctcatttaccacaggcctaccagccctgggcacagcagcttcatggcaagacataaaatgacactcaaaatccttcagatctggaaaccggctcagtattaaccctacctttggttgtcctgccctacctgctctgttagtttcttgttgcttgaactgtcttctgtcttatttcccttcctttctgtgttcctcttcacctctcttgttcccctccccgctgctctgtagtcatgttggtcctttcaggcacctctgtggcatagctcccctttggtaagttttcttaattgtcatagattaactgagtttcctggatgctaatttcacactttcggttggaggagatctccattgttcccacccctccgggccaaatgggccccaggtttccaaggaaggagcaatctgtgactcctaaaatgggttggggccctgccagagttaaagcagtgactggagggtggactggggggttgcagcatctttagacctagatctgtctaactctggggaggcacattgacatttccattacacacagcactgctgcggtgccagggacctagcgcaggacttttggtaatccataaaatggattctgagactgcgacggcaaggctgtcctgtcccccaggcacccaaggatcctgccagacagcacactttggaggaaggtctgcagggagcagctgagccatttgttcttgaactctgggaggcagaagtccccgcacccatcatgcgtggactgataggacatcttttcgtggtgtgcaccagtgctttccacacttgacagtggttggctttgatgaaccctcatgctgcaccttcagagccagtcctctagtttggaataaaaattgcagaggtggtttttgggtctttaccacctgcggctggtggacagcagccagtgtgtctggacacccaggggcattgagactgcatgttgtcacatgaccacttctcttcacacatctgctttcagtgcctggtgaaaaatagaccttggcctaacagtgtgactctctccaccgcctcagtgtagggaagggtccaggccagggaaggagcaccctctagtggaggcgggggtgaattcttaggtcgagctgatgcaagaaactccggtagccagcctctgtgaccttgtacatgagtttggtgtgcctattgtgatttaaaacaggtgggttatcaagaggaacttgagatctctttattacatggacatttacttcagggggaccactgtaagaaaagccaaactccaagaccaagtaagttagaggagtcttgattttttagacttcactgcggagttctgtacaccctttgccctgatgaatttgaatgggtttgatttgcaaatttggatttacacccattgttttggaagcacatcagctgaataaagttgaggtttattttatttagaaaatcacattttgtaaaagaattcgatattcatttttataactaatggccccctttttttatgtttctaggccagagattctcaaacactgctccatggccaggggctgggctggctgcttcagaagcagtggggaagctttttaaaattacatattcctggggcctaccccagatctgaattagaaccttttttaaatctctaaggtgattttattttattttttatttttgagacagtctcgctctgtcacccaggctggagtgcagtggcgcaatcttggctcactgcatcctctgcctcctgggttcaggtgatcctcatacctcagcctcctgagtagctggaactacaagtgtgtgccaccatgtctggctaattttttttttttttttgtattttttagtagagacagggttttactatgttgaccagattggtcttaaactcctggcctcaagtgatctgcctgcttcggcctcccaaagttctagggttacaggtgttagccactgtacctggcctctaaggtgattctgatgtgtgtattttggaaccactgtctcctagacagaaagcttctgtctcaaagatgatcacattggtgtaaagagcaaaacttgttaagtccaaaataaattcttactgtttatatcctaccttagtccaaaaaagatttgaggagactttgaggaaataactgaaacagatacaaagaagtgaggcacaagaacaaatcaagtcagtgtagaatgtcgacatcaggacaaggaactcaaacgttgtaacaccctaagaaatgtttggggaaccctaatttgacttt

SEQ ID NO: 333849 - DNA, 3997 bp, Homo sapiens
accggaaggggggctgtgaggacgtgttccgaggaagccagacccggagccgtggcctgccgggccggcgacatggatcccctgttccagcaaacgcacaagcaggtccacgagatccagtcttgcatgggacgcctggagacggcagacaagcagtctgtgcacatagtagaaaacgaaatccaagcaagcatagaccagatattcagccgtctagaacgtctggagattttgtccagcaaggagccccctaacaaaaggcaaaatgccagacttcgggttgaccagttaaagtatgatgtccagcacctgcagactgcgctcagaaacttccagcatcggcgccatgcaagggagcagcaggagagacagcgagaagagcttctgtctcgaaccttcaccactaacgggactcagaagaagatccttgacattgccaacatgctgggcttgtccaacacagtgatgcggctcatcgagaagcgggctttccaggacaagtactttatgataggtgggatgctgctgacctgtgtggtcatgttcctcgtggtgcagtacctgacatgagccagccacgctcagtggctgaacagcattcccacagcctgcaagtgtgtgtgtgtgtgaaagagagaggggggcccagaggccgccttttgaaatgtttgcctgtctgaactgtgaagacacttgggagtgattgtggtctaatttccaacctgctctgttttctgtgacatcttggagggggagctagtgccaccaccatgcgcggtgcttaggaaatgaaagaagtcccgggtctgtctctctcactctcgctctcactgggggagggaaagaatggctttggtggctttgttcacacagctgatgcgtgccctgggaaggtgtccacagtgagccctgtgtgcaggactgtccacacggttcacaccttgtcaccatcaggcctttctggctcctgatagggtggagcaaaagtggaaaggaaaggaaagaggccttttctcacagccattatattaaatagtaggtcgattcacatcctcgtgctcctggccaccctcccctgtgcctcagtgacatgtagatgactgactgccaatacttgtcaccattccctggaagcagctacctaggggaaacaagatgtagtgctattgccgataacaagtaagattttccacactacagctgggtgtttctcttttctaaagtgaggccagtgttatttcccgggagtgttcagtcttgaccctagtcactgattttttctagttgttaatagagtggttggcttttaaggttcagagactgtggcttggcacctgcgcccaggctttgtgggcctttgccccttagaaagtagctgtaggcaaagatttgtgattttccaattacagtctcagctctagttttagtatctctaattctttggttcccttctcttccctgaaatatattagcacctgccagccaggccctcattttgcccagccagtgtgggcagatcccaccgtggagacatctgtagtgtgtatgtccttgtaacactctgttttcagggactacaacctttttccttctgtgaccagccccggattcaggctgtactaataccaggtatattgtggaatttagtataaaggccaatctgtcctgaagtccatctaatgtggtgaatcactgaaagtctcagaaagacctggttagtgtatgttctcatttaccacaggcctaccagccctgggcacagcagcttcatggcaagacataaaatgacactcaaaatccttcagatctggaaaccggctcagtattaaccctacctttggttgtcctgccctacctgctctgttagtttcttgttgcttgaactgtcttctgtcttatttcccttcctttctgtgttcctcttcacctctcttgttcccctccccgctgctctgtagtcatgttggtcctttcaggcacctctgtggcatagctcccctttggtaagttttcttaattgtcatagattaactgagtttcctggatgctaatttcacactttcggttggaggagatctccattgttcccacccctccgggccaaatgggccccaggtttccaaggaaggagcaatctgtgactcctaaaatgggttggggccctgccagagttaaagcagtgactggagggtggactggggggttgcagcatctttagacctagatctgtctaactctggggaggcacattgacatttccattacacacagcactgctgcggtgccagggacctagcgcaggacttttggtaatccataaaatggattctgagactgcgacggcaaggctgtcctgtcccccaggcacccaaggatcctgccagacagcacactttggaggaaggtctgcagggagcagctgagccatttgttcttgaactctgggaggcagaagtccccgcacccatcatgcgtggactgataggacatcttttcgtggtgtgcaccagtgctttccacacttgacagtggttggctttgatgaaccctcatgctgcaccttcagagccagtcctctagtttggaataaaaattgcagaggtggtttttgggtctttaccacctgcggctggtggacagcagccagtgtgtctggacacccaggggcattgagactgcatgttgtcacatgaccacttctcttcacacatctgctttcagtgcctggtgaaaaatagaccttggcctaacagtgtgactctctccaccgcctcagtgtagggaagggtccaggccagggaaggagcaccctctagtggaggcgggggtgaattcttaggtcgagctgatgcaagaaactccggtagccagcctctgtgaccttgtacatgagtttggtgtgcctattgtgatttaaaacaggtgggttatcaagaggaacttgagatctctttattacatggacatttacttcagggggaccactgtaagaaaagccaaactccaagaccaagtaagttagaggagtcttgattttttagacttcactgcggagttctgtacaccctttgccctgatgaatttgaatgggtttgatttgcaaatttggatttacacccattgttttggaagcacatcagctgaataaagttgaggtttattttatttagaaaatcacattttgtaaaagaattcgatattcatttttataactaatggccccctttttttatgtttctaggccagagattctcaaacactgctccatggccaggggctgggctggctgcttcagaagcagtggggaagctttttaaaattacatattcctggggcctaccccagatctgaattagaaccttttttaaatctctaaggtgattttattttattttttatttttgagacagtctcgctctgtcacccaggctggagtgcagtggcgcaatcttggctcactgcatcctctgcctcctgggttcaggtgatcctcatacctcagcctcctgagtagctggaactacaagtgtgtgccaccatgtctggctaattttttttttttttttgtattttttagtagagacagggttttactatgttgaccagattggtcttaaactcctggcctcaagtgatctgcctgcttcggcctcccaaagttctagggttacaggtgttagccactgtacctggcctctaaggtgattctgatgtgtgtattttggaaccactgtctcctagacagaaagcttctgtctcaaagatgatcacattggtgtaaagagcaaaacttgttaagtccaaaataaattcttactgtttatatcctaccttagtccaaaaaagatttgaggagactttgaggaaataactgaaacagatacaaagaagtgaggcacaagaacaaatcaagtcagtgtagaatgtcgacatcaggacaaggaactcaaacgttgtaacaccctaagaaatgtttggggaaccctaatttgacttt

SEQ ID NO: 333850 - DNA, 1198 bp, Homo sapiens
accggaaggggggctgtgaggacgtgttccgaggaagccagacccggagccgtggcctgccgggccggcgacatggatcccctgttccagcaaacgcacaagcaggtccacgagatccagtcttgcatgggacgcctggagacggcagacaagcagtctgtgcacatagtagaaaacgaaatccaagcaagcatagaccagatattcagccgtctagaacgtctggagattttgtccagcaaggagccccctaacaaaaggcaaaatgccagacttcgggttgaccagttaaagtatgatgtccagcacctgcagactgcgctcagaaacttccagcatcggcgccatgcaagggagcagcaggagagacagcgagaagagcttctgtctcgaaccttcaccactaacgactctgacaccaccataccaatggacgaatcactgcagtttaactcctccctccagaaagttcacaacggcatggatgacctcattttagatgggcacaatattttagatggactgaggacccagagactgaccttgaaggggactcagaagaagatccttgacattgccaacatgctgggcttgtccaacacagtgatgcggctcatcgagaagcgggctttccaggacaagtactttatgataggtgggatgctgctgacctgtgtggtcatgttcctcgtggtgcagtacctgacatgagccagccacgctcagtggctgaacagcattcccacagcctgcaagtgtgtgtgtgtgtgaaagagagaggggggcccagaggccgccttttgaaatgtttgcctgtctgaactgtgaagacacttgggagtgattgtggtctaatttccaaaaaaaaaaaaaaaaaaaaaaaaccgggggacttctttgtggggtgggaacacaaaagcggataagaacacgcgcacagagggcccacagggtggcgcacgacaaacacagacgagagagaggcagaccacagcgggaggagaaaaaaccccgaccagaggagaaacccagaaaaatagagggagcacgcagcagagaaaaaattaccgaaacacccgccgcggagcaaaagcagccgcgaataagaagcagacagcggcaaaacaaagcacgcgagacacacaacacaaccaagaaacagcaaccacgcgacaccgagacacagctcgccccaacc

SEQ ID NO: 333851 - DNA, 2201 bp, Homo sapiens
accggaaggggggctgtgaggacgtgttccgaggaagccagacccggagccgtggcctgccgggccggcgacatggatcccctgttccagcaaacgcacaagcaggtccacgagatccagtcttgcatgggacgcctggagacggcagacaagcagtctgtgcacatagtagaaaacgaaatccaagcaagcatagaccagatattcagccgtctagaacgtctggagattttgtccagcaaggagccccctaacaaaaggcaaaatgccagacttcgggttgaccagttaaagtatgatgtccagcacctgcagactgcgctcagaaacttccagcatcggcgccatgcaagggagcagcaggagagacagcgagaagagcttctgtctcgaaccttcaccactaacgactctgacaccaccataccaatggacgaatcactgcagtttaactcctccctccagaaagttcacaacggcatggatgacctcattttagatgggcacaatattttagatggactgaggacccagagactgaccttgaaggtggggtccctgctgggggacagagagaaggcctcttgttttagcctcatccaacagtttagtaactgtgtttatattttgattacgtgtcctcaaattgtgatattttgatgacaagacagagcccttgagtttgggatcctttctgttggagttgagttattgtgagcctgaaagtacccagttcctttgccagtgcttgaaacaaaccatgaagtggcctctcttaggatccaggtcttttcccatttactgaacttatcatgaaagtgagtgctactacgaggggtccaatcacaggctgagaaattgtgttacagaatctactcttggaagaatgaagacgtggctgtcctttggtacctcgctttaaggtggctttcccttaggacccctactgtggactgccttataactaaaaccttttgtattttagtaactgaatccccactgtgcagtgttagggctgcctggttgtttgcagtagattagagctttagaagcttctagagcttctaaagcccgtgctggtgatcccagcgactcttcactccctagccttaggtattcctagaagccctgaccagttggcactgctgagactccagcccctgggagtggtttacagaaacattacacagactctgatgtcagtcatgatgtttcagcctctgcccttttcctgtatcaaccctgatggataatagggcgtgggttctgtctgttatcagggtgtggtcccctgtgaatgaagcactcccagccactgagctgtgagaaacagtcactcggaagtgtgagctttatcttagtttttgttggatcatgttgagtctgtcagctccacaggacttcagtacgtttctgaacagtccctgccatctctacgggggagagggtcaggcaagctgcaagtgacactcacctcctgctgacagttgcagtgtctcagatggcctggaagggtggtctccagcagcctgctgggcgctcccctttcatgagagccacctgcagtgacctgaactgatacatgttgattagtctgccctttctttagaaaactgctactctccttttcatatctcagaaaaacagtagaggccttttaggaccaaactccatgtcacactgatgaagagccagtgggggttagagcgtcctgttaaggcacatgctagcttcccactcaagtctggcagcgctggggcatcagcacacctcttgccacccacactgataccagaggggaaggctgtgaggtggctgggggttgagacttgaggtttctaactttcctctgcacacctgtggctacctggtgtttgtctcttgattccctccacctgcctcacaccctgcctccgtcgggattttccacctacaccattcaaaaggaacataggagagggcatgaaggggctaggctgaagcactctgatgactggggccaatttgtggctgaaaatgaatacattttttgaaatttatggtcattttcaagtgatttagaaggttgatccttagcctcatacagtgatgaaataatctgtgtgttcagagccaagcaggactttagcaagagtctgattgtattgtcactatctcggggaaaaaaaaatacaaatacatttctctgatctctgatggca

SEQ ID NO: 333852 - DNA, 1409 bp, Homo sapiens
accggaaggggggctgtgaggacgtgttccgaggaagccagacccggagccgtggcctgccgggccggcgacatggatcccctgttccagcaaacgcacaagcaggtccacgagatccagtcttgcatgggacgcctggagacggcagacaagcagtctgtgcacatagtagaaaacgaaatccaagcaagcatagaccagatattcagccgtctagaacgtctggagattttgtccagcaaggagccccctaacaaaaggcaaaatgccagacttcgggttgaccagttaaagtatgatgtccagcacctgcagactgcgctcagaaacttccagcatcggcgccatgcaagggagcagcaggagagacagcgagaagagcttctgtctcgaaccttcaccactaacgactctgacaccaccataccaatggacgaatcactgcagtttaactcctccctccagaaagttcacaacggcatggatgacctcattttagatgggcacaatattttagatggactgaggacccagagactgaccttgaaggtggggtccctgctgggggacagagagaaggcctcttgttttagcctcatccaacagtttagtaactgtgtttatattttgattacgtgtcctcaaattgtgatattttgatgacaagacagagcccttgagtttgggatcctttctgttggagttgagttattgtgagcctgaaagtacccagttcctttgccagtgcttgaaacaaaccatgaagtggcctctcttaggatccaggtcttttcccatttactgaacttatcatgaaagtgagtgctactacgaggggtccaatcacaggctgagaaattgtgttacagaatctactcttggaagaatgaagacgtggctgtcctttggtacctcgctttaaggtggctttcccttaggacccctactgtggactgccttataactaaaaccttttgtattttagtaactgaatccccactgtgcagtgttagggctgcctggttgtttgcagtagattagagctttagaagcttctagagcttctaaagcccgtgctggtgatcccagcgactcttcactccctagccttaggtattcctagaagccctgaccagttggcactgctgagactccagcccctgggagtggtttacagaaacattacacagacttctgatgactggggccaatttgtggctgaaaatgaatacattttttgaaatttatggtcattttcaagtgatttagaaggttgatccttagcctcatacagtgatgaaataatctgtgtgttcagagccaagcaggactttagcaagagtctgattgtattgtcactatctcggggaaaaaaaaatacaaatacatttctctgatctctgatggca

SEQ ID NO: 333853 - DNA, 1479 bp, Homo sapiens
accggaaggggggctgtgaggacgtgttccgaggaagccagacccggagccgtggcctgccgggccggcgacatggatcccctgttccagcaaacgcacaagcaggtccacgagatccagtcttgcatgggacgcctggagacggcagacaagcagtctgtgcacatagtagaaaacgaaatccaagcaagcatagaccagatattcagccgtctagaacgtctggagattttgtccagcaaggagccccctaacaaaaggcaaaatgccagacttcgggttgaccagttaaagtatgatgtccagcacctgcagactgcgctcagaaacttccagcatcggcgccatgcaagggagcagcaggagagacagcgagaagagcttctgtctcgaaccttcaccactaacgtaagccaggcccgtggtgagggtcggcctgcacttgacagatcgtgggggctggagttcagatctctgagcgccatctgttttgggggtgtctgaagaagactgatgatgaggaaaccaactggaaatgacaggaactttgtgcattgccacagagactagacctagacagagaatccctttttctaagacaaaaacctgaagaggaagcagttaaattgaaggggaataggcagaggtgaaaattacctggttgggctggtctgagacagaaaggtggaagttcacatggtggaaacgtttttctgatcagatagagacagatgattagaacttaggccatttgtagagaaggcagcatttcaaagctgcctgcgggcagttgccattgtgccgagtatgtgtgtggctccagtgtcaggtgcattaagatgtttttgcccctagtctgagcagcaatttggaggaatttgttaacagatgtttagggttagatggactgcttgcctgagtctgtctgaaagtgtgttggtttgcatgtttgatttttcagaacccattgtccctgccctttagtcttaaccagatcatttcctgcacatggctgtagaacatactggccttttctgtgtcctgcataatatattccactaaatgaagtgtgctttggctttttgtattttgtttttttacagaggattattttctaaagagatgttagctttctaagccagttgttaaaattcacatcatttcctgctttgtagatgtttaaccctcaatgctgcatccttgctttgcaataaattttcccaagtgtttcaggctgtgccaacatagtttttgcttccccagactaagcagtcaagtcacagtgtttaacagttcaaaaatttaatgaactataagacacactaaaagatgtttggattttagatcgttataatgtagtattcaggccttttttaggccaaggatgatcgcttgggattattttgttttttgccagcctggcgtgatgctgtgcacaccgtcagttcttaataaacattgacttgccagatgaaactt

SEQ ID NO: 333854 - DNA, 699 bp, Homo sapiens
accggaaggggggctgtgaggacgtgttccgaggaagccagacccggagccgtggcctgccgggccggcgacatggatcccctgttccagcaaacgcacaagttataaaactttgtccagcacttgtcaactcggtgctcctggttggtagacctcgagaggagacacggagtaggagacacggcccctggccgtaggagtgtactgtttaattggagagtcaaggcaggtccacgagatccagtcttgcatgggacgcctggagacggcagacaagcagtctgtgcacatagtagaaaacgaaatccaagcaagcatagaccagatattcagccgtctagaacgtctggagattttgtccagcaaggagccccctaacaaaaggcaaaatgccagacttcgggttgaccagttaaagtatgatgtccagcacctgcagactgcgctcagaaacttccagcatcggcgccatgcaagggagcagcaggagagacagcgagaagagcttctgtctcgaaccttcaccactaacgggactcagaagaagatccttgacattgccaacatgctgggcttgtccaacacagtgatgcggctcatcgagaagcgggctttccaggacaagtactttatgatagacaaagaacatatgttcttgacaagggagtgtgccttgttccccacccacagtcaccactg

SEQ ID NO: 333855 - DNA, 411 bp, Homo sapiens
tgcaggtgtcgaagtgccaaaataaccttcacactcctcatagccacgatgaccaaatccaaattcagagtgatcatgctgttacaatataacctcaattcatatccatcatgctgttacaatagaaccttggttcatatccatcatgctgttacaatagaacctaaacattcacaaagcagatatttgaggttacattggtgacggtgacgtcacgactcagctttcattctctatattttccagtgtagactgaagatacatgtcttagggtctcaccaagattcaggagtgaaggatccagtggtgaggacccaggtattcaaggcgcttcacctggaggcctggcctttcccaaggtgtatcagtagcctcaggccctgacataacactaacactagtgatgccttg

SEQ ID NO: 333856 - DNA, 289 bp, Homo sapiens
catcatctatcaccacaggccctgtacccccaccctctctacaaccctgctgggaggctgtcctcatttactctccatcctgtcttccccttcctccaacctgtcaataagccctgtccaaattctccttcaaatagattctctcctccacatgttcctctactgacttgaacttaggtccttatcaactctattggtttcctattccctgctattgaaacttctaaactataagcttccaactattacctgcctgaatgtaaatattaaatggagatgttgaaggtgc

SEQ ID NO: 333857 - DNA, 101 bp, Homo sapiens
aaaatcctcaggtaaaatacacattgtcttcagctcacttttgcttttagagctatgaatcctcttttaagataaacagacaatacccacccatccccagt

SEQ ID NO: 333858 - DNA, 299 bp, Homo sapiens
atggattttatctacgtagtaaatttgaattattttaattcaaatgtgggaaactcaattcaaacttgaagaaaagctggatttattgggttacataactgaaaaatactggagtctaatagtctgtggctcatccgaatctgggaacttacataatatttggagttggtttcctcttttgtattggcttcattttccaacacgttcttttcagagtggtgagatgcttccttactattcattccaagcttacatcttattattaaaaacatgggtcagtaacctttttctgtaatggg

SEQ ID NO: 333859 - DNA, 229 bp, Homo sapiens
tgctgtcaggcagaatgtccccccaggtcagtgaggtcaggctggttgagtgttcaggctttctattctgatttttgttgttgttgtttacttgttccaccaatcaatgagaaagatgtccatgtctctcactatatttgtggatttgtccatttcttccttcagtcctggcaggtttcgcttctgaattttctcttttttttttttttttttttgagacagagtctcg

SEQ ID NO: 333860 - DNA, 217 bp, Homo sapiens
agtgtttgacaatgcagatacttgcctgtttttctaaataaagggaacatcaaaaactagcagaggatagaggaaacttgggatccctctgccctgtgaaggaggagggaggatggtgtatccatgtgaaagaaagtgccagaatgtcaggggtcccagccattgtctgtacaatataggcccctttctccccccaggagattagcagtgcagagtt

SEQ ID NO: 333861 - DNA, 270 bp, Homo sapiens
tagagacgggttttctccatgttggtcaggctggtctcgaactcccgacctcaggtgatccgcccacctcggcctcccagagtgctggaattacaggcttgagccactgtgcctggccgagttttggaaatttagttcaatagtgtgaactcaaagttattagaaacccgtacttgtcagacttcattctttccatgaagctccttgaagacataattctctgggattataattgcctgcaagaagctttcagaaagacattagactaaa

SEQ ID NO: 333862 - DNA, 371 bp, Homo sapiens
gcgctggtaaaactatgtttcatcacctgttacaattctttgaagaaatgcttcaggatcttgatcccacccgtttaaaatttccattagaaactctgctcttgtctgcagctgatctgagggcaatggttttggcacccatctagtaaaacgtttgctcagtgttaatttttcatccaggattgtgtaagctgaaccagcagagatgtctatgatattggctagttggtcctcttcaatgagggcatgaacaagatgaatattttcctcaaacaattatctggatggtctgctgctgcaggcttcatcttcaatattgtctcgtcccttctttttcttttcccccccgcttgagacacagtcttgttctg

SEQ ID NO: 333863 - DNA, 90 bp, Homo sapiens
catggctttatccctataaatatttattgataagaacaggtggctggctggatttaagtctgttggccatagtttgtcaattcagtcaca

SEQ ID NO: 333864 - DNA, 510 bp, Homo sapiens
ttctacatcagcactgtccaatagaaatataatgcaagccacatgtagttttacattttctagtaacctcatttaaaatgcaaaaagaaattattaaaccaattttaatattttatttagcccagtatataaaaatattatcatttcaacatggaattaatattaaacagttattaatgaattatgtcacattctgtttttcatactaagtcttcaaaattcagtgtgtattcaacacttagcacatctcaagttggactactcatgtttcaagtggtcagtagccatgtgtgactagtggctatcatattaaagtgtagctctagatcataggtcattattatagtctgtaaaaatttcaaagtagttccagatcatagagcattattgtagtctgtaaaaatttcaagaaaggagataaaaatagggatgaaactaccaagacgtcaaatatttatgtcgtttggggagaaaacttttctgggaagaactatgaatgccctcacccat

SEQ ID NO: 333865 - DNA, 1336 bp, Homo sapiens
gccaaaaggcaggccaagagcaggagagacacagagtccggcattggtcccaggcagcagttagcccgccgcccgcctgtgtgtccccagagccatggagagagccagtctgatccagaaggccaagctggcagagcaggccgaacgctatgaggacatggcagccttcatgaaaggcgccgtggagaagggcgaggagctctcctgcgaagagcgaaacctgctctcagtagcctataagaacgtggtgggcggccagagggctgcctggagggtgctgtccagtattgagcagaaaagcaacgaggagggctcggaggagaaggggcccgaggtgcgtgagtaccgggagaaggtggagactgagctccagggcgtgtgcgacaccgtgctgggcctgctggacagccacctcatcaaggaggccggggacgccgagagccgggtcttctacctgaagatgaagggtgactactaccgctacctggccgaggtggccaccggtgacgacaagaagcgcatcattgactcagcccggtcagcctaccaggaggccatggacatcagcaagaaggagatgccgcccaccaaccccatccgcctgggcctggccctgaacttttccgtcttccactacgagatcgccaacagccccgaggaggccatctctctggccaagaccactttcgacgaggccatggctgatctgcacaccctcagcgaggactcctacaaagacagcaccctcatcatgcagctgctgcgagacaacctgacactgtggacggccgacaacgccggggaagaggggggcgaggctccccaggagccccagagctgagtgttgcccgccaccgccccgccctgccccctccagtcccccaccctgccgagaggactagtatggggtgggaggccccacccttctcccctaggcgctgttcttgctccaaagggctccgtggagagggactggcagagctgaggccacctggggctggggatcccactcttcttgcagctgttgagcgcacctaaccactggtcatgcccccacccctgctctccgcacccgcttcctcccgaccccaggaccaggctacttctcccctcctcttgcctccctcctgcccctgctgcctctgatcgtaggaattgaggagtgtcccgccttgtggctgagaactggacagtggcaggggctggagatgggtgtgtgtgtgtgtgtgtgtgtgtgtgtgtgtgcgcgcgcgccagtgcaagaccgagattgagggaaagcatgtctgctgggtgtgaccatgtttcctctcaataaagttcccctgtgacactc

SEQ ID NO: 333866 - DNA, 1770 bp, Homo sapiens
gccaaaaggcaggccaagagcaggagagacacagagtccggcattggtcccaggcagcagttagcccgccgcccgcctgtgtgtccccagagccatggagagagccagtctgatccagaaggccaagctggcagagcaggccgaacgctatgaggacatggcagccttcatgaaaggcgccgtggagaagggcgaggagctctcctgcgaagagcgaaacctgctctcagtagcctataagaacgtggtgggcggccagagggctgcctggagggtgctgtccagtattgagcagaaaagcaacgaggagggctcggaggagaaggggcccgaggtgcgtgagtaccgggagaaggtggagactgagctccagggcgtgtgcgacaccgtgctgggcctgctggacagccacctcatcaaggaggccggggacgccgagagccgggtcttctacctgaagatgaagggtgactactaccgctacctggccgaggtggccaccggtgacgacaagaagcgcatcattgactcagcccggtcagcctaccaggaggccatggacatcagcaagaaggagatgccgcccaccaaccccatccgcctgggcctggccctgaacttttccgtcttccactacgagatcgccaacagccccgaggaggccatctctctggccaagaccactttcgacgaggccatggctgatctgcacaccctcagcgaggactcctacaaagacagcaccctcatcatgcagctgctgcgagacaacctgacactgtggacggccgacaacgccggggaagaggggggcgaggctccccaggagccccagagctgagtgttgcccgccaccgccccgccctgccccctccagtcccccaccctgccgagaggactagtatggggtgggaggccccacccttctcccctaggcgctgttcttgctccaaagggctccgtggagagggactggcagagctgaggccacctggggctggggatcccactcttcttgcagctgttgagcgcacctaaccactggtcatgcccccacccctgctctccgcacccgcttcctcccgaccccaggaccaggctacttctcccctcctcttgcctccctcctgcccctgctgcctctgatcgtaggaattgaggagtgtcccgccttgtggctgagaactggacagtggcaggggctggagatgggtgtgtgtgtgtgtgtgtgtgtgtgtgtgtgtgcgcgcgcgccagtgcaagaccgagattgagggaaagcatgtctgctgggtgtgaccatgtttcctctcaataaagttcccctgtgacactcaaaaaaaaaaaaaaaaaaaaaaaaaaaaaaaaaaaaaaaaaaaaaaaaaaaaaaaaaaaaaaaaaaaaaaaaaaaaaaaaaaaaaaaaaaaaaaaaaaaaaaaaaaaaaaaaagaaaaaaagaaaaaaaaaaaaacaaaaaaaaaaaaagaacagaaacgagaaagaccaacaaagaaactcaacgacaagcaaaagcaacaaacgaaaagaacagaacacacaaaagagaagaccaaaaagaaaacacaaaaaaaaaaaaagaaaaaaaaaaaaagagaaaaaacaaacaaaacaaaacaaacgagaaaataaaaaaacaacgaaaaaaaaaataaaagaaaaaaacaaccaaaagcagagaagaaaaaacagagaaacacacaaaaaaaacaaaacaaaacagagacaaaacaaaaaaaaaaaaagaaagaa

SEQ ID NO: 333867 - DNA, 1983 bp, Homo sapiens
gccaaaaggcaggccaagagcaggagagacacagagtccggcattggtcccaggcagcagttagcccgccgcccgcctgtgtgtccccagagccatggagagagccagtctgatccagaaggccaagctggcagagcaggccgaacgctatgaggacatggcagccttcatgaaaggcgccgtggagaagggcgaggagctctcctgcgaagagcgaaacctgctctcagtagcctataagaacgtggtgggcggccagagggctgcctggagggtgctgtccagtattgagcagaaaagcaacgaggagggctcggaggagaaggggcccgaggtgcgtgagtaccgggagaaggtggagactgagctccagggcgtgtgcgacaccgtgctgggcctgctggacagccacctcatcaaggaggccggggacgccgagagccgggtcttctacctgaagatgaagggtgactactaccgctacctggccgaggtggccaccggtgacgacaagaagcgcatcattgactcagcccggtcagcctaccaggaggccatggacatcagcaagaaggagatgccgcccaccaaccccatccgcctgggcctggccctgaacttttccgtcttccactacgagatcgccaacagccccgaggaggccatctctctggccaagaccactttcgacgaggccatggctgatctgcacaccctcagcgaggactcctacaaagacagcaccctcatcatgcagctgctgcgagacaacctgacactgtggacggccgacaacgccggggaagaggggggcgaggctccccaggagccccagagctgagtgttgcccgccaccgccccgccctgccccctccagtcccccaccctgccgagaggactagtatggggtgggaggccccacccttctcccctaggcgctgttcttgctccaaagggctccgtggagagggactggcagagctgaggccacctggggctggggatcccactcttcttgcagctgttgagcgcacctaaccactggtcatgcccccacccctgctctccgcacccgcttcctcccgaccccaggaccaggctacttctcccctcctcttgcctccctcctgcccctgctgcctctgatcgtaggaattgaggagtgtcccgccttgtggctgagaactggacagtggcaggggctggagatgggtgtgtgtgtgtgtgtgtgtgtgtgtgtgtgtgtgtgtgtgcgcgcgcgcgagatgagagagagagagagagagaaagtgtgtgtggtgtgagatgagcgctgatgcttctcatcaagagagctcccgtgagacacatcaaaaacaaaacaacaaaaaaaaacagagaaaagaagagaaaaaaaacacaacacgacaagcagaacacagagaggaaagaaacgagaaaaaagaacagaagcaaaaggcaacgaagcggcaggcggcggcgcacagaacgagaccaagacagagagagcgaagacaaccccagaagacgcaagaccgagccgcggaacgcagcggacaaacgcgagcaaaagaaaaagaatagacaagaaaacgcagacacaaaccgaaacgcggagcagcgaacagaaacctgaccaccgagcgacacgggcagcgagaggaggagaaagcaggacgacgacagcacgccacggacgcacgcgcgcagcagaagaagcgaagcgaacggagaaggcgaggcggggcgggcacagaagacggacgacgagggagcgagacccaccgccacacaagaacaagcacaccgaaagagagaacaagagagatgcgaacgagaggcgccaagagacccacgacgcgagagaaaacatacaaggaccacaacaacccggcacaagaaacccacaaaccgatcaagaaagacgagaacggggcagacgaacagaagacagcgaaagaagaaacgaacaacaaaaagagc

SEQ ID NO: 333868 - DNA, 1240 bp, Homo sapiens
gccaaaaggcaggccaagagcaggagagacacagagtccggcattggtcccaggcagcagttagcccgccgcccgcctgtgtgtccccagagccatggagagagccagtctgatccagaaggccaagctggcagagcaggccgaacgctatgaggacatggcagccttcatgaaaggcgccgtggagaagggcgaggagctctcctgcgaagagcgaaacctgctctcagtagcctataagaacgtggtgggcggccagagggctgcctggagggtgctgtccagtattgagcagaaaagcaacgaggagggctcggaggagaaggggcccgaggtgcgtgagtaccgggtcttctacctgaagatgaagggtgactactaccgctacctggccgaggtggccaccggtgacgacaagaagcgcatcattgactcagcccggtcagcctaccaggaggccatggacatcagcaagaaggagatgccgcccaccaaccccatccgcctgggcctggccctgaacttttccgtcttccactacgagatcgccaacagccccgaggaggccatctctctggccaagaccactttcgacgaggccatggctgatctgcacaccctcagcgaggactcctacaaagacagcaccctcatcatgcagctgctgcgagacaacctgacactgtggacggccgacaacgccggggaagaggggggcgaggctccccaggagccccagagctgagtgttgcccgccaccgccccgccctgccccctccagtcccccaccctgccgagaggactagtatggggtgggaggccccacccttctcccctaggcgctgttcttgctccaaagggctccgtggagagggactggcagagctgaggccacctggggctggggatcccactcttcttgcagctgttgagcgcacctaaccactggtcatgcccccacccctgctctccgcacccgcttcctcccgaccccaggaccaggctacttctcccctcctcttgcctccctcctgcccctgctgcctctgatcgtaggaattgaggagtgtcccgccttgtggctgagaactggacagtggcaggggctggagatgggtgtgtgtgtgtgtgtgtgtgtgtgtgtgtgtgcgcgcgcgccagtgcaagaccgagattgagggaaagcatgtctgctgggtgtgaccatgtttcctctcaataaagttcccctgtgacactc

SEQ ID NO: 333869 - DNA, 1407 bp, Homo sapiens
ccaggcagcagttagcccgccgcccgcctgtgtgtccccagagccatggagagagccagtctgatccagaaggccaagctggcagagcaggccgaacgctatgaggacatggcagccttcccaggcagcagttagcccgccgcccgcctgtgtgtccccagagccatggagagagccagtctgatccagaaggccaagctggcagagcaggccgaacgctatgaggacatggcagccttcatgaaaggcgccgtggagaagggcgaggagctctcctgcgaagagcgaaacctgctctcagtagcctataagaacgtggtgggcggccagagggctgcctggagggtgctgtccagtattgagcagaaaagcaacgaggagggctcggaggagaaggggcccgaggtgcgtgagtaccgggagaaggtggagactgagctccagggcgtgtgcgacaccgtgctgggcctgctggacagccacctcatcaaggaggccggggacgccgagagccgggtcttctacctgaagatgaagggtgactactaccgctacctggccgaggtggccaccggtgacgacaagaagcgcatcattgactcagcccggtcagcctaccaggaggccatggacatcagcaagaaggagatgccgcccaccaaccccatccgcctgggcctggccctgaacttttccgtcttccactacgagatcgccaacagccccgaggaggccatctctctggccaagaccactttcgacgaggccatggctgatctgcacaccctcagcgaggactcctacaaagacagcaccctcatcatgcagctgctgcgagacaacctgacactgtggacggccgacaacgccggggaagaggggggcgaggctccccaggagccccagagctgagtgttgcccgccaccgccccgccctgccccctccagtcccccaccctgccgagaggactagtatggggtgggaggccccacccttctcccctaggcgctgttcttgctccaaagggctccgtggagagggactggcagagctgaggccacctggggctggggatcccactcttcttgcagctgttgagcgcacctaaccactggtcatgcccccacccctgctctccgcacccgcttcctcccgaccccaggaccaggctacttctcccctcctcttgcctccctcctgcccctgctgcctctgatcgtaggaattgaggagtgtcccgccttgtggctgagaactggacagtggcaggggctggagatgggtgtgtgtgtgtgtgtgtgtgtgtgtgtgtgtgcgcgcgcgccagtgcaagaccgagattgagggaaagcatgtctgctgggtgtgaccatgtttcctctcaataaagttcccctgtgacactc

SEQ ID NO: 333870 - DNA, 1161 bp, Homo sapiens
gccaaaaggcaggccaagagcaggagagacacagagtccggcattggtcccaggcagcagttagcccgccgcccgcctgtgtgtccccagagccatggagagagccagtctgatccagaaggccaagctggcagagcaggccgaacgctatgaggacatggcagccttcatgaaaggcgccgtggagaagggcgaggagctctcctgcgaagagcgaaacctgctctcagtagccacctcatcaaggaggccggggacgccgagagccgggtcttctacctgaagatgaagggtgactactaccgctacctggccgaggtggccaccggtgacgacaagaagcgcatcattgactcagcccggtcagcctaccaggaggccatggacatcagcaagaaggagatgccgcccaccaaccccatccgcctgggcctggccctgaacttttccgtcttccactacgagatcgccaacagccccgaggaggccatctctctggccaagaccactttcgacgaggccatggctgatctgcacaccctcagcgaggactcctacaaagacagcaccctcatcatgcagctgctgcgagacaacctgacactgtggacggccgacaacgccggggaagaggggggcgaggctccccaggagccccagagctgagtgttgcccgccaccgccccgccctgccccctccagtcccccaccctgccgagaggactagtatggggtgggaggccccacccttctcccctaggcgctgttcttgctccaaagggctccgtggagagggactggcagagctgaggccacctggggctggggatcccactcttcttgcagctgttgagcgcacctaaccactggtcatgcccccacccctgctctccgcacccgcttcctcccgaccccaggaccaggctacttctcccctcctcttgcctccctcctgcccctgctgcctctgatcgtaggaattgaggagtgtcccgccttgtggctgagaactggacagtggcaggggctggagatgggtgtgtgtgtgtgtgtgtgtgtgtgtgtgtgtgcgcgcgcgccagtgcaagaccgagattgagggaaagcatgtctgctgggtgtgaccatgtttcctctcaataaagttcccctgtgacactc

SEQ ID NO: 333871 - DNA, 989 bp, Homo sapiens
gggctggcgggctgggggcgggccgggctgggaaaatcagcggttggacttggcacacgctccacctcatcaaggaggccggggacgccgagagccgggtcttctacctgaagatgaagggtgactactaccgctacctggccgaggtggccaccggtgacgacaagaagcgcatcattgactcagcccggtcagcctaccaggaggccatggacatcagcaagaaggagatgccgcccaccaaccccatccgcctgggcctggccctgaacttttccgtcttccactacgagatcgccaacagccccgaggaggccatctctctggccaagaccactttcgacgaggccatggctgatctgcacaccctcagcgaggactcctacaaagacagcaccctcatcatgcagctgctgcgagacaacctgacactgtggacggccgacaacgccggggaagaggggggcgaggctccccaggagccccagagctgagtgttgcccgccaccgccccgccctgccccctccagtcccccaccctgccgagaggactagtatggggtgggaggccccacccttctcccctaggcgctgttcttgctccaaagggctccgtggagagggactggcagagctgaggccacctggggctggggatcccactcttcttgcagctgttgagcgcacctaaccactggtcatgcccccacccctgctctccgcacccgcttcctcccgaccccaggaccaggctacttctcccctcctcttgcctccctcctgcccctgctgcctctgatcgtaggaattgaggagtgtcccgccttgtggctgagaactggacagtggcaggggctggagatgggtgtgtgtgtgtgtgtgtgtgtgtgtgtgtgtgcgcgcgcgccagtgcaagaccgagattgagggaaagcatgtctgctgggtgtgaccatgtttcctctcaataaagttcccctgtgacactc

SEQ ID NO: 333872 - DNA, 1990 bp, Homo sapiens
cgcaaggcaagcagcagcccctgtaagcacacgagacaatcccaagtgtcagtgggaaggagatccctttcctgatggggctgcctgtgtccagtccctcccagcttccccagggccctggggctctgcaggcattcagaagtggaagccagccacagcctgggactgaagaggttaatgtgcatctgcctccgaatgttaatgtgtctaggtgatgtcagtgggagccatgaagaagggagtggggagggcagttgggcttggaggcggcagcggctgccaggctacggaggaagacccccttcccgactgcggggcttgcgctccgggacaaggtggcaggcgctggaggctgccgcagcctgcgtgggtggaggggagctcagctcggttgtgggagcaggcgaccggcactggctggatggacctggaagcctcgctgctgcccactggtcccaatgccagcaacacctctgatggccccgataacctcacttcggcaggatcacctcctcgcacggggagcatctcctacatcaacatcatcatgccttcggtgttcggcaccatctgcctcctgggcatcatcgggaactccacggtcatcttcgcggtcgtgaagaagtccaagctgcactggtgcaacaacgtccccgacatcttcatcatcaacctctcggtagtagatctcctctttctcctgggcatgcccttcatgatccaccagctcatgggcaatggggtgtggcactttggggagaccatgtgcaccctcatcacggccatggatgccaatagtcagttcaccagcacctacatcctgaccgccatggccattgaccgctacctggccactgtccaccccatctcttccacgaagttccggaagccctctgtggccaccctggtgatctgcctcctgtgggccctctccttcatcagcatcacccctgtgtggctgtatgccagactcatccccttcccaggaggtgcagtgggctgcggcatacgcctgcccaacccagacactgacctctactggttcaccctgtaccagtttttcctggcctttgccctgccttttgtggtcatcacagccgcatacgtgaggatcctgcagcgcatgacgtcctcagtggcccccgcctcccagcgcagcatccggctgcggacaaagagggtgacccgcacagccatcgccatctgtctggtcttctttgtgtgctgggcaccctactatgtgctacagctgacccagttgtccatcagccgcccgaccctcacctttgtctacttatacaatgcggccatcagcttgggctatgccaacagctgcctcaacccctttgtgtacatcgtgctctgtgagacgttccgcaaacgcttggtcctgtcggtgaagcctgcagcccaggggcagcttcgcgctgtcagcaacgctcagacggctgacgaggagaggacagaaagcaaaggcacctgatacttcccctgccaccctgcacacctccaagtcagggcaccacaacacgccaccgggagagatgctgagaaaaacccaagaccgctcgggaaatgcaggaaggccgggttgtgaggggttgttgcaatgaaataaatacattccatggggctcacacgttgctggggaggcctggagtcaggtttggggttttcagatatcagaaatccccttgggggagcaggatgagacctttggatagaacagaagctgagcaagagaacatgttggtttggataaccggttgcactatatctgtgagctctcaaatgtcttcttcccaaggcaagaggtggaagggtactgactgggtttgtttaaagtcaggcagggctggagtgagcagccagggccatgttgcacaaggcctgagagacgggaaagggcccgatcgctctttcccgcctctcactggtgcgatggaaggtggcctttctcccaagctggtggataatgaaaaataaagca

SEQ ID NO: 333873 - DNA, 2104 bp, Homo sapiens
atgttgtgtccttccaagacagatggctcagggcactctggtaggattcaccaggaaactcatggagaagggaaaagggacaagattagcaacagtgaagggagggagaatggtgggagaggattccagatgaacggtgggtcgctggaggctgagcatgccagcaggatgtcagttctcagagcaaagcccatgtcaaacagccaacgcttgctccttctgtccccaggatcacctcctcgcacggggagcatctcctacatcaacatcatcatgccttcggtgttcggcaccatctgcctcctgggcatcatcgggaactccacggtcatcttcgcggtcgtgaagaagtccaagctgcactggtgcaacaacgtccccgacatcttcatcatcaacctctcggtagtagatctcctctttctcctgggcatgcccttcatgatccaccagctcatgggcaatggggtgtggcactttggggagaccatgtgcaccctcatcacggccatggatgccaatagtcagttcaccagcacctacatcctgaccgccatggccattgaccgctacctggccactgtccaccccatctcttccacgaagttccggaagccctctgtggccaccctggtgatctgcctcctgtgggccctctccttcatcagcatcacccctgtgtggctgtatgccagactcatccccttcccaggaggtgcagtgggctgcggcatacgcctgcccaacccagacactgacctctactggttcaccctgtaccagtttttcctggcctttgccctgccttttgtggtcatcacagccgcatacgtgaggatcctgcagcgcatgacgtcctcagtggcccccgcctcccagcgcagcatccggctgcggacaaagagggtgacccgcacagccatcgccatctgtctggtcttctttgtgtgctgggcaccctactatgtgctacagctgacccagttgtccatcagccgcccgaccctcacctttgtctacttatacaatgcggccatcagcttgggctatgccaacagctgcctcaacccctttgtgtacatcgtgctctgtgagacgttccgcaaacgcttggtcctgtcggtgaagcctgcagcccaggggcagcttcgcgctgtcagcaacgctcagacggctgacgaggagaggacagaaagcaaaggcacctgatacttcccctgccaccctgcacacctccaagtcagggcaccacaacacgccaccgggagagatgctgagaaaaacccaagaccgctcgggaaatgcaggaaggccgggttgtgaggggttgttgcaatgaaataaatacattccatggggctcacacgttgctggggaggcctggagtcaggtttggggttttcagatatcagaaatccccttgggggagcaggatgagacctttggatagaacagaagctgagcaagagaacatgttggtttggataaccggttgcactatatctgtgagctctcaaatgtcttcttcccaaggcaagaggtggaagggtactgactgggtttgtttaaagtcaggcagggctggagtgagcagccagggccatgttgcacaaggcctgagagacgggaaagggcccgatcgctctttcccgcctctcactggtgcgatggaaggtggcctttctcccaagctggtggataatgaaaaataaagcatcccatctctcggcgttccagcatcctgtcaatttcccttttgctctagaggatgcatgtttatttgaggggatgtggcactgagcccacaggagtaaaagcccagtttgctaggaggtctgcttactgaaaacaaggagacctggggtgggtgtggttgggggtcttaaaactaataaaagctggggtcggggggcttttgcagctctggtgacattctctccacggggcacatttgctcagtcactaatccagcttgagtgtccgtgtgttctgcatgtgcaggggtcattctagtgcccggtgtgttggcatcatctttttgctctagcccttcctctccaaaataaaatcaaataaaggaaaatctccacccacaaactctgga

SEQ ID NO: 333874 - DNA, 2378 bp, Homo sapiens
cgcaaggcaagcagcagcccctgtaagcacacgagacaatcccaagtgtcagtgggaaggagatccctttcctgatggggctgcctgtgtccagtccctcccagcttccccagggccctggggctctgcaggcattcagaagtggaagccagccacagcctgggactgaagaggttaatgtgcatctgcctccgaatgttaatgtgtctaggtgatgtcagtgggagccatgaagaagggagtggggagggcagttgggcttggaggcggcagcggctgccaggctacggaggaagacccccttcccgactgcggggcttgcgctccgggacaaggtggcaggcgctggaggctgccgcagcctgcgtgggtggaggggagctcagctcggttgtgggagcaggcgaccggcactggctggatggacctggaagcctcgctgctgcccactggtcccaatgccagcaacacctctgatggccccgataacctcacttcggcaggatcacctcctcgcacggggagcatctcctacatcaacatcatcatgccttcggtgttcggcaccatctgcctcctgggcatcatcgggaactccacggtcatcttcgcggtcgtgaagaagtccaagctgcactggtgcaacaacgtccccgacatcttcatcatcaacctctcggtagtagatctcctctttctcctgggcatgcccttcatgatccaccagctcatgggcaatggggtgtggcactttggggagaccatgtgcaccctcatcacggccatggatgccaatagtcagttcaccagcacctacatcctgaccgccatggccattgaccgctacctggccactgtccaccccatctcttccacgaagttccggaagccctctgtggccaccctggtgatctgcctcctgtgggccctctccttcatcagcatcacccctgtgtggctgtatgccagactcatccccttcccaggaggtgcagtgggctgcggcatacgcctgcccaacccagacactgacctctactggttcaccctgtaccagtttttcctggcctttgccctgccttttgtggtcatcacagccgcatacgtgaggatcctgcagcgcatgacgtcctcagtggcccccgcctcccagcgcagcatccggctgcggacaaagagggtgacccgcacagccatcgccatctgtctggtcttctttgtgtgctgggcaccctactatgtgctacagctgacccagttgtccatcagccgcccgaccctcacctttgtctacttatacaatgcggccatcagcttgggctatgccaacagctgcctcaacccctttgtgtacatcgtgctctgtgagacgttccgcaaacgcttggtcctgtcggtgaagcctgcagcccaggggcagcttcgcgctgtcagcaacgctcagacggctgacgaggagaggacagaaagcaaaggcacctgatacttcccctgccaccctgcacacctccaagtcagggcaccacaacacgccaccgggagagatgctgagaaaaacccaagaccgctcgggaaatgcaggaaggccgggttgtgaggggttgttgcaatgaaataaatacattccatggggctcacacgttgctggggaggcctggagtcaggtttggggttttcagatatcagaaatccccttgggggagcaggatgagacctttggatagaacagaagctgagcaagagaacatgttggtttggataaccggttgcactatatctgtgagctctcaaatgtcttcttcccaaggcaagaggtggaagggtactgactgggtttgtttaaagtcaggcagggctggagtgagcagccagggccatgttgcacaaggcctgagagacgggaaagggcccgatcgctctttcccgcctctcactggtgcgatggaaggtggcctttctcccaagctggtggataatgaaaaataaagcatcccatctctcggcgttccagcatcctgtcaatttcccttttgctctagaggatgcatgtttatttgaggggatgtggcactgagcccacaggagtaaaagcccagtttgctaggaggtctgcttactgaaaacaaggagacctggggtgggtgtggttgggggtcttaaaactaataaaagctggggtcggggggcttttgcagctctggtgacattctctccacggggcacatttgctcagtcactaatccagcttgagtgtccgtgtgttctgcatgtgcaggggtcattctagtgcccggtgtgttggcatcatctttttgctctagcccttcctctccaaaataaaatcaaataaaggaaaatctccacccacaaactctgga

SEQ ID NO: 333875 - DNA, 532 bp, Homo sapiens
gtcaatatgttaccatttgctaaattagttccactttcctctaagctcaagatttggtctatcttggtggaattatattcccacagaggtgcatgcacaaagttcactcctacatgcccattacttcctgccgtccacccttgcccttcctttcctggccttgactcacatgatacattgatctggatgcaaataccagcctattgactttgtaaaagtgaacaccccaatttccccgtgagcccctcccctccaacactactctccctgagtaagtgaagaccttgttcatccactggacaaaattataggaggccgcttaaatcagtgtgtgcaggacatcatgactcagcacatgatccatgagggatggcttcagaaccactgtcagcagcgcagctcagcgcttgtgtcccagctcagtccttgtatcccccttgatgtacttctttctgttctcctcatattttctgtgtctggtcatttcctgtcctgcctgcgctgactattgtgcctaagaacatgtcgtggg

SEQ ID NO: 333876 - DNA, 324 bp, Homo sapiens
ttcattttagtttttgctttgtgtttgggttttatgtaaccagaagaagaaaattcttgatggaatcacagaaaacttgagagttaattatagttcagtgtagtgaatgctttgatcctgaaggctgtgaaactgaatcgttttcattcagaaaatttctcatgtcaggtttttcaaacaaaaagaatgattagtaaactattctattacctttcattcccatagctctcctgtaatttgtaagactcaaatgatacacactgaaccttgggctgagatttaattttgtatatttgccaaagtacacagtagcctagtttccat

SEQ ID NO: 333877 - DNA, 658 bp, Homo sapiens
ttatcgattcatatctttgctcggtttttatggggttgcaagatctttttgttatcaagtttccaagtacttactgcatgtatatcaggaaggctaccctctgtctatgattaaaattaccaataagttttgctaattcctaactgtaaataagttttggctgcaaataagttttaccagttttgctgaaactctatatccactgaacaattccctttttccccttcccctagctaccaccactctactttgtttctaagggtttgactactttagatatctcatataagtggggtcatgcagtatttgcctttttgtgactggctttcacttagtgtaattcctcaaggttcatctacggttgtatcacacaacaaaatttcctttttaaagtttgaataatatttcattgtatgtatatacattttctttatccattcagagaaggttttttttttttggaaacggggtctcactctgtcacccaggttggagtgtagtggtgcaatctcggtttactgcagcctccaccttccaggctcgagagattctcccaccacagcctcccgagttgctgggaccacaggcacatgccatcatgtccagctaatttttttgtatttttggtagagtcagggttttgtcatgctgccaggct

SEQ ID NO: 333878 - DNA, 2191 bp, Homo sapiens
tgcgcgcagtttcccgcatgctcagtagctgaggtagggatgccatccttctcaaaagacttattgacagtgccaaagctcggtactggacacaacgagggacctgggtctacgataacgcgcttttgctcctcctgaagtgtctttggtccaacgttgttccagagtgtaccatggcttccagtaacactgtgttgatgcggttggtagcctccgcatattctattgctcaaaaggcaggaatgatagtcagacgtgttattgctgaaggagacctgggtattgtggagaagacctgtgcaacagacctgcagaccaaagctgaccgattggcacagatgagcatatgttcttcattggcccggaaattccccaaactcacaattataggggaagaggatctgccttctgaggaagtggatcaagagctgattgaagacagtcagtgggaagaaatactgaagcaaccatgcccatcgcagtacagtgctattaaagaagaagatctcgtggtctgggttgatcctctggatggaaccaaggaatataccgaaggtcttcttgacaatgtaacagttcttattggaattgcttatgaaggaaaagccatagcaggagttattaaccagccatattacaactatgaggcaggaccagatgctgtgttggggaggacaatctggggagttttaggtttaggcgcctttgggtttcagctgaaagaagtccctgctgggaaacacattatcacaactactcgatcccatagcaacaagttggttactgactgtgttgctgctatgaaccccgatgctgtgctgcgagtaggaggagcaggaaataagattattcagctgattgaaggcaaagcctctgcttatgtatttgcaagtcctggttgtaagaagtgggatacttgtgctccagaagttattttacatgctgtgggaggcaagttaaccgatatccatgggaatgttcttcagtaccacaaggatgtgaagcatatgaactctgcaggagtcctggccacactgaggaattatgactactatgcaagccgagttccagaatctattaaaaatgcacttgttccttaaaggaaagtttcatttggccgggcgcggtggctcatgcctgtaatcccagcactttgggaggccgaggcaggtggatcacttgagctcaggagtttgagaccagcctgggcaatatcgtgagaccccatctctacaaaaatacaaattaactgggcatcctgtcatgcgcctgtcatcccagctacttgagaggctgaagcagaagaatctcttgagcccggaaggcggaggttgcagtgagctgagatcgtgccactgcactccagcctgagtgacaggagttaagccctgtctcagaaaaaaaaaaaaacaaaaacccaaaaagtacttaaagtttcatttacttagctaggagaaagacttggttctcaaaataatacattttaagattaattgggtagaattagagttccacctttattcattgttgagcagtgatttatatttagttattatatttaggaatagaaaatagaattaaataatttaacttgattaatcaaccagaccaattttgacgtctggagaacttataaactcaatatgttatatttgttttcctgtatttaggtggagaaatgagaaaacatttgccaatgacagttaggcgtgcacactgaccattcactgataaaccagattctgcctgaatctgaagggattgcttgtagcatagggtttagtggcgtgatctcggctcactgcaagctccgcttcccgggttcatgccattctcctgcctcagcctcccgagtagctgggactgcaggcaccgccaccacgcctggctaattttttgtatttttagtagagaaggtgtttcaccgtgttggccaggatggtcttgatctcctgacatcgtgatctgtctgcctcggactcccaaagtgctgggattacaggtgtgagccaccgcacctggcctaaaccagatttctttagggcacaattttttctggaatctcactcttgtttttcacagtaattttaaaaacgtttctactccaattaagaatatatatgatgttattatatatgcttatgaaacagatttatgagaaaagttttttttaaataaattatttaatcct

SEQ ID NO: 333879 - DNA, 769 bp, Homo sapiens
tgcgcgcagtttcccgcatgctcagtagctgaggtagggatgccatccttctcaaaagacttattgacagtgccaaagctcggtactggacacaacgagggacctgggtctacgataacgcgcttttgctcctcctgaagtgtctttggtccaacgttgttccagagtgtaccatggcttccagtaacactgtgttgatgcggttggtagcctccgcatattctattgctcaaaaggcaggaatgatagtcagacgtgttattgctgaaggagacctgggtattgtggagaagacctgtgcaacagacctgcagaccaaagtgggattacaggtgtgagccaccgcacctggcctaaaccagatttctttagggcacaattttttctggaatctcactcttgtttttcacagtaattttaaaaacgtttctactccaattaagaatatatatgatgttattatatatgcttatgaaacagatttatgagaaaagttttttttaaataaattatttaatcctagctctttgttattcaccagctttttaaaaaagtgtttgaaaattatacattctcgactttggggattagtttattcttgtggcatcattataaggcttaattgtggaaagctaagtacttgcttctattccttccaatgagagattataacataaactattaaaattattctgctaatatacctagatttttatttttaggtctctgtccattgcttttaattaaaattatctgttttcaaatcaaa

SEQ ID NO: 333880 - DNA, 658 bp, Homo sapiens
gatcattagataattcagagaaacagtaatcagtttatgatgtttcagcacattataaacagaaatcagtttataaggattccagggaataaccaaaagttctttgaaactgttaaccagaacagtaatgataataatcagcagattctctcaggagaagttctttgccagtgatattgttcttgtactttataacattatcatgttttttgagacggagtcttgccctgtcgcccagactggagtgtagtggcgtgatcttggctcactgcaacctccacctcccaggttcacgccattctcctgcctcagcctcccgagtagctgggactgcaggcaccgccaccacgcctggctaattttttgtatttttagtagagaaggtgtttcaccgtgttggccaggatggtcttgatctcctgacatcgtgatctgtctgcctcggactcccaaagtgctgggattacaggtgtgagccaccgcacctggcctaaaccagatttctttagggcacaattttttctggaatctcactcttgtttttcacagtaattttaaaaacgtttctactccaattaagaatatatatgatgttattatatatgcttatgaaacagatttatgagaaaagttttttttaaataaattatttaatcct

SEQ ID NO: 333881 - DNA, 1031 bp, Homo sapiens
tgcgcgcagtttcccgcatgctcagtagctgaggtagggatgccatccttctcaaaagacttattgacagtgccaaagctcggtactggacacaacgagggacctgggtctacgataacgcgcttttgctcctcctgaagtgtctttggtccaacgttgttccaggtttgtcaccgtttctctccggccggtcagggcaagagccagagtgtaccatggcttccagtcagtcagtcagtcagtcagtcagtcagtcgtcagtcagtcagtcagtcagtcagtcagtcgtcagtcagtcagtcagtcagtcagtcagtcgtcagtcagtcagtcagtcagtcagtcagtcgtcagtcagtcagtcagtcagtcagtcagtcgtcagtcagtcagtcagtcagtcagtcagtcgtcagtcagtcagtcagtcagtcagtcagtcgtcagtcagtcagtcagtcagtcagtcagtcgtcagtcagtcagtcagtcagtcagtcagtcgtcagtcagtcagtcagtcagtcagtcagtcgtcagtcagtcagtcagtcagtcagtcagtcgtcagtcagtcagtcagtcagtcagtcagtcgtcagtcagtcagtcagtcagtcagtcagtcgtcagtcagtcagtcagtcagtcagtcagtcgtcagtcagtcagtcagtcagtcagtcagtcgtcagtcagtcagtcagtcagtcagtcagtcgtcagtcagtcagtcagtcagtcagtcagtcgtcagtcagtcagtcagtcagtcagtcagtcgtcagtcagtcagtcagtcagtcagtcagtcgtcagtcagtcagtcagtcagtcagtcagtcgtcagtcagtcagtcagtcagtcagtcagtcgtcagtcagtcagtcagtcagtcagtcagtcgtcagtcagtcagtcagtcagtcagtcagtcgtcagtcagtcagtcagtcagtcagtcagtcgtcagtcagtcagtcagtcagtcagtcagtcgtcagtcagtcagtcagtcagtcagtcagtc

SEQ ID NO: 333882 - DNA, 387 bp, Homo sapiens
gatcattagataattcagagaaacagtaatcagtttatgatgtttcagcacattataaacagaaatcagtttataaggattccagggaataaccaaaagttctttgaaactgttaaccagaacagtaatgataataatcagcagattctctcaggagaagttctttgccagtgatattgttcttgtactttataacattatcatgttttttgagacggagtcttgccctgtcgcccagactggagtgtagtggcgtgatcttggctcactgcaacctccacctcccaggagaattgcttgaacccaggaggcggagtttgcagtgagccgagatcgcaccactgcactccagcctgggcgacacagtaagactctgtctcaaacaat

SEQ ID NO: 333883 - DNA, 2398 bp, Homo sapiens
tgcgcgcagtttcccgcatgctcagtagctgaggtagggatgccatccttctcaaaagacttattgacagtgccaaagctcggtactggacacaacgagggacctgggtctacgataacgcgcttttgctcctcctgaagtgtctttggtccaacgttgttccaggtttgtcaccgtttctctccggccggtcagggcaagagccagagtgtaccatggcttccagtaacactgtgttgatgcggttggtagcctccgcatattctattgctcaaaaggcaggaatgatagtcagacgtgttattgctgaaggagacctgggtattgtggagaagacctgtgcaacagacctgcagaccaaagctgaccgattggcacagatgagcatatgttcttcattggcccggaaattccccaaactcacaattataggggaagagctcgtggtctgggttgatcctctggatggaaccaaggaatataccgaaggtcttcttgacaatgtaacagttcttattggaattgcttatgaaggaaaagccatagcaggagttattaaccagccatattacaactatgaggcaggaccagatgctgtgttggggaggacaatctggggagttttaggtttaggcgcctttgggtttcagctgaaagaagtccctgctgggaaacacattatcacaactactcgatcccatagcaacaagttggttactgactgtgttgctgctatgaaccccgatgctgtgctgcgagtaggaggagcaggaaataagattattcagctgattgaaggcaaagcctctgcttatgtatttgcaagtcctggttgtaagaagtgggatacttgtgctccagaagttattttacatgctgtgggaggcaagttaaccgatatccatgggaatgttcttcagtaccacaaggatgtgaagcatatgaactctgcaggagtcctggccacactgaggaattatgactactatgcaagccgagttccagaatctattaaaaatgcacttgttccttaaaggaaagtttcatttggccgggcgcggtggctcatgcctgtaatcccagcactttgggaggccgaggcaggtggatcacttgagctcaggagtttgagaccagcctgggcaatatcgtgagaccccatctctacaaaaatacaaattaactgggcatcctgtcatgcgcctgtcatcccagctacttgagaggctgaagcagaagaatctcttgagcccggaaggcggaggttgcagtgagctgagatcgtgccactgcactccagcctgagtgacaggagttaagccctgtctcagaaaaaaaaaaaaacaaaaacccaaaaagtacttaaagtttcatttacttagctaggagaaagacttggttctcaaaataatacattttaagattaattgggtagaattagagttccacctttattcattgttgagcagtgatttatatttagttattatatttaggaatagaaaatagaattaaataatttaacttgattaatcaaccagaccaattttgacgtctggagaacttataaactcaatatgttatatttgttttcctgtatttaggtggagaaatgagaaaaagctttagttccaattgacagttcaggtcaatgttcaatgaacattcctatcttctaaaccagatttctctttttttttcctgagacggagtctcgctctgtagcctaggctggaatgtagtggcgtgatctcggctcactgcaagctccgcttcccgggttcatgccattctcctgcctcagcctcccgagtagctgggactgcaggcaccgccaccacgcctggctaattttttgtatttttagtagagaaggtgtttcaccgtgttggccaggatggtcttgatctcctgacatcgtgatctgtctgcctcggactcccaaagtgctgggattacaggtgtgagccaccgcacctggcctaaaccagatttctttagggcacaattttttctggaatctcactcttgtttttcacagtaattttaaaaacgtttctactccaattaagaatatatatgatgttattatatatgcttatgaaacagatttatgagaaaagttttttttaaataaattatttaatcctagctctttgttattcaccagctttttaaaaaagtgtttgaaaattatacattctcgactttggggattagtttattcttgtggcatcattataaggcttaattgtggaaagctaagtacttgcttctattccttccaatgagagattataacataaactattaaaattattctgctaatatacctagatttttatttttaggtctctgtccattgcttttaattaaaattatctgttttcaaatcaaa

SEQ ID NO: 333884 - DNA, 2509 bp, Homo sapiens
tgcgcgcagtttcccgcatgctcagtagctgaggtagggatgccatccttctcaaaagacttattgacagtgccaaagctcggtactggacacaacgagggacctgggtctacgataacgcgcttttgctcctcctgaagtgtctttggtccaacgttgttccagagtgtaccatggcttccagtaacactgtgttgatgcggttggtagcctccgcatattctattgctcaaaaggcaggaatgatagtcagacgtgttattgctgaaggagacctgggtattgtggagaagacctgtgcaacagacctgcagaccaaagctgaccgattggcacagatgagcatatgttcttcattggcccggaaattccccaaactcacaattataggggaagaggatctgccttctgaggaagtggatcaagagctgattgaagacagtcagtgggaagaaatactgaagcaaccatgcccatcgcagtacagtgctattaaagaagaagatctcgtggtctgggttgatcctctggatggaaccaaggaatataccgaaggtcttcttgacaatgtaacagttcttattggaattgcttatgaaggaaaagccatagcaggagttattaaccagccatattacaactatgagaacaatgaaaagcagcagttaagggaacacaggaatgaagcaaaggcaggaccagatgctgtgttggggaggacaatctggggagttttaggtttaggcgcctttgggtttcagctgaaagaagtccctgctgggaaacacattatcacaactactcgatcccatagcaacaagttggttactgactgtgttgctgctatgaaccccgatgctgtgctgcgagtaggaggagcaggaaataagattattcagctgattgaaggcaaagcctctgcttatgtatttgcaagtcctggttgtaagaagtgggatacttgtgctccagaagttattttacatgctgtgggaggcaagttaaccgatatccatgggaatgttcttcagtaccacaaggatgtgaagcatatgaactctgcaggagtcctggccacactgaggaattatgactactatgcaagccgagttccagaatctattaaaaatgcacttgttccttaaaggaaagtttcatttggccgggcgcggtggctcatgcctgtaatcccagcactttgggaggccgaggcaggtggatcacttgagctcaggagtttgagaccagcctgggcaatatcgtgagaccccatctctacaaaaatacaaattaactgggcatcctgtcatgcgcctgtcatcccagctacttgagaggctgaagcagaagaatctcttgagcccggaaggcggaggttgcagtgagctgagatcgtgccactgcactccagcctgagtgacaggagttaagccctgtctcagaaaaaaaaaaaaacaaaaacccaaaaagtacttaaagtttcatttacttagctaggagaaagacttggttctcaaaataatacattttaagattaattgggtagaattagagttccacctttattcattgttgagcagtgatttatatttagttattatatttaggaatagaaaatagaattaaataatttaacttgattaatcaaccagaccaattttgacgtctggagaacttataaactcaatatgttatatttgttttcctgtatttaggtggagaaatgagaaaaagctttagttccaattgacagttcaggtcaatgttcaatgaacattcctatcttctaaaccagatttctctttttttttcctgagacggagtctcgctctgtagcctaggctggaatgtagtggcgtgatctcggctcactgcaagctccgcttcccgggttcatgccattctcctgcctcagcctcccgagtagctgggactgcaggcaccgccaccacgcctggctaattttttgtatttttagtagagaaggtgtttcaccgtgttggccaggatggtcttgatctcctgacatcgtgatctgtctgcctcggactcccaaagtgctgggattacaggtgtgagccaccgcacctggcctaaaccagatttctttagggcacaattttttctggaatctcactcttgtttttcacagtaattttaaaaacgtttctactccaattaagaatatatatgatgttattatatatgcttatgaaacagatttatgagaaaagttttttttaaataaattatttaatcctagctctttgttattcaccagctttttaaaaaagtgtttgaaaattatacattctcgactttggggattagtttattcttgtggcatcattataaggcttaattgtggaaagctaagtacttgcttctattccttccaatgagagattataacataaactattaaaattattctgctaatatacctagatttttatttttaggtctctgtccattgcttttaattaaaattatctgttttcaaatcaaa

SEQ ID NO: 333885 - DNA, 2551 bp, Homo sapiens
tgcgcgcagtttcccgcatgctcagtagctgaggtagggatgccatccttctcaaaagacttattgacagtgccaaagctcggtactggacacaacgagggacctgggtctacgataacgcgcttttgctcctcctgaagtgtctttggtccaacgttgttccaggtttgtcaccgtttctctccggccggtcagggcaagagccagagtgtaccatggcttccagtaacactgtgttgatgcggttggtagcctccgcatattctattgctcaaaaggcaggaatgatagtcagacgtgttattgctgaaggagacctgggtattgtggagaagacctgtgcaacagacctgcagaccaaagctgaccgattggcacagatgagcatatgttcttcattggcccggaaattccccaaactcacaattataggggaagaggatctgccttctgaggaagtggatcaagagctgattgaagacagtcagtgggaagaaatactgaagcaaccatgcccatcgcagtacagtgctattaaagaagaagatctcgtggtctgggttgatcctctggatggaaccaaggaatataccgaaggtcttcttgacaatgtaacagttcttattggaattgcttatgaaggaaaagccatagcaggagttattaaccagccatattacaactatgagaacaatgaaaagcagcagttaagggaacacaggaatgaagcaaaggcaggaccagatgctgtgttggggaggacaatctggggagttttaggtttaggcgcctttgggtttcagctgaaagaagtccctgctgggaaacacattatcacaactactcgatcccatagcaacaagttggttactgactgtgttgctgctatgaaccccgatgctgtgctgcgagtaggaggagcaggaaataagattattcagctgattgaaggcaaagcctctgcttatgtatttgcaagtcctggttgtaagaagtgggatacttgtgctccagaagttattttacatgctgtgggaggcaagttaaccgatatccatgggaatgttcttcagtaccacaaggatgtgaagcatatgaactctgcaggagtcctggccacactgaggaattatgactactatgcaagccgagttccagaatctattaaaaatgcacttgttccttaaaggaaagtttcatttggccgggcgcggtggctcatgcctgtaatcccagcactttgggaggccgaggcaggtggatcacttgagctcaggagtttgagaccagcctgggcaatatcgtgagaccccatctctacaaaaatacaaattaactgggcatcctgtcatgcgcctgtcatcccagctacttgagaggctgaagcagaagaatctcttgagcccggaaggcggaggttgcagtgagctgagatcgtgccactgcactccagcctgagtgacaggagttaagccctgtctcagaaaaaaaaaaaaacaaaaacccaaaaagtacttaaagtttcatttacttagctaggagaaagacttggttctcaaaataatacattttaagattaattgggtagaattagagttccacctttattcattgttgagcagtgatttatatttagttattatatttaggaatagaaaatagaattaaataatttaacttgattaatcaaccagaccaattttgacgtctggagaacttataaactcaatatgttatatttgttttcctgtatttaggtggagaaatgagaaaaagctttagttccaattgacagttcaggtcaatgttcaatgaacattcctatcttctaaaccagatttctctttttttttcctgagacggagtctcgctctgtagcctaggctggaatgtagtggcgtgatctcggctcactgcaagctccgcttcccgggttcatgccattctcctgcctcagcctcccgagtagctgggactgcaggcaccgccaccacgcctggctaattttttgtatttttagtagagaaggtgtttcaccgtgttggccaggatggtcttgatctcctgacatcgtgatctgtctgcctcggactcccaaagtgctgggattacaggtgtgagccaccgcacctggcctaaaccagatttctttagggcacaattttttctggaatctcactcttgtttttcacagtaattttaaaaacgtttctactccaattaagaatatatatgatgttattatatatgcttatgaaacagatttatgagaaaagttttttttaaataaattatttaatcctagctctttgttattcaccagctttttaaaaaagtgtttgaaaattatacattctcgactttggggattagtttattcttgtggcatcattataaggcttaattgtggaaagctaagtacttgcttctattccttccaatgagagattataacataaactattaaaattattctgctaatatacctagatttttatttttaggtctctgtccattgcttttaattaaaattatctgttttcaaatcaaa

SEQ ID NO: 333886 - DNA, 2324 bp, Homo sapiens
tgcgcgcagtttcccgcatgctcagtagctgaggtagggatgccatccttctcaaaagacttattgacagtgccaaagctcggtactggacacaacgagggacctgggtctacgataacgcgcttttgctcctcctgaagtgtctttggtccaacgttgttccagacctgtgcaacagacctgcagaccaaagctgaccgattggcacagatgagcatatgttcttcattggcccggaaattccccaaactcacaattataggggaagagctcgtggtctgggttgatcctctggatggaaccaaggaatataccgaaggtcttcttgacaatgtaacagttcttattggaattgcttatgaaggaaaagccatagcaggagttattaaccagccatattacaactatgagctatgctattaactgatgagaaacctttaaaaatacggattcccaggccataccccagacctactgaatcaaaatcgctgggggcattggtactgggcaggaccagatgctgtgttggggaggacaatctggggagttttaggtttaggcgcctttgggtttcagctgaaagaagtccctgctgggaaacacattatcacaactactcgatcccatagcaacaagttggttactgactgtgttgctgctatgaaccccgatgctgtgctgcgagtaggaggagcaggaaataagattattcagctgattgaaggcaaagcctctgcttatgtatttgcaagtcctggttgtaagaagtgggatacttgtgctccagaagttattttacatgctgtgggaggcaagttaaccgatatccatgggaatgttcttcagtaccacaaggatgtgaagcatatgaactctgcaggagtcctggccacactgaggaattatgactactatgcaagccgagttccagaatctattaaaaatgcacttgttccttaaaggaaagtttcatttggccgggcgcggtggctcatgcctgtaatcccagcactttgggaggccgaggcaggtggatcacttgagctcaggagtttgagaccagcctgggcaatatcgtgagaccccatctctacaaaaatacaaattaactgggcatcctgtcatgcgcctgtcatcccagctacttgagaggctgaagcagaagaatctcttgagcccggaaggcggaggttgcagtgagctgagatcgtgccactgcactccagcctgagtgacaggagttaagccctgtctcagaaaaaaaaaaaaacaaaaacccaaaaagtacttaaagtttcatttacttagctaggagaaagacttggttctcaaaataatacattttaagattaattgggtagaattagagttccacctttattcattgttgagcagtgatttatatttagttattatatttaggaatagaaaatagaattaaataatttaacttgattaatcaaccagaccaattttgacgtctggagaacttataaactcaatatgttatatttgttttcctgtatttaggtggagaaatgagaaaaagctttagttccaattgacagttcaggtcaatgttcaatgaacattcctatcttctaaaccagatttctctttttttttcctgagacggagtctcgctctgtagcctaggctggaatgtagtggcgtgatctcggctcactgcaagctccgcttcccgggttcatgccattctcctgcctcagcctcccgagtagctgggactgcaggcaccgccaccacgcctggctaattttttgtatttttagtagagaaggtgtttcaccgtgttggccaggatggtcttgatctcctgacatcgtgatctgtctgcctcggactcccaaagtgctgggattacaggtgtgagccaccgcacctggcctaaaccagatttctttagggcacaattttttctggaatctcactcttgtttttcacagtaattttaaaaacgtttctactccaattaagaatatatatgatgttattatatatgcttatgaaacagatttatgagaaaagttttttttaaataaattatttaatcctagctctttgttattcaccagctttttaaaaaagtgtttgaaaattatacattctcgactttggggattagtttattcttgtggcatcattataaggcttaattgtggaaagctaagtacttgcttctattccttccaatgagagattataacataaactattaaaattattctgctaatatacctagatttttatttttaggtctctgtccattgcttttaattaaaattatctgttttcaaatcaaa

SEQ ID NO: 333887 - DNA, 1564 bp, Homo sapiens
tgcgcgcagtttcccgcatgctcagtagctgaggtagggatgccatccttctcaaaagacttattgacagtgccaaagctcggtactggacacaacgagggacctgggtctacgataacgcgcttttgctcctcctgaagtgtctttggtccaacgttgttccagagtgtaccatggcttccagtaacactgtgttgatgcggttggtagcctccgcatattctattgctcaaaaggcaggaatgatagtcagacgtgttattgctgaaggagacctgggtattgtggagaagacctgtgcaacagacctgcagaccaaagctgaccgattggcacagatgagcatatgttcttcattggcccggaaattccccaaactcacaattataggggaagaggatctgccttctgaggaagtggatcaagagctgattgaagacagtcagtgggaagaaatactgaagcaaccatgcccatcgcagtacagtgctattaaagaagaagatctcgtggtctgggttgatcctctggatggaaccaaggaatataccgaaggtcttcttgacaatgtaacagttcttattggaattgcttatgaaggaaaagccatagcaggagttattaaccagccatattacaactatgaggcaggaccagatgctgtgttggggaggacaatctggggagttttaggtttaggcgcctttgggtttcagctgaaagaagtccctgctgggaaacacattatcacaactactcgatcccatagcaacaagttggttactgactgtgttgctgctatgaaccccgatgctgtgctgcgagtaggaggagcaggaaataagattattcagctgattgaaggcaaagcctctgcttatgtatttgcaagtcctggttgtaagaagtgggatacttgtgctccagaagttattttacatgctgtgggaggcaagttaaccgatatccatgggaatgttcttcagtaccacaaggatgtgaagcatatgaactctgcaggagtcctggccacactgaggaattatgactactatgcaagccgagttccagaatctattaaaaatgcacttgttccttaaaggaaagtttcatttgtgggattacaggtgtgagccaccgcacctggcctaaaccagatttctttagggcacaattttttctggaatctcactcttgtttttcacagtaattttaaaaacgtttctactccaattaagaatatatatgatgttattatatatgcttatgaaacagatttatgagaaaagttttttttaaataaattatttaatcctagctctttgttattcaccagctttttaaaaaagtgtttgaaaattatacattctcgactttggggattagtttattcttgtggcatcattataaggcttaattgtggaaagctaagtacttgcttctattccttccaatgagagattataacataaactattaaaattattctgctaatatacctagatttttatttttaggtctctgtccattgcttttaattaaaattatctgttttcaaatcaaa

SEQ ID NO: 333888 - DNA, 1491 bp, Homo sapiens
tgcgcgcagtttcccgcatgctcagtagctgaggtagggatgccatccttctcaaaagacttattgacagtgccaaagctcggtactggacacaacgagggacctgggtctacgataacgcgcttttgctcctcctgaagtgtctttggtccaacgttgttccagagtgtaccatggcttccagtaacactgtgttgatgcggttggtagcctccgcatattctattgctcaaaaggcaggaatgatagtcagacgtgttattgctgaaggagacctgggtattgtggagaagacctgtgcaacagacctgcagaccaaagctgaccgattggcacagatgagcatatgttcttcattggcccggaaattccccaaactcacaattataggggaagaggatctgccttctgaggaagtggatcaagagctgattgaagacagtcagtgggaagaaatactgaagcaaccatgcccatcgcagtacagtgctattaaagaagaagatctcgtggtctgggttgatcctctggatggaaccaaggaatataccgaaggtcttcttgacaatgtaacagttcttattggaattgcttatgaaggaaaagccatagcaggagttattaaccagccatattacaactatgagaacaatgaaaagcagcagttaagggaacacaggaatgaagcaaaggcaggaccagatgctgtgttggggaggacaatctggggagttttaggtttaggcgcctttgggtttcagctgaaagaagtccctgctgggaaacacattatcacaactactcgatcccatagcaacaagttggttactgactgtgttgctgctatgaaccccgatgctgtgctgcgagtaggaggagcaggaaataagattattcagctgattgaaggcaaagcctctgcttatgtatttgcaagtcctggttgtaagaagtgggatacttgtgctccagaagttattttacatgctgtgggaggcaagttaaccgatatccatgggaatgttcttcagtaccacaaggattgggattacaggtgtgagccaccgcacctggcctaaaccagatttctttagggcacaattttttctggaatctcactcttgtttttcacagtaattttaaaaacgtttctactccaattaagaatatatatgatgttattatatatgcttatgaaacagatttatgagaaaagttttttttaaataaattatttaatcctagctctttgttattcaccagctttttaaaaaagtgtttgaaaattatacattctcgactttggggattagtttattcttgtggcatcattataaggcttaattgtggaaagctaagtacttgcttctattccttccaatgagagattataacataaactattaaaattattctgctaatatacctagatttttatttttaggtctctgtccattgcttttaattaaaattatctgttttcaaatcaaa

SEQ ID NO: 333889 - DNA, 1056 bp, Homo sapiens
tgcgcgcagtttcccgcatgctcagtagctgaggtagggatgccatccttctcaaaagacttattgacagtgccaaagctcggtactggacacaacgagggacctgggtctacgataacgcgcttttgctcctcctgaagtgtctttggtccaacgttgttccagagtgtaccatggcttccagtaacactgtgttgatgcggttggtagcctccgcatattctattgctcaaaaggcaggaatgatagtcagacgtgttattgctgaaggagacctgggtattgtggagaagacctgtgcaacagacctgcagaccaaagctgaccgattggcacagatgagcatatgttcttcattggcccggaaattccccaaactcacaattataggggaagaggatctgccttctgaggaagtggatcaagagctgattgaagacagtcagtgggaagaaatactgaagcaaccatgcccatcgcagtacagtgctattaaagaagaagatctcgtggtctgggttgatcctctggatggaaccaaggaatataccgaaggtcttcttgacaatgtaacagttcttattggaattgcttatgaaggaaaagcctgggattacaggtgtgagccaccgcacctggcctaaaccagatttctttagggcacaattttttctggaatctcactcttgtttttcacagtaattttaaaaacgtttctactccaattaagaatatatatgatgttattatatatgcttatgaaacagatttatgagaaaagttttttttaaataaattatttaatcctagctctttgttattcaccagctttttaaaaaagtgtttgaaaattatacattctcgactttggggattagtttattcttgtggcatcattataaggcttaattgtggaaagctaagtacttgcttctattccttccaatgagagattataacataaactattaaaattattctgctaatatacctagatttttatttttaggtctctgtccattgcttttaattaaaattatctgttttcaaatcaaa

SEQ ID NO: 333890 - DNA, 435 bp, Homo sapiens
acgagggacctgggtctacgataacgcgcttttgctcctcctgaagtgtctttggtccaacgttgttccaggtttgtcaccgtttctctccggccggtcagggcaagagccaggtagataggatttatgttaaaaaaataaaacgaaaaaggtttatgtgaatcagattgcttctccagatattctaacttccgacttggactcttgagtgtcgatattttaattgtttatctgtgcttttattttcgtgatccggaaggtttttatagccatatactgtagaaacaagacaaacctagacattgagtttgttgatgcacccaaatttagaaactgcttggtacctaaaattaaatttctttaaacagcaaatattcttccaactgccatttctacatatttataggtttgcgtgatttatttggatttctctgt

SEQ ID NO: 333891 - DNA, 1037 bp, Homo sapiens
tgcgcgcagtttcccgcatgctcagtagctgaggtagggatgccatccttctcaaaagacttattgacagtgccaaagctcggtactggacacaacgagggacctgggtctacgataacgcgcttttgctcctcctgaagtgtctttggtccaacgttgttccagacctgtgcaacagacctgcagaccaaagctgaccgattggcacagatgagcatatgttcttcattggcccggaaattccccaaactcacaattataggggaagaggatctgccttctgaggaagtggatcaagagctgattgaagacagtcagtgggaagaaatactgaagcaaccatgcccatcgcagtacagtgctattaaagaagaagatctcgtggtctgggttgatcctctggatggaaccaaggaatataccgaaggtcttcttgacaatgtaacagttcttattggaattgcttatgaaggaaaagccatagcaggagttattaaccagccatattacaactatgaggcaggaccagatgctgtgttggggaggacaatctggggagttttaggtttaggcgcctttgggtttcagctgaaagaagtccctgctgggaaacacattatcacaactactcgatcccatagcaacaagttggttactgactgtgttgctgctatgaaccccgatgctgtgctgcgagtaggaggagcaggaaataagattattcagctgattgaaggcaaagcctctgcttatgtatttgcaagtcctggttgtaagaagtgggatacttgtgctccagaagttattttacatgctgtgggaggcaagttaaccgatatccaggatgtcctcgtacacaggtggaagcattgactgagggtctggccatggaatccatctgtttccaggataaacttcatcctaaatattaggttattgtgaagcgctggcagtctatttcgcaaaaaaaaaatggggcgataaaggcgggagagagataaccatgtaccgcaggaacactccacacttaaaaaaag

SEQ ID NO: 333892 - DNA, 2464 bp, Homo sapiens
tgcgcgcagtttcccgcatgctcagtagctgaggtagggatgccatccttctcaaaagacttattgacagtgccaaagctcggtactggacacaacgagggacctgggtctacgataacgcgcttttgctcctcctgaagtgtctttggtccaacgttgttccagagtgtaccatggcttccagtaacactgtgttgatgcggttggtagcctccgcatattctattgctcaaaaggcaggaatgatagtcagacgtgttattgctgaaggagacctgggtattgtggagaagacctgtgcaacagacctgcagaccaaagctgaccgattggcacagatgagcatatgttcttcattggcccggaaattccccaaactcacaattataggggaagaggatctgccttctgaggaagtggatcaagagctgattgaagacagtcagtgggaagaaatactgaagcaaccatgcccatcgcagtacagtgctattaaagaagaagatctcgtggtctgggttgatcctctggatggaaccaaggaatataccgaaggtcttcttgacaatgtaacagttcttattggaattgcttatgaaggaaaagccatagcaggagttattaaccagccatattacaactatgaggcaggaccagatgctgtgttggggaggacaatctggggagttttaggtttaggcgcctttgggtttcagctgaaagaagtccctgctgggaaacacattatcacaactactcgatcccatagcaacaagttggttactgactgtgttgctgctatgaaccccgatgctgtgctgcgagtaggaggagcaggaaataagattattcagctgattgaaggcaaagcctctgcttatgtatttgcaagtcctggttgtaagaagtgggatacttgtgctccagaagttattttacatgctgtgggaggcaagttaaccgatatccatgggaatgttcttcagtaccacaaggatgtgaagcatatgaactctgcaggagtcctggccacactgaggaattatgactactatgcaagccgagttccagaatctattaaaaatgcacttgttccttaaaggaaagtttcatttggccgggcgcggtggctcatgcctgtaatcccagcactttgggaggccgaggcaggtggatcacttgagctcaggagtttgagaccagcctgggcaatatcgtgagaccccatctctacaaaaatacaaattaactgggcatcctgtcatgcgcctgtcatcccagctacttgagaggctgaagcagaagaatctcttgagcccggaaggcggaggttgcagtgagctgagatcgtgccactgcactccagcctgagtgacaggagttaagccctgtctcagaaaaaaaaaaaaacaaaaacccaaaaagtacttaaagtttcatttacttagctaggagaaagacttggttctcaaaataatacattttaagattaattgggtagaattagagttccacctttattcattgttgagcagtgatttatatttagttattatatttaggaatagaaaatagaattaaataatttaacttgattaatcaaccagaccaattttgacgtctggagaacttataaactcaatatgttatatttgttttcctgtatttaggtggagaaatgagaaaaagctttagttccaattgacagttcaggtcaatgttcaatgaacattcctatcttctaaaccagatttctctttttttttcctgagacggagtctcgctctgtagcctaggctggaatgtagtggcgtgatctcggctcactgcaagctccgcttcccgggttcatgccattctcctgcctcagcctcccgagtagctgggactgcaggcaccgccaccacgcctggctaattttttgtatttttagtagagaaggtgtttcaccgtgttggccaggatggtcttgatctcctgacatcgtgatctgtctgcctcggactcccaaagtgctgggattacaggtgtgagccaccgcacctggcctaaaccagatttctttagggcacaattttttctggaatctcactcttgtttttcacagtaattttaaaaacgtttctactccaattaagaatatatatgatgttattatatatgcttatgaaacagatttatgagaaaagttttttttaaataaattatttaatcctagctctttgttattcaccagctttttaaaaaagtgtttgaaaattatacattctcgactttggggattagtttattcttgtggcatcattataaggcttaattgtggaaagctaagtacttgcttctattccttccaatgagagattataacataaactattaaaattattctgctaatatacctagatttttatttttaggtctctgtccattgcttttaattaaaattatctgttttcaaatcaaa

SEQ ID NO: 333893 - DNA, 2216 bp, Homo sapiens
tgcgcgcagtttcccgcatgctcagtagctgaggtagggatgccatccttctcaaaagacttattgacagtgccaaagctcggtactggacacaacgagggacctgggtctacgataacgcgcttttgctcctcctgaagtgtctttggtccaacgttgttccagagtgtaccatggcttccagtaacactgtgttgatgcggttggtagcctccgcatattctattgctcaaaaggcaggaatgatagtcagacgtgttattgctgaaggagacctgggtattgtggagaagacctgtgcaacagacctgcagaccaaagctgaccgattggcacagatgagcatatgttcttcattggcccggaaattccccaaactcacaattataggggaagaggatctgccttctgaggaagtggatcaagagctgattgaagacagtcagtgggaagaaatactgaagcaaccatgcccatcgcagtacagtgctattaaagaagaagatctcgtggtctgggttgatcctctggatggaaccaaggaatataccgaaggtcttcttgacaatgtaacagttcttattggaattgcttatgaaggaaaagccatagcaggagttattaaccagccatattacaactatgaggcaggaccagatgctgtgttggggaggacaatctggggagttttaggtttaggcgcctttgggtttcagctgaaagaagtccctgctgggaaacacattatcacaactactcgatcccatagcaacaagttggttactgactgtgttgctgctatgaaccccgatgctgtgctgcgagtaggaggagcaggaaataagattattcagctgattgaaggcaaagcctctgcttatgtatttgcaagtcctggttgtaagaagtgggatacttgtgctccagaagttattttacatgctgtgggaggcaagttaaccgatatccatgggaatgttcttcagtaccacaaggatgtgaagcatatgaactctgcaggagtcctggccacactgaggaattatgactactatgcaagccgagttccagaatctattaaaaatgcacttgttccttaaaggaaagtttcatttggccgggcgcggtggctcatgcctgtaatcccagcactttgggaggccgaggcaggtggatcacttgagctcaggagtttgagaccagcctgggcaatatcgtgagaccccatctctacaaaaatacaaattaactgggcatcctgtcatgcgcctgtcatcccagctacttgagaggctgaagcagaagaatctcttgagcccggaaggcggaggttgcagtgagctgagatcgtgccactgcactccagcctgagtgacaggagttaagccctgtctcagaaaaaaaaaaaaacaaaaacccaaaaagtacttaaagtttcatttacttagctaggagaaagacttggttctcaaaataatacattttaagattaattgggtagaattagagttccacctttattcattgttgagcagtgatttatatttagttattatatttaggaatagaaaatagaattaaataatttaacttgattaatcaaccagaccaattttgacgtctggagaacttataaactcaatatgttatatttgttttcctgtatttaggtggagaaatgagaaaaagctttagttccaattgacagttcaggtcaatgttcaatgaacattcctatcttctaaaccagatttctctttttttttcctgagacggagtctcgctctgtagcctaggctggaatgtagtggcgtgatctcggctcactgcaagctccgcttcccgggttcatgccattctcctgcctcagcctcccgagtagctgggactgcaggcaccgccaccacgcctggctaattttttgtatttttagtagagaaggtgtttcaccgtgttggccaggatggtcttgatctcctgacatcgtgatctgtctgcctcggactcccaaagtgctgggattacaggtgtgagccaccgcacctggcctaaaccagatttctttagggcacaattttttctggaatctcactcttgtttttcacagtaattttaaaaacgtttctactccaattaagaatatatatgatgttattatatatgcttatgaaacagatttatgagaaaagttttttttaaataaattatttaatcct

SEQ ID NO: 333894 - DNA, 2266 bp, Homo sapiens
tgcgcgcagtttcccgcatgctcagtagctgaggtagggatgccatccttctcaaaagacttattgacagtgccaaagctcggtactggacacaacgagggacctgggtctacgataacgcgcttttgctcctcctgaagtgtctttggtccaacgttgttccagagtgtaccatggcttccagtaacactgtgttgatgcggttggtagcctccgcatattctattgctcaaaaggcaggaatgatagtcagacgtgttattgctgaaggagacctgggtattgtggagaagacctgtgcaacagacctgcagaccaaagctgaccgattggcacagatgagcatatgttcttcattggcccggaaattccccaaactcacaattataggggaagaggatctgccttctgaggaagtggatcaagagctgattgaagacagtcagtgggaagaaatactgaagcaaccatgcccatcgcagtacagtgctattaaagaagaagatctcgtggtctgggttgatcctctggatggaaccaaggaatataccgaaggtcttcttgacaatgtaacagttcttattggaattgcttatgaaggaaaagccatagcaggagttattaaccagccatattacaactatgagattattcagctgattgaaggcaaagcctctgcttatgtatttgcaagtcctggttgtaagaagtgggatacttgtgctccagaagttattttacatgctgtgggaggcaagttaaccgatatccatgggaatgttcttcagtaccacaaggatgtgaagcatatgaactctgcaggagtcctggccacactgaggaattatgactactatgcaagccgagttccagaatctattaaaaatgcacttgttccttaaaggaaagtttcatttggccgggcgcggtggctcatgcctgtaatcccagcactttgggaggccgaggcaggtggatcacttgagctcaggagtttgagaccagcctgggcaatatcgtgagaccccatctctacaaaaatacaaattaactgggcatcctgtcatgcgcctgtcatcccagctacttgagaggctgaagcagaagaatctcttgagcccggaaggcggaggttgcagtgagctgagatcgtgccactgcactccagcctgagtgacaggagttaagccctgtctcagaaaaaaaaaaaaacaaaaacccaaaaagtacttaaagtttcatttacttagctaggagaaagacttggttctcaaaataatacattttaagattaattgggtagaattagagttccacctttattcattgttgagcagtgatttatatttagttattatatttaggaatagaaaatagaattaaataatttaacttgattaatcaaccagaccaattttgacgtctggagaacttataaactcaatatgttatatttgttttcctgtatttaggtggagaaatgagaaaaagctttagttccaattgacagttcaggtcaatgttcaatgaacattcctatcttctaaaccagatttctctttttttttcctgagacggagtctcgctctgtagcctaggctggaatgtagtggcgtgatctcggctcactgcaagctccgcttcccgggttcatgccattctcctgcctcagcctcccgagtagctgggactgcaggcaccgccaccacgcctggctaattttttgtatttttagtagagaaggtgtttcaccgtgttggccaggatggtcttgatctcctgacatcgtgatctgtctgcctcggactcccaaagtgctgggattacaggtgtgagccaccgcacctggcctaaaccagatttctttagggcacaattttttctggaatctcactcttgtttttcacagtaattttaaaaacgtttctactccaattaagaatatatatgatgttattatatatgcttatgaaacagatttatgagaaaagttttttttaaataaattatttaatcctagctctttgttattcaccagctttttaaaaaagtgtttgaaaattatacattctcgactttggggattagtttattcttgtggcatcattataaggcttaattgtggaaagctaagtacttgcttctattccttccaatgagagattataacataaactattaaaattattctgctaatatacctagatttttatttttaggtctctgtccattgcttttaattaaaattatctgttttcaaatcaaa

SEQ ID NO: 333895 - DNA, 2308 bp, Homo sapiens
tgcgcgcagtttcccgcatgctcagtagctgaggtagggatgccatccttctcaaaagacttattgacagtgccaaagctcggtactggacacaacgagggacctgggtctacgataacgcgcttttgctcctcctgaagtgtctttggtccaacgttgttccaggtttgtcaccgtttctctccggccggtcagggcaagagccagagtgtaccatggcttccagtaacactgtgttgatgcggttggtagcctccgcatattctattgctcaaaaggcaggaatgatagtcagacgtgttattgctgaaggagacctgggtattgtggagaagacctgtgcaacagacctgcagaccaaagctgaccgattggcacagatgagcatatgttcttcattggcccggaaattccccaaactcacaattataggggaagaggatctgccttctgaggaagtggatcaagagctgattgaagacagtcagtgggaagaaatactgaagcaaccatgcccatcgcagtacagtgctattaaagaagaagatctcgtggtctgggttgatcctctggatggaaccaaggaatataccgaaggtcttcttgacaatgtaacagttcttattggaattgcttatgaaggaaaagccatagcaggagttattaaccagccatattacaactatgagattattcagctgattgaaggcaaagcctctgcttatgtatttgcaagtcctggttgtaagaagtgggatacttgtgctccagaagttattttacatgctgtgggaggcaagttaaccgatatccatgggaatgttcttcagtaccacaaggatgtgaagcatatgaactctgcaggagtcctggccacactgaggaattatgactactatgcaagccgagttccagaatctattaaaaatgcacttgttccttaaaggaaagtttcatttggccgggcgcggtggctcatgcctgtaatcccagcactttgggaggccgaggcaggtggatcacttgagctcaggagtttgagaccagcctgggcaatatcgtgagaccccatctctacaaaaatacaaattaactgggcatcctgtcatgcgcctgtcatcccagctacttgagaggctgaagcagaagaatctcttgagcccggaaggcggaggttgcagtgagctgagatcgtgccactgcactccagcctgagtgacaggagttaagccctgtctcagaaaaaaaaaaaaacaaaaacccaaaaagtacttaaagtttcatttacttagctaggagaaagacttggttctcaaaataatacattttaagattaattgggtagaattagagttccacctttattcattgttgagcagtgatttatatttagttattatatttaggaatagaaaatagaattaaataatttaacttgattaatcaaccagaccaattttgacgtctggagaacttataaactcaatatgttatatttgttttcctgtatttaggtggagaaatgagaaaaagctttagttccaattgacagttcaggtcaatgttcaatgaacattcctatcttctaaaccagatttctctttttttttcctgagacggagtctcgctctgtagcctaggctggaatgtagtggcgtgatctcggctcactgcaagctccgcttcccgggttcatgccattctcctgcctcagcctcccgagtagctgggactgcaggcaccgccaccacgcctggctaattttttgtatttttagtagagaaggtgtttcaccgtgttggccaggatggtcttgatctcctgacatcgtgatctgtctgcctcggactcccaaagtgctgggattacaggtgtgagccaccgcacctggcctaaaccagatttctttagggcacaattttttctggaatctcactcttgtttttcacagtaattttaaaaacgtttctactccaattaagaatatatatgatgttattatatatgcttatgaaacagatttatgagaaaagttttttttaaataaattatttaatcctagctctttgttattcaccagctttttaaaaaagtgtttgaaaattatacattctcgactttggggattagtttattcttgtggcatcattataaggcttaattgtggaaagctaagtacttgcttctattccttccaatgagagattataacataaactattaaaattattctgctaatatacctagatttttatttttaggtctctgtccattgcttttaattaaaattatctgttttcaaatcaaa

SEQ ID NO: 333896 - DNA, 1165 bp, Homo sapiens
tgcgcgcagtttcccgcatgctcagtagctgaggtagggatgccatccttctcaaaagacttattgacagtgccaaagctcggtactggacacaacgagggacctgggtctacgataacgcgcttttgctcctcctgaagtgtctttggtccaacgttgttccagagtgtaccatggcttccagtaacactgtgttgatgcggttggtagcctccgcatattctattgctcaaaaggcaggaatgatagtcagacgtgttattgctgaaggagacctgggtattgtggagaagacctgtgcaacagacctgcagaccaaagctgaccgattggcacagatgagcatatgttcttcattggcccggaaattccccaaactcacaattataggggaagaggatctgccttctgaggaagtggatcaagagctgattgaagacagtcagtgggaagaaatactgaagcaaccatgcccatcgcagtacagtgctattaaagaagaagatctcgtggtctgggttgatcctctggatggaaccaaggaatataccgaaggtcttcttgacaatgtaacagttcttattggaattgcttatgaaggaaaagccatagcaggagttattaaccagccatattacaactatgaggcaggaccagatgctgtgttggggaggacaatctggggagttttaggtttaggcgcctttgggtttcagctgaaagaagtccctgctgggaaacacattatcacaactactcgatcccatagcaacaagttggttactgactgtgttgctgctatgaaccccgatgctgtgctgcgagtaggaggagcaggaaataagattattcagctgattgaaggcaaagcctctgcttatgtatttgcaagtcctggttgtaagaagtgggatacttgtgctccagaagttattttacatgctgtgggaggcaagttaaccgatatccaggatgtcctcgtacacaggtggaagcattgactgagggtctggccatggaatccatctgtttccaggataaacttcatcctaaatattaggttattgtgaagcgctggcagtctatttcgcaaaaaaaaaatggggcgataaaggcgggagagagataaccatgtaccgcaggaacactccacacttaaaaaaag

SEQ ID NO: 333897 - DNA, 811 bp, Homo sapiens
tcattccaagtcgctgctgtgcagagcagcaagtgctccgtgcagggctgttgctatcacttggaggtgaacagcctcttttgccggtattcagtgaagaaagcaagtctaaatatgcagttctctcactggagtgaaagatgttttgttcatttctaatcaactatgctagacagctgcaagctgaaaagtgcctgcaatttgccatttatttgtaataagaaaataataaacactgctggaaccagtaatgcagaagtccccttggctgatcccggaatgtaccagctggacattacattaagaaggggtcaaagtttagctgctcgagatcgaggagattgtcccgctattacaattcctctagaaaatactctcagaagaaaggcacgatggctcacacctgtaatccaagcactttgggaagctgaggtgggaggattgcttgaggccagaagttagagaccagcctgggcaacacagcaacatcccatctctacaaattaaaaataattttgtttttttaaaaaaatgaaaatactctttgatatggtttggctatgtccccacccaaacctcatcttgaattatagttcccataatccccacttgtcatgggagggagcaggtggagatagttgaatcatgggggtggtttcccccatccagttctcatgatatgagttagttctcgcaagatctgatagttttagaaggggcttccccctctgctggactctcattctctctctcctgccaccctgtgaagaggtgccttctgccataattgtaagttatctgagacctcccc

SEQ ID NO: 333898 - DNA, 703 bp, Homo sapiens
tcattccaagtcgctgctgtgcagagcagcaagtgctccgtgcagggctgttgctatcacttggaggtgaacagcctcttttgccggtattcagtgaagaaagcaagtctaaatatgcagttctctcactggagtgaaagatgttttgttcatttctaatcaactatgctagacagctgcaagctgaaaagtgcctgcaatttgccatttatttgtaataaggtaagtaacattttggtttactcactggattgtggtagccttaaattaatgtggcagtttaggtatatgattgttccttagaaaaatgccttctcacggggtattgaaggttgcatttgagattctaatacagataatttttaatttacagtataacctacttgtgagatacatagtgtaatacattgatattccttttatgatcattttttatgaaaaatatagtgcctgagaaatggaaacattgtggtagctttatattggtttgttttttttgttttgttttgttttcttgaaggatttagtagttaccaggttcttagtttcttatatttcttttgctaccctctgatctcagttaaaggtgaaacatatatcagatttatatgattatctttgaataattatagctcaatcattatatttttcaattgaaataaaaagtagtcttagtaattattagaaaatttaaagtggaaaa

SEQ ID NO: 333899 - DNA, 1731 bp, Homo sapiens
tcattccaagtcgctgctgtgcagagcagcaagtgctccgtgcagggctgttgctatcacttggaggtgaacagcctcttttgccggtattcagtgaagaaagcaagtctaaatatgcagttctctcactggagtgaaagatgttttgttcatttctaatcaactatgctagacagctgcaagctgaaaagtgcctgcaatttgccatttatttgtaataagaaaataataaacactgctggaaccagtaatgcagaagtccccttggctgatcccggaatgtaccagctggacattacattaagaaggggtcaaagtttagctgctcgagatcgaggagggacgagtgatccatatgtgaagtttaaaatcggaggaaaagaagtttttagaagtaagataatacacaagaacctcaaccctgtgtgggaagaaaaagcttgtattctggttgatcatcttagggagccattgtatataaaggtatttgactatgattttggactacaggatgactttatgggctcagcctttctggatctgacacaattggagttaaacaggcccacagatgtgacccttactctgaaagatcctcattatcctgaccatgatcttggaatcattttgctctcagtcatccttacccctaaagaaggagagtccagggatgtgacaatgctaatgaggaagagttggaaaagatcaagtaaggaactttcagaaaatgaagtggttggatcttatttctctgtgaagtctctcttttggaggacgtgcggcaggccagctcttcctgtcctgggcttctgcagagcagagcttcagaatccttattgcaaaaatgtacaatttcagacccaaagtttacgcctatcagacctacacagaaaatcgcatctttggagaggaatagtcagcatcaccttgattgaagggagagacctcaaggccatggattccaacgggttgagcgatccctacgtgaagttccggcttgggcatcagaagtacaagagcaagattatgccaaaaacgttgaatcctcagtggagggaacaatttgattttcacctttatgaagaaagaggaggagtcattgatatcactgcatgggacaaagatgctgggaaaagggatgatttcattggcaggtgccaggtcgacctgtcagccctcagtagggaacagacgcacaagctggagttgcagctggaagagggtgagggacacctggtgctgctggtcactctgacagcatcagccacagtcagcatctctgacctgtctgtcaactccctggaggaccagaaggaacgagaggagatattaaagagatataatcgatgtgtcactggcctaaaccgttgaaatttgcaataaattatggagtgtcagctgacttggggaaatgaaaccttcaaacaataattaccactccaaatgggaagcagaggatcagagccgaagcacctgaagacaatatgtctgtggaatgaggctaccaatgtgaaaggattctcagacataaggactgattatattcgtcttagtcaaaatagaacttgatttaaattgcctctgaaaattaaagcacggaaacctttttttgataaaactattccccatcattagggtcgaagacttacctgatttacaacattgtgtaagctctgagataagaaactttccaaacttgctgttactgtaggaacacaacgtgcccacaaa

SEQ ID NO: 333900 - DNA, 1812 bp, Homo sapiens
  misc_feature (1812)..(1812): n is a, c, g, or t
tcattccaagtcgctgctgtgcagagcagcaagtgctccgtgcagggctgttgctatcacttggaggtgaacagcctcttttgccggtattcagtgaagaaagcaagtctaaatatgcagttctctcactggagtgaaagatgttttgttcatttctaatcaactatgctagacagctgcaagctgaaaagtgcctgcaatttgccatttatttgtaataagaaaataataaacactgctggaaccagtaatgcagaagtccccttggctgatcccggaatgtaccagctggacattacattaagaaggggtcaaagtttagctgctcgagatcgaggagggacgagtgatccatatgtgaagtttaaaatcggaggaaaagaagtttttagaagtaagataatacacaagaacctcaaccctgtgtgggaagaaaaagcttgtattctggttgatcatcttagggagccattgtatataaaggtatttgactatgattttggactacaggatgactttatgggctcagcctttctggatctgacacaattggagttaaacaggcccacagatgtgacccttactctgaaagatcctcattatcctgaccatgatcttggaatcattttgctctcagtcatccttacccctaaagaaggagagtccagggatgtgacaatgctaatgaggaagagttggaaaagatcaagtaaggaactttcagaaaatgaagtggttggatcttatttctctgtgaagtctctcttttggaggacgtgcggcaggccagctcttcctgtcctgggcttctgcagagcagagcttcagaatccttattgcaaaaatgtacaatttcagacccaaagtttacgcctatcagacctacacagaaaatcgcatctttggagaggaatagtcagcatcaccttgattgaagggagagacctcaaggccatggattccaacgggttgagcgatccctacgtgaagttccggcttgggcatcagaagtacaagagcaagattatgccaaaaacgttgaatcctcagtggagggaacaatttgattttcacctttatgaagaaagaggaggagtcattgatatcactgcatgggacaaagatgctgggaaaagggatgatttcattggcaggtgccaggtcgacctgtcagccctcagtagggaacagacgcacaagctggagttgcagctggaagagggtgagggacacctggtgctgctggtcactctgacagcatcagccacagtcagcatctctgacctgtctgtcaactccctggaggaccagaaggaacgagaggagatattaaagagatatagcccattgaggatatttcacaacctgaaagatgtgggatttctccaggtgaaagtcatcagagcggaagggttaatggctgccgacgtcactggaaaaagtggaccattttgtgtggccaccggaacacgaagacggaaacccatcggtcacaaaatcaatcgaagggaaaaagtctcaggctacattgaaggaatctcctcacaccctggaagcgggacgacaaccacagcacaaaggcaccaaactgctgcatcagcgcagcaccacaacatcaggggcacatcacaggggatacaacaccaggaaaacaagacaacgagcacaagggcactcaacaaaagaacacaggacgagacacgacagacaccgacacgcagacgaaccactccatacaccacacaaggcgacgcaaccaaagacacacccgccgtcccgcgcccccccctcaccccgtccccacaccccgcn

SEQ ID NO: 333901 - DNA, 1357 bp, Homo sapiens
attttttatatttcgtgttttccagaaaataataaacactgctggaaccagtaatgcagaagtccccttggctgatcccggaatgtaccagctggacattacattaagaaggggtcaaagtttagctgctcgagatcgaggagggacgagtgatccatatgtgaagtttaaaatcggaggaaaagaagtttttagaagtaagataatacacaagaacctcaaccctgtgtgggaagaaaaagcttgtattctggttgatcatcttagggagccattgtatataaaggtatttgactatgattttggactacaggatgactttatgggctcagcctttctggatctgacacaattggagttaaacaggcccacagatgtgacccttactctgaaagatcctcattatcctgaccatgatcttggaatcattttgctctcagtcatccttacccctaaagaaggagagtccagggatgtgtttcagacccaaagtttacgcctatcagacctacacagaaaatcgcatctttggagaggaatagtcagcatcaccttgattgaagggagagacctcaaggccatggattccaacgggttgagcgatccctacgtgaagttccggcttgggcatcagaagtacaagagcaagattatgccaaaaacgttgaatcctcagtggagggaacaatttgattttcacctttatgaagaaagaggaggagtcattgatatcactgcatgggacaaagatgctgggaaaagggatgatttcattggcaggtgccaggtcgacctgtcagccctcagtagggaacagacgcacaagctggagttgcagctggaagagggtgagggacacctggtgctgctggtcactctgacagcatcagccacagtcagcatctctgacctgtctgtcaactccctggaggaccagaaggaacgagaggagatattaaagagatataatcgatgtgtcactggcctaaaccgttgaaatttgcaataaattatggagtgtcagctgacttggggaaatgaaaccttcaaacaataattaccactccaaatgggaagcagaggatcagagccgaagcacctgaagacaatatgtctgtggaatgaggctaccaatgtgaaaggattctcagacataaggactgattatattcgtcttagtcaaaatagaacttgatttaaattgcctctgaaaattaaagcacggaaacctttttttgataaaactattccccatcattagggtcgaagacttacctgatttacaacattgtgtaagctctgagataagaaactttccaaacttgctgttactgtaggaacacaacgtgcccacaaa

SEQ ID NO: 333902 - DNA, 1674 bp, Homo sapiens
  misc_feature (1674)..(1674): n is a, c, g, or t
tcattccaagtcgctgctgtgcagagcagcaagtgctccgtgcagggctgttgctatcacttggaggtgaacagcctcttttgccggtattcagtgaagaaagcaagtctaaatatgcagttctctcactggagtgaaagatgttttgttcatttctaatcaactatgctagacagctgcaagctgaaaagtgcctgcaatttgccatttatttgtaataagaaaataataaacactgctggaaccagtaatgcagaagtccccttggctgatcccggaatgtaccagctggacattacattaagaaggggtcaaagtttagctgctcgagatcgaggagggacgagtgatccatatgtgaagtttaaaatcggaggaaaagaagtttttagaagtaagataatacacaagaacctcaaccctgtgtgggaagaaaaagcttgtattctggttgatcatcttagggagccattgtatataaaggtatttgactatgattttggactacaggatgactttatgggctcagcctttctggatctgacacaattggagttaaacaggcccacagatgtgacccttactctgaaagatcctcattatcctgaccatgatcttggaatcattttgctctcagtcatccttacccctaaagaaggagagtccagggatgtgacaatgctaatgaggaagagttggaaaagatcaagtaagtttcagacccaaagtttacgcctatcagacctacacagaaaatcgcatctttggagaggaatagtcagcatcaccttgattgaagggagagacctcaaggccatggattccaacgggttgagcgatccctacgtgaagttccggcttgggcatcagaagtacaagagcaagattatgccaaaaacgttgaatcctcagtggagggaacaatttgattttcacctttatgaagaaagaggaggagtcattgatatcactgcatgggacaaagatgctgggaaaagggatgatttcattggcaggtgccaggtcgacctgtcagccctcagtagggaacagacgcacaagctggagttgcagctggaagagggtgagggacacctggtgctgctggtcactctgacagcatcagccacagtcagcatctctgacctgtctgtcaactccctggaggaccagaaggaacgagaggagatattaaagagatatagcccattgaggatatttcacaacctgaaagatgtgggatttctccaggtgaaagtcatcagagcggaagggttaatggctgccgacgtcactggaaaaagtggaccattttgtgtggccaccggaacacgaagacggaaacccatcggtcacaaaatcaatcgaagggaaaaagtctcaggctacattgaaggaatctcctcacaccctggaagcgggacgacaaccacagcacaaaggcaccaaactgctgcatcagcgcagcaccacaacatcaggggcacatcacaggggatacaacaccaggaaaacaagacaacgagcacaagggcactcaacaaaagaacacaggacgagacacgacagacaccgacacgcagacgaaccactccatacaccacacaaggcgacgcaaccaaagacacacccgccgtcccgcgcccccccctcaccccgtccccacaccccgcn

SEQ ID NO: 333903 - DNA, 176 bp, Homo sapiens
ctcactgggagctgggctgtctgccttgcactgctgaatttctgtccctcagcctggcacttggcacacagtaggtcttccctaggggtttgctcaaagatttaatgaattcatggaacctctccccttcctgcttcttcacctgaccagctcggacccttcctttcgttttcagc

SEQ ID NO: 333904 - DNA, 469 bp, Homo sapiens
gagatggaatctattcctggtgaagatgctgtgaaagttgttgaaatgacaacaaaggattgagaatattctgtaagcttcactgataaaggaactagcagggttggagatggtaaaatgctatcaagcagcatcacatgctacagagaaatattttgtgaaaggaagacttaatgcatcaaacttcattgttgtcttattttaggaaattgtcacagacaccccaacctttaccaaccaccaccccagtgagtcagcagccactaacatgaatgcaagaccctctaccaatagaaagattatgacttgttgaaagactcagatggttattaatacgttttagcggtaaagtatttttaaattatgtacattgttttttggacataatgctatcacacacttaataaactaagctacaatgtaaacttagttttaaacatttttttaaattattattatttttttgaga

SEQ ID NO: 333905 - DNA, 641 bp, Homo sapiens
tggtgtcagcaaggtccctgccctgagtgtcactgcccctgggcagctgacctggcccacgccacttcctcccacaccactgcctccttaccctgctttatgaagttttcttggcccttctcagtgccctaaatgaaatattcatgacttagttggcatctccgtggcaacctggccttgtgcccttgtgccctaggatgttccagctcctcacaaatactggcacagaggggacattccttgaacagtgaatgccactggacagcctcgaagtcagcgaggatgctgggaggccatcccagaggggatccgatgggaccttggtctaggggcccttgaagggtcttcaccaacctcagcttctacgactgtaaaagcaactcaaacagaactgtactgtgcatgcctggaggtccccaaacctcccgttaaaatgaccaacacatgggaggacagctcttgtggctgccccaaagagacggagacatcctcaatatgaaaaccacgtgccccactctgctcccacatggcgtgcaacatgccccacaccacccagagcagggagggaccctggctgactctggagaggctgctctgaggcccaagtcaacaagaggctatggctgtgcagaaggaacagc

SEQ ID NO: 333906 - DNA, 872 bp, Homo sapiens
tgttatcctaaggtggaatatctcaaacgcaaaatcaaataccacatgatctcacctataagtgaagctaaacaatgggtacacataaacataaagacagaaataataggtactgaaaagtacctataagggttgaaaaattacctattgggtacaatgctcactattgtagatgggtacactagaagctcaaatctcaccattacataatatatccatgtaataaacatgcacatgtacccccaaatataaaataatactaaaaataagtgaacaaaaccattttcattgaaaaataagagggcttaaacaagttctagaagttgaataaagtcaacttaaaaggtaagaaaagagtacgaagaaaaaaaaataatccattcaaaaggttttataatagaaggaggagggagataatcaggggataaaacacaccttagtttacatgtcgtatcttgagatgttaacctcataaccatgtgccaaatctgaatcatcactcagctggtaacatcatcatatggtaatggcaggtcagtgccgttcaaaatatttaataatgtttgaccacattccagataccttaagattccaatttaaaactgctgaccacaaaaaaaaaaaaaagaaagacaagcagagaaacacactgagccctagagcaccactgcctcctaggaagggaactcaagggagactccagagtttggtcacgtctccagtctgccactgactagctgttttgactccctctgagcaccagatttctcagctttaaaaatgcaggattaaattagttgttatccttaggtgtaccttcctatttttaaattacacatggtaacctaaggatacacgtccgcgagggtccg

SEQ ID NO: 333907 - DNA, 289 bp, Homo sapiens
cctgtaacctattgtttttttcctctggaagttttcaggttttttgtcttgtcctcagcgttttgaaatttcagcaatgtgccttggtatgggtctcttttttccattgtggctttttgtctggaaactcactggccatcaattctgaaaatttaccttctactcatttcatttcttgccctctgttttttatgttgccccttccagaactcctgttacatatatgttggttctcctagaccaatggtctaacgtccatatcattttctcccccccccccaccccctcg

SEQ ID NO: 333908 - DNA, 1867 bp, Homo sapiens
ggcaaaaagtaactgcatctgggcactcttcactctttgccccatagttggaagttaccgctatgtgactctttacctattttcaattaaaattatctttagatttttatttgagtctttaaccctcttaataatttttatagttcctctctactaagcctttttaagttctttatattgttcttaaatgatggaaccttatgactaatgataatcactgtctgaacagtgttgaactatactgggtgcagcatgaccatgaaggctctgggtgaagtcaaggtcacaaactgcttttaaggtcattaggtcataatctcagactcacaaagaactcaaaattggggagacaccactttagattactccaaaactctgggcctgtacttacccactaatttatcaagaggaatcaatatttttattttaaatatgaaactgggataaatgattggatctccacttattaaccagtactgcagtgtgtttatatccttttgtgtggtaggttggataggatttgtaaagctactgattgatctcatgggccagggttcaccaaaaggatgggaatttgtttctgcattcttacatattgggttgcatattccttcataatggatccataagtaactaaggccttggagactaacagttctccaaaatactcagctaaccaaaagaaaatactaatttttaaaatcatgtcataaaaaacagaaaagtaaaaaaagtctgaaatcctgaataaaattattttaaggatgaaattacatgcataaattaagggtagataacttcttgccatttaattaaacaaatccccaattcttatcagaataaaactgaaggacaatggatgccttttgggttttttaattttttaatattgcactttatagtacttcataagagacaactgtcttaattaaagccataaaataccaataatacatatattcagggcttctgaatatagtcaatcaataagcagtccatgagtcattcctgttttgtattgtttattgtaaattggagtttatctgttctattttttattaactacaattattgttctaggcaatcctaatctacttatacattttagatgtgtgctttaataaaactgtttgaaaatcaaagaaattattcatttcacaaaagcagtcttcgttttcaaaatagcttattacagtttctttagcaagttctaatactacatggaaattattttaaaattgtagatttttttcaggaatccattttgttatataaagcaaagttcacccatatggaaaatgaaatagataattagcaaacatatacctgggaaatgtaggatgtgtttgagcttttatataaatataggatgggtctaagaagttcccttataaaaatgggaaatagaggtatacaatttatcaataattccttatgcctaaattactaaccttccttgggaggacatgtaaagcagcagatttcataatgctttggtggttattttcctcctctccgctaaaatacacaatttctaacctagtatggtacactgtttacacacacatatataaagatgtccccacaactaaaaactttaatgtttcaacttcatcacaaatttttatataatttttttttttaacagacagggtcttgctctgtcacccaggctagagtgcagtggtgcaatcatagctcagtgtagcctcaaacacctggactcaagcgatcctcccacttcagcctcttgagtagctgggacctcaggcacatgccaccatgcctggctaattttgttgttgttgttaagagatggagtctcactatgttacccaggctggtctcaaactcctgggctcaagag

SEQ ID NO: 333909 - DNA, 491 bp, Homo sapiens
  misc_feature (489)..(489): n is a, c, g, or t
ttctagaggatccctcaaacgtatcagaactgggtacctaaattgtccatatagagtaaacatgggtactaaactggacaaccccatcaattttatgcttaagtggccaaattgccctaaagaaagggtatctgaaccaagggccagtgatattcctctgttagaggctgttttgtggtctgaagagtttctctaaagggctgagactctattcggaagagggagcctcagttactgaattgcgctattgaaccctgaacacaaagtacacatatataccctgcatctagccttgatatttcttctgctcaagtcaaaaaactccggaagcaacagcttccaccttcaagcaatccacatacttaaaaagccatcaaagctaagaatagcaaaagctaccttcctgattcagtgaagttgctgctagcactaaaagcaagagaaattatacttttgttctgatacggttttgagggatcctctagatcnca

SEQ ID NO: 333910 - DNA, 1031 bp, Homo sapiens
  misc_feature (13)..(13): n is a, c, g, or t
cgtctagaggatncctcaaaccgtatcagaactgggtacctaaattgtccatatagagtaaacatgggtactaaactggacaaccccatcaattttatgcttaagtggccaaattgccctaaagaaagggtatctgaaccaagggccagtgatattcctctgttagaggctgttttgtggtctgaagagtttctctaaagggctgagactctattcggaagagggagcctcagttactgaattgcgctattgaaccctgaacacaaagtacacatatataccctgcatctagccttgatatttcttctgctcaagtcaaaaaactccggaagcaacagcttccaccttcaagcaatccacatacttaaaaagccatcaaagctaagaatagcaaaagctaccttcctgattcagtgaagttgctgctagcactaaaagcaagagaaattatacttttgttcttcagatacggttaaaacaaaggaaatgttgtcaacgttgacgccaacatagacatttgctctataacatataaactgtcttttagacaggttatgttaaaaatatcagaatgccatttttgtaaaggatcttttttaggatagacgtggtctcatgcttcctttgttcgcctccgttttaaaggagcattgtaacccctatcctcatccctacaaaaatccagtggatgcacttccaaattacttctgtcattttgtatgtgttgtgtttattatgcgtaattttcactggatgatgagatacatggtgatactatgtcagtttattctctgtgaatatgtctgtacatagacaggaagctctacttatttgtacataggctgtctgaagtatgtacttctgtcacatggacttcattctgataaagggtgtttcttcttgtttcactgtccatacctttgtgcttctactactgataatcaattcatagaatatcactttatgtaactaagtctcctcagtgtgaaaaataatagtaataaaattattgactcaaagaagtaaaaaaa

SEQ ID NO: 333911 - DNA, 1064 bp, Homo sapiens
gctttggcctcccaaagtgctgggattaaaggaatgagccaccatacccagcccttttatgtaatttgagtaaaagtaattactaaaaaagtaaacatgggtactaaactggacaaccccatcaattttatgcttaagtggccaaattgccctaaagaaagggtatctgaaccaagggccagtgatattcctctgttagaggctgttttgtggtctgaagagtttctctaaagggctgagactctattcggaagagggagcctcagttactgaattgcgctattgaaccctgaacacaaagtacacatatataccctgcatctagccttgatatttcttctgctcaagtcaaaaaactccggaagcaacagcttccaccttcaagcaatccacatacttaaaaagccatcaaagctaagaatagcaaaagctaccttcctgattcagtgaagttgctgctagcactaaaagcaagagaaattatacttttgttcttcagatacggttaaaacaaaggaaatgttgtcaacgttgacgccaacatagacatttgctctataacatataaactgtcttttagacaggttatgttaaaaatatcagaatgccatttttgtaaaggatcttttttaggatagacgtggtctcatgcttcctttgttcgcctccgttttaaaggagcattgtaacccctatcctcatccctacaaaaatccagtggatgcacttccaaattacttctgtcattttgtatgtgttgtgtttattatgcgtaattttcactggatgatgagatacatggtgatactatgtcagtttattctctgtgaatatgtctgtacatagacaggaagctctacttatttgtacataggctgtctgaagtatgtacttctgtcacatggacttcattctgataaagggtgtttcttcttgtttcactgtccatacctttgtgcttctactactgataatcaattcatagaatatcactttatgtaactaagtctcctcagtgtgaaaaataatagtaataaaattattgactcaaagaagtaaaaaaa

SEQ ID NO: 333912 - DNA, 720 bp, Homo sapiens
aatgaaatagataattagcaaacatatacctgggaaatgtaggatgtgtttgagcttttatataaatataggatgggtctaagaagttcccttataaaaatgggaaatagaggtatacaatttatcaataattccttatgcctaaattactaaccttccttgggaggacatgtaaagcagcagatttcataatgctttggtggttattttcctcctctccgctaaaatacacaatttctaacctagtatggtacactgtttacacacacatatataaagatgtccccacaactaaaaactttaatgtttcaacttcatcacaaatttttatataatttttttttttaacagacagggtcttgctctgtcacccaggctagagtgcagtggtgcaatcatagctcagtgtagcctcaaacacctggactcaagcgatcctcccacttcagcctcttgagtagctgggacctcaggcacatgccaccatgcctggctaattttgttgttgttgttaagagatggagtctcactatgttacccaggctggtctcaaactcctgggctcaagagatcctcctgctttggcctcccaaagtgctgggattaaaggaatgagccaccatacccagcccttttatgtaatttgagtaaaagtaattactaaaaagcacttaatagtctagaaatccaccagaactgggtacctaaattgtccatata

SEQ ID NO: 333913 - DNA, 546 bp, Homo sapiens
tacatccctcccccttctttccagggctctgagtgtcagggctgagatgaagatgacaccctggcagaggaggaggcagggtgcttggggcagggcatggacattgaggtctgtgctgagctttacagtttgcaagcactttcatgttatcttgtgggggtagatcattgacatttcttatgccccttctctcctcctcttcctttctgtcctgcaccttagtttgggtccacaacacacctcaacgatgtcgctgtgccacttctccaagtgcaccttctactcccagtctgctagtttgtgagcccagactcgattcttcggtccatgtgatatgttcatacacagggctctccacaaccccacccctgcctactctctctctgccctgtttctcaccattccgcccttgtgcctcacgttccttcttccagcttccgggaggtgcctgctccctccctgctccttgccactatcatgctcatttctctgcctgttttcctcttctccccttctctgactggctgactttattctttaaaacac

SEQ ID NO: 333914 - DNA, 344 bp, Homo sapiens
  misc_feature (56)..(56): n is a, c, g, or t
atatgctattgtttctgcttttcacaatgtgtgtctgaagtccagttcagcatttntttattctccaagtgcaccttctactcccagtctgctagtttgtgagcccagactcgattcttcggtccatgtgatatgttcatacacagggctctccacaaccccacccctgcctactctctctctgccctgtttctcaccattccgcccttgtgcctcacgttccttcttccagcttccgggaggtgcctgctccctccctgctccttgccactatcatgctcatttctctgcctgttttcctcttctccccttctctgactggctgactttattctttaaaacac

SEQ ID NO: 333915 - DNA, 1502 bp, Homo sapiens
cccacatgggcagattgctccattccttatttccatgaggagagatttccctaaaatgccccttgtcctctttccgcttctccttttcttctccccagagaggaggaatgtcttggctgactcatcttcttcacctctcctctttccttttcgtagccagccttatcagcaagctctcattctagtctactctcacgtggctccagctctccaggggcagcctctctgcaggaaggcctcgggtgttcagtgctgcctgtgatgagtgggtctgtctttctcatttggaaaaaatgttgctgaacatttaatgttaccatttccaatgtcagctttatccctaataaagctgacgttttgatctccatctgccttgctctcatcctaccacccgattggtttagaattgtggtggagaaaacaggaactcaattctgggggtctccttacaactccaaaacaaccttattcttcccaaagtcaaccagccatctttaatgtggctatactcctcatctgcgcttcctcatccctcattcattcgccacgtcacggccatgtagcttcttctcccaccaaacattgaacccatcctgccaaggtcgctgatgacttatttgcaaaatacaatgaaaacttttcagtctaaaggtcaatcttacttgaagtctctgcaactttcaaagctcttcatcacttcctcctccttgacattccttcctctctgagcttccatgacactactttctcttggttttcctcctacttctccgactgtccttctcagcctccttgaactgttcttcaacttctgtgcacccaactgctagtgttctccagggttgtgccctacatcctcactctgttgactcttccttggtgattttatccactgccgaggcctctgaccaccacatacccaaaccctgcctgttgcccagggctctctttggagctctagactcaaagggccaagtaccagtggtgtaactccatgtacgacagaagaaggtaccatatcattttattttttatcactttattaatgatagcaagattttttcatattttactgatcagttgtgcatgtttacaggtgtatgtgtataaatcctttcctcacttgacatttcttatgccccttctctcctcctcttcctttctgtcctgcaccttagtttgggtccacaacacacctcaacgatgtcgctgtgccacttctccaagtgcaccttctactcccagtctgctagtttgtgagcccagactcgattcttcggtccatgtgatatgttcatacacagggctctccacaaccccacccctgcctactctctctctgccctgtttctcaccattccgcccttgtgcctcacgttccttcttccagcttccgggaggtgcctgctccctccctgctccttgccactatcatgctcatttctctgcctgttttcctcttctccccttctctgactggctgactttattctttaaaacac

SEQ ID NO: 333916 - DNA, 646 bp, Homo sapiens
cccacatgggcagattgctccattccttatttccatgaggagagatttccctaaaatgccccttgtcctctttccgcttctccttttcttctccccagagaggaggaatgtcttggctgactcatcttcttcacctctcctctttccttttcgtagccagccttatcagcaagctctcattcattgttccagaaatggtcttgaaagcttttcaatgttttggagtcagaatttcgcctgctaaaggaacaattttgaaaggcaaacccattgaaccgtgtaagttctggcacacttatttagagtttgctccttttagcttcctaaaactggaccatctattattccagtttgtttgaaactatctggtttttactggccaatgtcctgttgcctggcctgtggcatgggaccagttggagggaaagttgatgaggtgagtttgggaacctactatttattttgctggtggcttttattgtgttacctcaaattcccttgttagtacagggagagatatcctcaaggtgcaagttggaattttaagtaacaatagcatttgggcattagtacacgtctttcatccaatatggaaacaggaaagtacaccatctttcatccaatatggagatatgagaagtttcac

SEQ ID NO: 333917 - DNA, 513 bp, Homo sapiens
gcacgagatcatgggcaacatggcaaaaccccgtctctactaaaaacagaaaaaattagccaagtgtggtggcccacacctgtattcttagctactcagaggctgaggcatgagaattgcttgaacccgggaggcggaggttgcagggagccaagcttgcgccactgcactccagcctgggtggcagagcgagactccatctcaaaatataaataaataaaaataaaagagtatactcctggcatgctttttatctgagaagatgtaaaacagggaaaagaacttcaggccgttctctttgtggctgagtttcattctgcctgcgtggtgacagcagccttgagctctctgggaattcacatcctgagcagtgtgctaggaggatgcgagggatgctggtgactctgctgtgagtttgagctgcttctgccaaaaaactcacgctcaggactcacaccttgtctatattttgagttacatacaataaagattttttaaaaaatcacagattca

SEQ ID NO: 333918 - DNA, 3748 bp, Homo sapiens
agcggggtaggaggcggaagagcttctcggctctaggctctggagtcccgggagcagtgaggggccacccggggcacaggaaagggccgctaggggagggccgggtgcactcggggtgtctgggccgcgggtctgagggatgaggaggggccatggccagcgacggggccaggaagcaattctggaagcgcagcaacagcaagctcccgggcagcatccagcacgtgtatggtgcccagcaccccccctttgatccactgttacatggcactttgctcaggtccacggccaagatgccgaccacaccagtgaaggccaagagggtcagcaccttccaggagtttgagagcaataccagcgatgcctgggacgctggggaggacgacgatgagctcctggccatggcggcggagagcctgaactccgaggtggtcatggagacggccaaccgtgtgctgcgtaaccacagccagcggcaggggcggcccacgctgcaggaggggccagggcttcagcagaagcccaggcccgaggcagagccgccctcaccccccagcggcgacctccggctggtgaagtcggtcagtgagagccacacgtcctgtcctgcagaaagtgccagcgatgccgcccctctgcagaggtcccagtctctcccacactcggccaccgtcacgctgggtggcacatctgaccccagcactctcagcagctcagcgctgagcgaaagagaggcctcccggctcgacaagttcaagcagctgcttgccggccccaacacggaccttgaggaattacggaggttgagctggtccggaatccctaagccagtgcgtccaatgacgtggaagctcctctcaggttaccttcccgccaatgtagaccggagaccagccactctccagagaaaacaaaaagaatattttgcatttattgagcactattacgattctaggaacgacgaagttcaccaggacacatacaggcagatccacatagacatccctcgcatgagccctgaagcgttgatcctgcagcccaaggtgacggagatttttgaaaggatcttgttcatatgggcgatccgccacccagccagtggatacgttcagggtataaatgatctcgtcactcctttctttgtggtcttcatttgtgaatacatagaggcagaggaggtggacacggtggacgtctccggcgtgcccgcagaggtgctgtgcaacatcgaggccgacacctactggtgcatgagcaagctgctggatggcattcaggacaactacacctttgcccaacctgggattcaaatgaaagtgaaaatgttagaagaactcgtgagccggattgatgagcaagtgcaccggcacctggaccaacacgaagtgagatacctgcagtttgccttccgctggatgaacaacctgctgatgagggaggtgcccctgcgttgtaccatccgcctgtgggacacctaccagtctgaaccggacggcttttctcatttccacttgtacgtgtgcgctgcttttctcgtgagatggaggaaggaaatactagaagaaaaagattttcaagagctgctgctcttcctccagaacctgcccacagcccactgggatgatgaggacatcagcctgttgctggccgaggcctaccgcctcaagtttgcttttgccgacgcccccaatcactacaagaaatgagcccaggcccacccgcagctggcctcactgtcccgggtggcgcgccccacctgcctggctggtggtaggcccctgtgagctggtcccgggctgctaaaaggccttgtgaggtggccccaccctccaggggagctggtgaagatgggccacagacctggtctagggctgacaaagacagggacagcctttgttttctgagataccaaagagagccaggggagggccccgggttcggcggccagaggcaggtcaggggtcccctctccctctccctgcaatgtccttgccaaatgactgcctcctgctgcccctagtccggggcagcctaggaggccgaccctctttggagtcctgctgtctgggtgccagggccggaacgaggtagtggccatctcatacctactctgaaatgcaaaacttctattctgttgagtgaaagaataaaatgtagacaaaatctagaccgagacgttgcgctgacccggggtctctgtgccgcgaggtcccctcacagctgtatttcactgctgctggccctttccctccgtgtgttttcctgcttgcttggtttaaacgtggctgggaagctgaaggctggagtccaagccgtgagcccgccgagtgcctgggaggccgtgggaccaaaggctgggagcagagggaggcctcgccatcgccttactttccaccttgaacctcttttacaagagagaaacccccacctccctgaggtccagggccaagtggccccgccacgcaggtaggcgccggcctcagccagagcccctggaggcccacccaggctgtcgggccatgttgggctggcagacgggcagggggtcgcgtccctgtcatcaaagccctgaaccacagtgctcttctcaccgcagcctggaagcggaatgagcttttggagacttcctgggacttgctgtccttgtccaggtctgccaggtgtaggggaggtgtgactggttccatcatggaccggttcctccgtggaccggttccgccatggaccggttccgccatggaccactcctgccctggaccggttctgccgtggactggttcccgccgtggaccagttcccgctgtatactggttctgccctggactggttcccgctgtggactggttccttggggctctaagtgcggaagggcccagagctggtccctgcccagcgccctgctagggctgtgtccttggctccaggggccttgggactggcttcccagcgttccctcggtgtgtcacaggctgcatgacccctggaatgcgggcagggccacagccacagtctgtctgatccctgagcccaggacaggctcacgtcctcagcgacccactggtgactgacttcccagactctcctctgtccctcaggagcagccgtgtcctctcccaggccctaggacactgccagagactgtgggacatacaggcataagtgatgtgtgtgtttctgcttctgttttaaaaatccagggtcattacacacagcatggaaattagcacaaaatgctgtgcaaacgtcagatgctcccaaaccagcaaagggatgggcttgcttcacatcagatgcgggcacgccttacccctgccttccgtgtccccaccccagggtcaagggttcctcagaccagccatgcctcctcctcctgccgcctccttttctagatggggaggggattccgtcacaagaagagccgcccctcggccgtgtgcaggaagccccatgtcgctttgccgagatcagccctgggaggatccccttctctagctcagatcatgccgtgtggccagaaggctgcggacacaactgacctgcttctcgaggtggttgatgttttaaacaggaagctccacggagttcagccctgtgtgcatttcctcatgtatgtaaacgccaagactgaatgtgagaggtgttggccgcgggccttaagtctgagcagatccatctggaatgttcggggtgtgctgtctggatgtggtgcgctaaaaacacggaataaagatcagtgacaaagccgcgg

SEQ ID NO: 333919 - DNA, 3677 bp, Homo sapiens
agcggggtaggaggcggaagagcttctcggctctaggctctggagtcccgggagcagtgaggggccacccggggcacaggaaagggccgctaggggagggccgggtgcactcggggtgtctgggccgcgggtctgagggatgaggaggggccatggccagcgacggggccaggaagcaattctggaagcgcagcaacagcaagctcccgggcagcatccagcacgtgtatggtgcccagcaccccccctttgatccactgttacatggcactttgctcaggtccacggccaagatgccgaccacaccagtgaaggccaagagggtcagcaccttccaggagtttgagagcaataccagcgatgcctgggacgctggggaggacgacgatgagctcctggccatggcggcggagagcctgaactccgaggtggtcatggagacggccaaccgtgtgctgcgtaaccacagccagcggcaggggcggcccacgctgcaggaggggccagggcttcagcagaagcccaggcccgaggcagagccgccctcaccccccagcggcgacctccggctggtgaagtcggtcagtgagagccacacgtcctgtcctgcagaaagtgccagcgatgccgcccctctgcagaggtcccagtctctcccacactcggccaccgtcacgctgggtggcacatctgaccccagcactctcagcagctcagcgctgagcgaaagagaggcctcccggctcgacaagttcaagcagctgcttgccggccccaacacggaccttgaggaattacggaggttgagctggtccggaatccctaagccagtgcgtccaatgacgtggaagctcctctcaggttaccttcccgccaatgtagaccggagaccagccactctccagagaaaacaaaaagaatattttgcatttattgagcactattacgattctaggaacgacgaagttcaccaggacacatacaggcagatccacatagacatccctcgcatgagccctgaagcgttgatcctgcagcccaaggtgacggagatttttgaaaggatcttgttcatatgggcgatccgccacccagccagtggatacgttcagggtataaatgatctcgtcactcctttctttgtggtcttcatttgtgaatacatagaggcagaggaggtggacacggtggacgtctccggcgtgcccgcagaggtgctgtgcaacatcgaggccgacacctactggtgcatgagcaagctgctggatggcattcaggacaactacacctttgcccaacctgggattcaaatgaaagtgaaaatgttagaagaactcgtgagccggattgatgagcaagtgcaccggcacctggaccaacacgaagtgagatacctgcagtttgccttccgctggatgaacaacctgctgatgagggaggtgcccctgcgttgtaccatccgcctgtgggacacctaccagtctgaaccggacggcttttctcatttccacttgtacgtgtgcgctgcttttctcgtgagatggaggaaggaaatactagaagaaaaagattttcaagagctgctgctcttcctccagaacctgcccacagcccactgggatgatgaggacatcagcctgttgctggccgaggcctaccgcctcaagtttgcttttgccgacgcccccaatcactacaagaaatgagcccaggcccacccgcagctggcctcactgtcccgggtggcgcgccccacctgcctggctggtggtaggcccctgtgagctggtcccgggctgctaaaaggccttgtgaggtggccccaccctccaggggagctggtgaagatgggccacagacctggtctagggctgacaaagacagggacagcctttgttttctgagataccaaagagagccaggggagggccccgggttcggcggccagaggcaggtcaggggtcccctctccctctccctgcaatgtccttgccaaatgactgcctcctgctgcccctagtccggggcagcctaggaggccgaccctctttggagtcctgctgtctgggtgccagggccggaacgaggtagtggccatctcatacctactctgaaatgcaaaacttctattctgttgagtgaaagaataaaatgtagacaaaatctagaccgagacgttgcgctgacccggggtctctgtgccgcgaggtcccctcacagctgtatttcactgctgctggccctttccctccgtgtgttttcctgcttgcttggtttaaacgtggctgggaagctgaaggctggagtccaagccgtgagcccgccgagtgcctgggaggccgtgggaccaaaggctgggagcagagggaggcctcgccatcgccttactttccaccttgaacctcttttacaagagagaaacccccacctccctgaggtccagggccaagtggccccgccacgcaggtaggcgccggcctcagccagagcccctggaggcccacccaggctgtcgggccatgttgggctggcagacgggcagggggtcgcgtccctgtcatcaaagccctgaaccacagtgctcttctcaccgcagcctggaagcggaatgagcttttggagacttcctgggacttgctgtccttgtccaggtctgccaggtgtaggggaggtgtgactggttccatcatggaccggttcctccgtggaccggttccgccatggaccggttccgccatggaccggttccgccatggaccactcctgccctggaccactcctgccctggaccggttctgccgtggactggttcccgccgtggaccagttcccgctgtatactggttctgccctggactggttcccgctgtggactggttccttggggctctaagtgcggaagggcccagagctggtccctgcccagcgccctgctagggctgtgtccttggctccaggggccttgggactggcttcccagcgttccctcggtgtgtcacaggctgcatgacccctggaatgcgggcagggccacagccacagtctgtctgatccctgagcccaggacaggctcacgtcctcagcgacccactggtgactgacttcccagactctcctctgtccctcaggagcagccgtgtcctctcccaggccctaggacactgccagagactgtgggacatacaggcataagtgatgtgtgtgtttctgcttctgttttaaaaatccagggtcattacacacagcatggaaattagcacaaaatgctgtgcaaacgtcagatgctcccaaaccagcaaagggatgggcttgcttcacatcagatgcgggcacgccttacccctgccttccgtgtccccaccccagggtcaagggttcctcagaccagccatgcctcctcctcctgccgcctccttttctagctcagatcatgccgtgtggccagaaggctgcggacacaactgacctgcttctcgaggtggttgatgttttaaacaggaagctccacggagttcagccctgtgtgcatttcctcatgtatgtaaacgccaagactgaatgtgagaggtgttggccgcgggccttaagtctgagcagatccatctggaatgttcggggtgtgctgtctggatgtggtgcgctaaaaacacggaataaagatcagtgacaaagccgcgg

SEQ ID NO: 333920 - DNA, 3514 bp, Homo sapiens
agcggggtaggaggcggaagagcttctcggctctaggctctggagtcccgggagcagtgaggggccacccggggcacaggaaagggccgctaggggagggccgggtgcactcggggtgtctgggccgcgggtctgagggatgaggaggggccatggccagcgacggggccaggaagcaattctggaagcgcagcaacagcaagctcccgggcagtttgctcaggtccacggccaagatgccgaccacaccagtgaaggccaagagggtcagcaccttccaggagtttgagagcaataccagcgatgcctgggacgctggggaggacgacgatgagctcctggccatggcggcggagagcctgaactccgaggtggtcatggagacggccaaccgtgtgctgcgtaaccacagccagcggcaggggcggcccacgctgcaggaggggccagggcttcagcagaagcccaggcccgaggcagagccgccctcaccccccagcggcgacctccggctggtgaagtcggtcagtgagagccacacgtcctgtcctgcagaggaattacggaggttgagctggtccggaatccctaagccagtgcgtccaatgacgtggaagctcctctcaggttaccttcccgccaatgtagaccggagaccagccactctccagagaaaacaaaaagaatattttgcatttattgagcactattacgattctaggaacgacgaagttcaccaggacacatacaggcagatccacatagacatccctcgcatgagccctgaagcgttgatcctgcagcccaaggtgacggagatttttgaaaggatcttgttcatatgggcgatccgccacccagccagtggatacgttcagggtataaatgatctcgtcactcctttctttgtggtcttcatttgtgaatacatagaggcagaggaggtggacacggtggacgtctccggcgtgcccgcagaggtgctgtgcaacatcgaggccgacacctactggtgcatgagcaagctgctggatggcattcaggacaactacacctttgcccaacctgggattcaaatgaaagtgaaaatgttagaagaactcgtgagccggattgatgagcaagtgcaccggcacctggaccaacacgaagtgagatacctgcagtttgccttccgctggatgaacaacctgctgatgagggaggtgcccctgcgttgtaccatccgcctgtgggacacctaccagtctgaaccggacggcttttctcatttccacttgtacgtgtgcgctgcttttctcgtgagatggaggaaggaaatactagaagaaaaagattttcaagagctgctgctcttcctccagaacctgcccacagcccactgggatgatgaggacatcagcctgttgctggccgaggcctaccgcctcaagtttgcttttgccgacgcccccaatcactacaagaaatgagcccaggcccacccgcagctggcctcactgtcccgggtggcgcgccccacctgcctggctggtggtaggcccctgtgagctggtcccgggctgctaaaaggccttgtgaggtggccccaccctccaggggagctggtgaagatgggccacagacctggtctagggctgacaaagacagggacagcctttgttttctgagataccaaagagagccaggggagggccccgggttcggcggccagaggcaggtcaggggtcccctctccctctccctgcaatgtccttgccaaatgactgcctcctgctgcccctagtccggggcagcctaggaggccgaccctctttggagtcctgctgtctgggtgccagggccggaacgaggtagtggccatctcatacctactctgaaatgcaaaacttctattctgttgagtgaaagaataaaatgtagacaaaatctagaccgagacgttgcgctgacccggggtctctgtgccgcgaggtcccctcacagctgtatttcactgctgctggccctttccctccgtgtgttttcctgcttgcttggtttaaacgtggctgggaagctgaaggctggagtccaagccgtgagcccgccgagtgcctgggaggccgtgggaccaaaggctgggagcagagggaggcctcgccatcgccttactttccaccttgaacctcttttacaagagagaaacccccacctccctgaggtccagggccaagtggccccgccacgcaggtaggcgccggcctcagccagagcccctggaggcccacccaggctgtcgggccatgttgggctggcagacgggcagggggtcgcgtccctgtcatcaaagccctgaaccacagtgctcttctcaccgcagcctggaagcggaatgagcttttggagacttcctgggacttgctgtccttgtccaggtctgccaggtgtaggggaggtgtgactggttccatcatggaccggttcctccgtggaccggttccgccatggaccggttccgccatggaccactcctgccctggaccggttctgccgtggactggttcccgccgtggaccagttcccgctgtatactggttctgccctggactggttcccgctgtggactggttccttggggctctaagtgcggaagggcccagagctggtccctgcccagcgccctgctagggctgtgtccttggctccaggggccttgggactggcttcccagcgttccctcggtgtgtcacaggctgcatgacccctggaatgcgggcagggccacagccacagtctgtctgatccctgagcccaggacaggctcacgtcctcagcgacccactggtgactgacttcccagactctcctctgtccctcaggagcagccgtgtcctctcccaggccctaggacactgccagagactgtgggacatacaggcataagtgatgtgtgtgtttctgcttctgttttaaaaatccagggtcattacacacagcatggaaattagcacaaaatgctgtgcaaacgtcagatgctcccaaaccagcaaagggatgggcttgcttcacatcagatgcgggcacgccttacccctgccttccgtgtccccaccccagggtcaagggttcctcagaccagccatgcctcctcctcctgccgcctccttttctagatggggaggggattccgtcacaagaagagccgcccctcggccgtgtgcaggaagccccatgtcgctttgccgagatcagccctgggaggatccccttctctagctcagatcatgccgtgtggccagaaggctgcggacacaactgacctgcttctcgaggtggttgatgttttaaacaggaagctccacggagttcagccctgtgtgcatttcctcatgtatgtaaacgccaagactgaatgtgagaggtgttggccgcgggccttaagtctgagcagatccatctggaatgttcggggtgtgctgtctggatgtggtgcgctaaaaacacggaataaagatcagtgacaaagccgcgg

SEQ ID NO: 333921 - DNA, 3655 bp, Homo sapiens
gttgctagtccctgtaatataaaaatggctgaaaggagttggggaagggggcagtgaagacgacgcctgcctctcgcggtgtgaaactggggacctttgctatatgccgtctattattgtgcatccagcacgtgtatggtgcccagcaccccccctttgatccactgttacatggcactttgctcaggtccacggccaagatgccgaccacaccagtgaaggccaagagggtcagcaccttccaggagtttgagagcaataccagcgatgcctgggacgctggggaggacgacgatgagctcctggccatggcggcggagagcctgaactccgaggtggtcatggagacggccaaccgtgtgctgcgtaaccacagccagcggcaggggcggcccacgctgcaggaggggccagggcttcagcagaagcccaggcccgaggcagagccgccctcaccccccagcggcgacctccggctggtgaagtcggtcagtgagagccacacgtcctgtcctgcagaaagtgccagcgatgccgcccctctgcagaggtcccagtctctcccacactcggccaccgtcacgctgggtggcacatctgaccccagcactctcagcagctcagcgctgagcgaaagagaggcctcccggctcgacaagttcaagcagctgcttgccggccccaacacggaccttgaggaattacggaggttgagctggtccggaatccctaagccagtgcgtccaatgacgtggaagctcctctcaggttaccttcccgccaatgtagaccggagaccagccactctccagagaaaacaaaaagaatattttgcatttattgagcactattacgattctaggaacgacgaagttcaccaggacacatacaggcagatccacatagacatccctcgcatgagccctgaagcgttgatcctgcagcccaaggtgacggagatttttgaaaggatcttgttcatatgggcgatccgccacccagccagtggatacgttcagggtataaatgatctcgtcactcctttctttgtggtcttcatttgtgaatacatagaggcagaggaggtggacacggtggacgtctccggcgtgcccgcagaggtgctgtgcaacatcgaggccgacacctactggtgcatgagcaagctgctggatggcattcaggacaactacacctttgcccaacctgggattcaaatgaaagtgaaaatgttagaagaactcgtgagccggattgatgagcaagtgcaccggcacctggaccaacacgaagtgagatacctgcagtttgccttccgctggatgaacaacctgctgatgagggaggtgcccctgcgttgtaccatccgcctgtgggacacctaccagtctgaaccggacggcttttctcatttccacttgtacgtgtgcgctgcttttctcgtgagatggaggaaggaaatactagaagaaaaagattttcaagagctgctgctcttcctccagaacctgcccacagcccactgggatgatgaggacatcagcctgttgctggccgaggcctaccgcctcaagtttgcttttgccgacgcccccaatcactacaagaaatgagcccaggcccacccgcagctggcctcactgtcccgggtggcgcgccccacctgcctggctggtggtaggcccctgtgagctggtcccgggctgctaaaaggccttgtgaggtggccccaccctccaggggagctggtgaagatgggccacagacctggtctagggctgacaaagacagggacagcctttgttttctgagataccaaagagagccaggggagggccccgggttcggcggccagaggcaggtcaggggtcccctctccctctccctgcaatgtccttgccaaatgactgcctcctgctgcccctagtccggggcagcctaggaggccgaccctctttggagtcctgctgtctgggtgccagggccggaacgaggtagtggccatctcatacctactctgaaatgcaaaacttctattctgttgagtgaaagaataaaatgtagacaaaatctagaccgagacgttgcgctgacccggggtctctgtgccgcgaggtcccctcacagctgtatttcactgctgctggccctttccctccgtgtgttttcctgcttgcttggtttaaacgtggctgggaagctgaaggctggagtccaagccgtgagcccgccgagtgcctgggaggccgtgggaccaaaggctgggagcagagggaggcctcgccatcgccttactttccaccttgaacctcttttacaagagagaaacccccacctccctgaggtccagggccaagtggccccgccacgcaggtaggcgccggcctcagccagagcccctggaggcccacccaggctgtcgggccatgttgggctggcagacgggcagggggtcgcgtccctgtcatcaaagccctgaaccacagtgctcttctcaccgcagcctggaagcggaatgagcttttggagacttcctgggacttgctgtccttgtccaggtctgccaggtgtaggggaggtgtgactggttccatcatggaccggttcctccgtggaccggttccgccatggaccggttccgccatggaccactcctgccctggaccggttctgccgtggactggttcccgccgtggaccagttcccgctgtatactggttctgccctggactggttcccgctgtggactggttccttggggctctaagtgcggaagggcccagagctggtccctgcccagcgccctgctagggctgtgtccttggctccaggggccttgggactggcttcccagcgttccctcggtgtgtcacaggctgcatgacccctggaatgcgggcagggccacagccacagtctgtctgatccctgagcccaggacaggctcacgtcctcagcgacccactggtgactgacttcccagactctcctctgtccctcaggagcagccgtgtcctctcccaggccctaggacactgccagagactgtgggacatacaggcataagtgatgtgtgtgtttctgcttctgttttaaaaatccagggtcattacacacagcatggaaattagcacaaaatgctgtgcaaacgtcagatgctcccaaaccagcaaagggatgggcttgcttcacatcagatgcgggcacgccttacccctgccttccgtgtccccaccccagggtcaagggttcctcagaccagccatgcctcctcctcctgccgcctccttttctagatggggaggggattccgtcacaagaagagccgcccctcggccgtgtgcaggaagccccatgtcgctttgccgagatcagccctgggaggatccccttctctagctcagatcatgccgtgtggccagaaggctgcggacacaactgacctgcttctcgaggtggttgatgttttaaacaggaagctccacggagttcagccctgtgtgcatttcctcatgtatgtaaacgccaagactgaatgtgagaggtgttggccgcgggccttaagtctgagcagatccatctggaatgttcggggtgtgctgtctggatgtggtgcgctaaaaacacggaataaagatcagtgacaaagccgcgg

SEQ ID NO: 333922 - DNA, 3499 bp, Homo sapiens
agcggggtaggaggcggaagagcttctcggctctaggctctggagtcccgggagcagtgaggggccacccggggcacaggaaagggccgctaggggagggccgggtgcactcggggtgtctgggccgcgggtctgagggatgaggaggggccatggcggcggagagcctgaactccgaggtggtcatggagacggccaaccgtgtgctgcgtaaccacagccagcggcaggggcggcccacgctgcaggaggggccagggcttcagcagaagcccaggcccgaggcagagccgccctcaccccccagcggcgacctccggctggtgaagtcggtcagtgagagccacacgtcctgtcctgcagaaagtgccagcgatgccgcccctctgcagaggtcccagtctctcccacactcggccaccgtcacgctgggtggcacatctgaccccagcactctcagcagctcagcgctgagcgaaagagaggcctcccggctcgacaagttcaagcagctgcttgccggccccaacacggaccttgaggaattacggaggttgagctggtccggaatccctaagccagtgcgtccaatgacgtggaagctcctctcaggttaccttcccgccaatgtagaccggagaccagccactctccagagaaaacaaaaagaatattttgcatttattgagcactattacgattctaggaacgacgaagttcaccaggacacatacaggcagatccacatagacatccctcgcatgagccctgaagcgttgatcctgcagcccaaggtgacggagatttttgaaaggatcttgttcatatgggcgatccgccacccagccagtggatacgttcagggtataaatgatctcgtcactcctttctttgtggtcttcatttgtgaatacatagaggcagaggaggtggacacggtggacgtctccggcgtgcccgcagaggtgctgtgcaacatcgaggccgacacctactggtgcatgagcaagctgctggatggcattcaggacaactacacctttgcccaacctgggattcaaatgaaagtgaaaatgttagaagaactcgtgagccggattgatgagcaagtgcaccggcacctggaccaacacgaagtgagatacctgcagtttgccttccgctggatgaacaacctgctgatgagggaggtgcccctgcgttgtaccatccgcctgtgggacacctaccagtctgaaccggacggcttttctcatttccacttgtacgtgtgcgctgcttttctcgtgagatggaggaaggaaatactagaagaaaaagattttcaagagctgctgctcttcctccagaacctgcccacagcccactgggatgatgaggacatcagcctgttgctggccgaggcctaccgcctcaagtttgcttttgccgacgcccccaatcactacaagaaatgagcccaggcccacccgcagctggcctcactgtcccgggtggcgcgccccacctgcctggctggtggtaggcccctgtgagctggtcccgggctgctaaaaggccttgtgaggtggccccaccctccaggggagctggtgaagatgggccacagacctggtctagggctgacaaagacagggacagcctttgttttctgagataccaaagagagccaggggagggccccgggttcggcggccagaggcaggtcaggggtcccctctccctctccctgcaatgtccttgccaaatgactgcctcctgctgcccctagtccggggcagcctaggaggccgaccctctttggagtcctgctgtctgggtgccagggccggaacgaggtagtggccatctcatacctactctgaaatgcaaaacttctattctgttgagtgaaagaataaaatgtagacaaaatctagaccgagacgttgcgctgacccggggtctctgtgccgcgaggtcccctcacagctgtatttcactgctgctggccctttccctccgtgtgttttcctgcttgcttggtttaaacgtggctgggaagctgaaggctggagtccaagccgtgagcccgccgagtgcctgggaggccgtgggaccaaaggctgggagcagagggaggcctcgccatcgccttactttccaccttgaacctcttttacaagagagaaacccccacctccctgaggtccagggccaagtggccccgccacgcaggtaggcgccggcctcagccagagcccctggaggcccacccaggctgtcgggccatgttgggctggcagacgggcagggggtcgcgtccctgtcatcaaagccctgaaccacagtgctcttctcaccgcagcctggaagcggaatgagcttttggagacttcctgggacttgctgtccttgtccaggtctgccaggtgtaggggaggtgtgactggttccatcatggaccggttcctccgtggaccggttccgccatggaccggttccgccatggaccactcctgccctggaccggttctgccgtggactggttcccgccgtggaccagttcccgctgtatactggttctgccctggactggttcccgctgtggactggttccttggggctctaagtgcggaagggcccagagctggtccctgcccagcgccctgctagggctgtgtccttggctccaggggccttgggactggcttcccagcgttccctcggtgtgtcacaggctgcatgacccctggaatgcgggcagggccacagccacagtctgtctgatccctgagcccaggacaggctcacgtcctcagcgacccactggtgactgacttcccagactctcctctgtccctcaggagcagccgtgtcctctcccaggccctaggacactgccagagactgtgggacatacaggcataagtgatgtgtgtgtttctgcttctgttttaaaaatccagggtcattacacacagcatggaaattagcacaaaatgctgtgcaaacgtcagatgctcccaaaccagcaaagggatgggcttgcttcacatcagatgcgggcacgccttacccctgccttccgtgtccccaccccagggtcaagggttcctcagaccagccatgcctcctcctcctgccgcctccttttctagatggggaggggattccgtcacaagaagagccgcccctcggccgtgtgcaggaagccccatgtcgctttgccgagatcagccctgggaggatccccttctctagctcagatcatgccgtgtggccagaaggctgcggacacaactgacctgcttctcgaggtggttgatgttttaaacaggaagctccacggagttcagccctgtgtgcatttcctcatgtatgtaaacgccaagactgaatgtgagaggtgttggccgcgggccttaagtctgagcagatccatctggaatgttcggggtgtgctgtctggatgtggtgcgctaaaaacacggaataaagatcagtgacaaagccgcgg

SEQ ID NO: 333923 - DNA, 3571 bp, Homo sapiens
agcggggtaggaggcggaagagcttctcggctctaggctctggagtcccgggagcagtgaggggccacccggggcacaggaaagggccgctaggggagggccgggtgcactcggggtgtctgggccgcgggtctgagggatgaggaggggccatggccagcgacggggccaggaagcaattctggaagcgcagcaacagcaagctcccgggcagcatccagcacgtgtatggtgcccagcaccccccctttgatccactgttacatggcactttgctcaggtccacggccaagatgccgaccacaccagtgaaggccaagagggtcagcaccttccaggagtttgagagcaataccagcgatgcctgggacgctggggaggacgacgatgagctcctggccatggcggcggagagcctgaactccgaggtggtcatggagacggccaaccgtgtgctgcgtaaccacagccagcggcaggggcggcccacgctgcaggaggggccagggcttcagcagaagcccaggcccgaggcagagccgccctcaccccccagcggcgacctccggctggtgaagtcggtcagtgagagccacacgtcctgtcctgcagaggaattacggaggttgagctggtccggaatccctaagccagtgcgtccaatgacgtggaagctcctctcaggttaccttcccgccaatgtagaccggagaccagccactctccagagaaaacaaaaagaatattttgcatttattgagcactattacgattctaggaacgacgaagttcaccaggacacatacaggcagatccacatagacatccctcgcatgagccctgaagcgttgatcctgcagcccaaggtgacggagatttttgaaaggatcttgttcatatgggcgatccgccacccagccagtggatacgttcagggtataaatgatctcgtcactcctttctttgtggtcttcatttgtgaatacatagaggcagaggaggtggacacggtggacgtctccggcgtgcccgcagaggtgctgtgcaacatcgaggccgacacctactggtgcatgagcaagctgctggatggcattcaggacaactacacctttgcccaacctgggattcaaatgaaagtgaaaatgttagaagaactcgtgagccggattgatgagcaagtgcaccggcacctggaccaacacgaagtgagatacctgcagtttgccttccgctggatgaacaacctgctgatgagggaggtgcccctgcgttgtaccatccgcctgtgggacacctaccagtctgaaccggacggcttttctcatttccacttgtacgtgtgcgctgcttttctcgtgagatggaggaaggaaatactagaagaaaaagattttcaagagctgctgctcttcctccagaacctgcccacagcccactgggatgatgaggacatcagcctgttgctggccgaggcctaccgcctcaagtttgcttttgccgacgcccccaatcactacaagaaatgagcccaggcccacccgcagctggcctcactgtcccgggtggcgcgccccacctgcctggctggtggtaggcccctgtgagctggtcccgggctgctaaaaggccttgtgaggtggccccaccctccaggggagctggtgaagatgggccacagacctggtctagggctgacaaagacagggacagcctttgttttctgagataccaaagagagccaggggagggccccgggttcggcggccagaggcaggtcaggggtcccctctccctctccctgcaatgtccttgccaaatgactgcctcctgctgcccctagtccggggcagcctaggaggccgaccctctttggagtcctgctgtctgggtgccagggccggaacgaggtagtggccatctcatacctactctgaaatgcaaaacttctattctgttgagtgaaagaataaaatgtagacaaaatctagaccgagacgttgcgctgacccggggtctctgtgccgcgaggtcccctcacagctgtatttcactgctgctggccctttccctccgtgtgttttcctgcttgcttggtttaaacgtggctgggaagctgaaggctggagtccaagccgtgagcccgccgagtgcctgggaggccgtgggaccaaaggctgggagcagagggaggcctcgccatcgccttactttccaccttgaacctcttttacaagagagaaacccccacctccctgaggtccagggccaagtggccccgccacgcaggtaggcgccggcctcagccagagcccctggaggcccacccaggctgtcgggccatgttgggctggcagacgggcagggggtcgcgtccctgtcatcaaagccctgaaccacagtgctcttctcaccgcagcctggaagcggaatgagcttttggagacttcctgggacttgctgtccttgtccaggtctgccaggtgtaggggaggtgtgactggttccatcatggaccggttcctccgtggaccggttccgccatggaccggttccgccatggaccactcctgccctggaccggttctgccgtggactggttcccgccgtggaccagttcccgctgtatactggttctgccctggactggttcccgctgtggactggttccttggggctctaagtgcggaagggcccagagctggtccctgcccagcgccctgctagggctgtgtccttggctccaggggccttgggactggcttcccagcgttccctcggtgtgtcacaggctgcatgacccctggaatgcgggcagggccacagccacagtctgtctgatccctgagcccaggacaggctcacgtcctcagcgacccactggtgactgacttcccagactctcctctgtccctcaggagcagccgtgtcctctcccaggccctaggacactgccagagactgtgggacatacaggcataagtgatgtgtgtgtttctgcttctgttttaaaaatccagggtcattacacacagcatggaaattagcacaaaatgctgtgcaaacgtcagatgctcccaaaccagcaaagggatgggcttgcttcacatcagatgcgggcacgccttacccctgccttccgtgtccccaccccagggtcaagggttcctcagaccagccatgcctcctcctcctgccgcctccttttctagatggggaggggattccgtcacaagaagagccgcccctcggccgtgtgcaggaagccccatgtcgctttgccgagatcagccctgggaggatccccttctctagctcagatcatgccgtgtggccagaaggctgcggacacaactgacctgcttctcgaggtggttgatgttttaaacaggaagctccacggagttcagccctgtgtgcatttcctcatgtatgtaaacgccaagactgaatgtgagaggtgttggccgcgggccttaagtctgagcagatccatctggaatgttcggggtgtgctgtctggatgtggtgcgctaaaaacacggaataaagatcagtgacaaagccgcgg

SEQ ID NO: 333924 - DNA, 3270 bp, Homo sapiens
cggagggcaaactgtgtgtggagctcagctctggccctcaaggctttcgaacggtaggacagaaggcacgacgacccgtccgtcaaggagtggggccaggccacggctgtgttccacttcccctgaggggtgaccatccagtctaggctttatgagagcgtgctgatagatggaggaggaagcaggtgcggccttggagtaggccctcagtgtgatggctggccgtgtccttactcatgaagtggctcaacctacctgtttcgtcagctgtagagggagcatgagacctgccctgcagggtcctcgtgaagaggaattacggaggttgagctggtccggaatccctaagccagtgcgtccaatgacgtggaagctcctctcaggttaccttcccgccaatgtagaccggagaccagccactctccagagaaaacaaaaagaatattttgcatttattgagcactattacgattctaggaacgacgaagttcaccaggacacatacaggcagatccacatagacatccctcgcatgagccctgaagcgttgatcctgcagcccaaggtgacggagatttttgaaaggatcttgttcatatgggcgatccgccacccagccagtggatacgttcagggtataaatgatctcgtcactcctttctttgtggtcttcatttgtgaatacatagaggcagaggaggtggacacggtggacgtctccggcgtgcccgcagaggtgctgtgcaacatcgaggccgacacctactggtgcatgagcaagctgctggatggcattcaggacaactacacctttgcccaacctgggattcaaatgaaagtgaaaatgttagaagaactcgtgagccggattgatgagcaagtgcaccggcacctggaccaacacgaagtgagatacctgcagtttgccttccgctggatgaacaacctgctgatgagggaggtgcccctgcgttgtaccatccgcctgtgggacacctaccagtctgaaccggacggcttttctcatttccacttgtacgtgtgcgctgcttttctcgtgagatggaggaaggaaatactagaagaaaaagattttcaagagctgctgctcttcctccagaacctgcccacagcccactgggatgatgaggacatcagcctgttgctggccgaggcctaccgcctcaagtttgcttttgccgacgcccccaatcactacaagaaatgagcccaggcccacccgcagctggcctcactgtcccgggtggcgcgccccacctgcctggctggtggtaggcccctgtgagctggtcccgggctgctaaaaggccttgtgaggtggccccaccctccaggggagctggtgaagatgggccacagacctggtctagggctgacaaagacagggacagcctttgttttctgagataccaaagagagccaggggagggccccgggttcggcggccagaggcaggtcaggggtcccctctccctctccctgcaatgtccttgccaaatgactgcctcctgctgcccctagtccggggcagcctaggaggccgaccctctttggagtcctgctgtctgggtgccagggccggaacgaggtagtggccatctcatacctactctgaaatgcaaaacttctattctgttgagtgaaagaataaaatgtagacaaaatctagaccgagacgttgcgctgacccggggtctctgtgccgcgaggtcccctcacagctgtatttcactgctgctggccctttccctccgtgtgttttcctgcttgcttggtttaaacgtggctgggaagctgaaggctggagtccaagccgtgagcccgccgagtgcctgggaggccgtgggaccaaaggctgggagcagagggaggcctcgccatcgccttactttccaccttgaacctcttttacaagagagaaacccccacctccctgaggtccagggccaagtggccccgccacgcaggtaggcgccggcctcagccagagcccctggaggcccacccaggctgtcgggccatgttgggctggcagacgggcagggggtcgcgtccctgtcatcaaagccctgaaccacagtgctcttctcaccgcagcctggaagcggaatgagcttttggagacttcctgggacttgctgtccttgtccaggtctgccaggtgtaggggaggtgtgactggttccatcatggaccggttcctccgtggaccggttccgccatggaccggttccgccatggaccactcctgccctggaccggttctgccgtggactggttcccgccgtggaccagttcccgctgtatactggttctgccctggactggttcccgctgtggactggttccttggggctctaagtgcggaagggcccagagctggtccctgcccagcgccctgctagggctgtgtccttggctccaggggccttgggactggcttcccagcgttccctcggtgtgtcacaggctgcatgacccctggaatgcgggcagggccacagccacagtctgtctgatccctgagcccaggacaggctcacgtcctcagcgacccactggtgactgacttcccagactctcctctgtccctcaggagcagccgtgtcctctcccaggccctaggacactgccagagactgtgggacatacaggcataagtgatgtgtgtgtttctgcttctgttttaaaaatccagggtcattacacacagcatggaaattagcacaaaatgctgtgcaaacgtcagatgctcccaaaccagcaaagggatgggcttgcttcacatcagatgcgggcacgccttacccctgccttccgtgtccccaccccagggtcaagggttcctcagaccagccatgcctcctcctcctgccgcctccttttctagatggggaggggattccgtcacaagaagagccgcccctcggccgtgtgcaggaagccccatgtcgctttgccgagatcagccctgggaggatccccttctctagctcagatcatgccgtgtggccagaaggctgcggacacaactgacctgcttctcgaggtggttgatgttttaaacaggaagctccacggagttcagccctgtgtgcatttcctcatgtatgtaaacgccaagactgaatgtgagaggtgttggccgcgggccttaagtctgagcagatccatctggaatgttcggggtgtgctgtctggatgtggtgcgctaaaaacacggaataaagatcagtgacaaagccgcgg

SEQ ID NO: 333925 - DNA, 3005 bp, Homo sapiens
gggcctcacgtgttccagggtagctccaggattctgttgtaaacagaggaattacggaggttgagctggtccggaatccctaagccagtgcgtccaatgacgtggaagctcctctcaggttaccttcccgccaatgtagaccggagaccagccactctccagagaaaacaaaaagaatattttgcatttattgagcactattacgattctaggaacgacgaagttcaccaggacacatacaggcagatccacatagacatccctcgcatgagccctgaagcgttgatcctgcagcccaaggtgacggagatttttgaaaggatcttgttcatatgggcgatccgccacccagccagtggatacgttcagggtataaatgatctcgtcactcctttctttgtggtcttcatttgtgaatacatagaggcagaggaggtggacacggtggacgtctccggcgtgcccgcagaggtgctgtgcaacatcgaggccgacacctactggtgcatgagcaagctgctggatggcattcaggacaactacacctttgcccaacctgggattcaaatgaaagtgaaaatgttagaagaactcgtgagccggattgatgagcaagtgcaccggcacctggaccaacacgaagtgagatacctgcagtttgccttccgctggatgaacaacctgctgatgagggaggtgcccctgcgttgtaccatccgcctgtgggacacctaccagtctgaaccggacggcttttctcatttccacttgtacgtgtgcgctgcttttctcgtgagatggaggaaggaaatactagaagaaaaagattttcaagagctgctgctcttcctccagaacctgcccacagcccactgggatgatgaggacatcagcctgttgctggccgaggcctaccgcctcaagtttgcttttgccgacgcccccaatcactacaagaaatgagcccaggcccacccgcagctggcctcactgtcccgggtggcgcgccccacctgcctggctggtggtaggcccctgtgagctggtcccgggctgctaaaaggccttgtgaggtggccccaccctccaggggagctggtgaagatgggccacagacctggtctagggctgacaaagacagggacagcctttgttttctgagataccaaagagagccaggggagggccccgggttcggcggccagaggcaggtcaggggtcccctctccctctccctgcaatgtccttgccaaatgactgcctcctgctgcccctagtccggggcagcctaggaggccgaccctctttggagtcctgctgtctgggtgccagggccggaacgaggtagtggccatctcatacctactctgaaatgcaaaacttctattctgttgagtgaaagaataaaatgtagacaaaatctagaccgagacgttgcgctgacccggggtctctgtgccgcgaggtcccctcacagctgtatttcactgctgctggccctttccctccgtgtgttttcctgcttgcttggtttaaacgtggctgggaagctgaaggctggagtccaagccgtgagcccgccgagtgcctgggaggccgtgggaccaaaggctgggagcagagggaggcctcgccatcgccttactttccaccttgaacctcttttacaagagagaaacccccacctccctgaggtccagggccaagtggccccgccacgcaggtaggcgccggcctcagccagagcccctggaggcccacccaggctgtcgggccatgttgggctggcagacgggcagggggtcgcgtccctgtcatcaaagccctgaaccacagtgctcttctcaccgcagcctggaagcggaatgagcttttggagacttcctgggacttgctgtccttgtccaggtctgccaggtgtaggggaggtgtgactggttccatcatggaccggttcctccgtggaccggttccgccatggaccggttccgccatggaccactcctgccctggaccggttctgccgtggactggttcccgccgtggaccagttcccgctgtatactggttctgccctggactggttcccgctgtggactggttccttggggctctaagtgcggaagggcccagagctggtccctgcccagcgccctgctagggctgtgtccttggctccaggggccttgggactggcttcccagcgttccctcggtgtgtcacaggctgcatgacccctggaatgcgggcagggccacagccacagtctgtctgatccctgagcccaggacaggctcacgtcctcagcgacccactggtgactgacttcccagactctcctctgtccctcaggagcagccgtgtcctctcccaggccctaggacactgccagagactgtgggacatacaggcataagtgatgtgtgtgtttctgcttctgttttaaaaatccagggtcattacacacagcatggaaattagcacaaaatgctgtgcaaacgtcagatgctcccaaaccagcaaagggatgggcttgcttcacatcagatgcgggcacgccttacccctgccttccgtgtccccaccccagggtcaagggttcctcagaccagccatgcctcctcctcctgccgcctccttttctagatggggaggggattccgtcacaagaagagccgcccctcggccgtgtgcaggaagccccatgtcgctttgccgagatcagccctgggaggatccccttctctagctcagatcatgccgtgtggccagaaggctgcggacacaactgacctgcttctcgaggtggttgatgttttaaacaggaagctccacggagttcagccctgtgtgcatttcctcatgtatgtaaacgccaagactgaatgtgagaggtgttggccgcgggccttaagtctgagcagatccatctggaatgttcggggtgtgctgtctggatgtggtgcgctaaaaacacggaataaagatcagtgacaaagccgcgg

SEQ ID NO: 333926 - DNA, 1969 bp, Homo sapiens
agcggggtaggaggcggaagagcttctcggctctaggctctggagtcccgggagcagtgaggggccacccggggcacaggaaagggccgctaggggagggccgggtgcactcggggtgtctgggccgcgggtctgagggatgaggaggggccatggccagcgacggggccaggaagcaattctggaagcgcagcaacagcaagctcccgggcagtttgctcaggtccacggccaagatgccgaccacaccagtgaaggccaagagggtcagcaccttccaggagtttgagagcaataccagcgatgcctgggacgctggggaggacgacgatgagctcctggccatggcggcggagagcctgaactccgaggtggtcatggagacggccaaccgtgtgctgcgtaaccacagccagcggcaggggcggcccacgctgcaggaggggccagggcttcagcagaagcccaggcccgaggcagagccgccctcaccccccagcggcgacctccggctggtgaagtcggtcagtgagagccacacgtcctgtcctgcagaggaattacggaggttgagctggtccggaatccctaagccagtgcgtccaatgacgtggaagctcctctcaggttaccttcccgccaatgtagaccggagaccagccactctccagagaaaacaaaaagaatattttgcatttattgagcactattacgattctaggaacgacgaagttcaccaggacacatacaggcagatccacatagacatccctcgcatgagccctgaagcgttgatcctgcagcccaaggtgacggagatttttgaaaggatcttgttcatatgggcgatccgccacccagccagtggatacgttcagggtataaatgatctcgtcactcctttctttgtggtcttcatttgtgaatacatagaggcagaggaggtggacacggtggacgtctccggcgtgcccgcagaggtgctgtgcaacatcgaggccgacacctactggtgcatgagcaagctgctggatggcattcaggacaactacacctttgcccaacctgggattcaaatgaaagtgaaaatgttagaagaactcgtgagccggattgatgagcaagtgcaccggcacctggaccaacacgaagtgagatacctgcagtttgccttccgctggatgaacaacctgctgatgagggaggtgcccctgcgttgtaccatccgcctgtgggacacctaccagtctgaaccggacggcttttctcatttccacttgtacgtgtgcgctgcttttctcgtgagatggaggaaggaaatactagaagaaaaagattttcaagagctgctgctcttcctccagaacctgcccacagcccactgggatgatgaggacatcagcctgttgctggccgaggcctaccgcctcaagtttgcttttgccgacgcccccaatcactacaagaaatgagcccaggcccacccgcagctggcctcactgtcccgggtggcgcgccccacctgcctggctggtggtaggcccctgtgagctggtcccgggctgctaaaaggccttgtgaggtggccccaccctccaggggagctggtgaagatgggccacagacctggtctagggctgacaaagacagggacagcctttgttttctgagataccaaagagagccaggggagggccccgggttcggcggccagaggcaggtcaggggtcccctctccctctccctgcaatgtccttgccaaatgactgcctcctgctgcccctagtccggggcagcctaggaggccgaccctctttggagtcctgctgtctgggtgccagggccggaacgaggtagtggccatctcatacctactctgaaatgcaaaacttctattctgttgagtgaaagaataaaatgtagacaaaatcaaaaaaaagaattccaccacactggcggccgcaaggag

SEQ ID NO: 333927 - DNA, 1413 bp, Homo sapiens
agcggggtaggaggcggaagagcttctcggctctaggctctggagtcccgggagcagtgaggggccacccggggcacaggaaagggccgctaggggagggccgggtgcactcggggtgtctgggccgcgggtctgagggatgaggaggggccatggccagcgacggggccaggaagcaattctggaagcgcagcaacagcaagctcccgggcagcatccagcacgtgtatggtgcccagcaccccccctttgatccactgttacatggcactttgctcaggtccacggccaagatgccgaccacaccagtgaaggccaagagggtcagcaccttccaggagtttgagagcaataccagcgatgcctgggacgctggggaggacgacgatgagctcctggccatggcggcggagagcctgaactccgaggtggtcatggagacggccaaccgtgtgctgcgtaaccacagccagcggcaggggcggcccacgctgcaggaggggccagggcttcagcagaagcccaggcccgaggcagagccgccctcaccccccagcggcgacctccggctggtgaagtcggtcagtgagagccacacgtcctgtcctgcagaaagtgccagcgatgccgcccctctgcagaggtcccagtctctcccacactcggccaccgtcacgctgggtggcacatctgaccccagcactctcagcagctcagcgctgagcgaaagagaggcctcccggctcgacaagttcaagcagctgcttgccggccccaacacggaccttgaggaattacggaggttgagctggtccggaatccctaagccagtgcgtccaatgacgtggaagctcctctcaggttaccttcccgccaatgtagaccggagaccagccactctccagagaaaacaaaaagaatattttgcatttattgagcactattacgattctaggaacgacgaagttcaccaggacacatacaggcagatccacatagacatccctcgcatgagccctgaagcgttgatcctgcagcccaaggtgacggagatttttgaaaggatcttgttcatatgggcgatccgccacccagccagtggatacgttcagggtataaatgatctcgtcactcctttctttgtggtcttcatttgtgaatacatagaggcagaggaggtggacacggtggacgtctccggcgtgcccgcagaggtgctgtgcaacatcgaggccgacacctactggtgcatgagcaagctgctggatggcattcaggacaactacacctttgcccaacctgggattcaaatgaaagtgaaaatgttagaagaactcgtgagccggattgatgagcaagtgcaccgcacctggccaacacgaaggggatgacacagatcctctaagtcagccc

SEQ ID NO: 333928 - DNA, 2441 bp, Homo sapiens
ccccaaccccatgcaccaggctgccctggggaagggccaggcaaggcatccccccgactccatgtaccaggttgccctggggaagggccaggtgaggcatctccccgactccatgcaccaggctgccctggggaagggccagtctgaaccggacggcttttctcatttccacttgtacgtgtgcgctgcttttctcgtgagatggaggaaggaaatactagaagaaaaagattttcaagagctgctgctcttcctccagaacctgcccacagcccactgggatgatgaggacatcagcctgttgctggccgaggcctaccgcctcaagtttgcttttgccgacgcccccaatcactacaagaaatgagcccaggcccacccgcagctggcctcactgtcccgggtggcgcgccccacctgcctggctggtggtaggcccctgtgagctggtcccgggctgctaaaaggccttgtgaggtggccccaccctccaggggagctggtgaagatgggccacagacctggtctagggctgacaaagacagggacagcctttgttttctgagataccaaagagagccaggggagggccccgggttcggcggccagaggcaggtcaggggtcccctctccctctccctgcaatgtccttgccaaatgactgcctcctgctgcccctagtccggggcagcctaggaggccgaccctctttggagtcctgctgtctgggtgccagggccggaacgaggtagtggccatctcatacctactctgaaatgcaaaacttctattctgttgagtgaaagaataaaatgtagacaaaatctagaccgagacgttgcgctgacccggggtctctgtgccgcgaggtcccctcacagctgtatttcactgctgctggccctttccctccgtgtgttttcctgcttgcttggtttaaacgtggctgggaagctgaaggctggagtccaagccgtgagcccgccgagtgcctgggaggccgtgggaccaaaggctgggagcagagggaggcctcgccatcgccttactttccaccttgaacctcttttacaagagagaaacccccacctccctgaggtccagggccaagtggccccgccacgcaggtaggcgccggcctcagccagagcccctggaggcccacccaggctgtcgggccatgttgggctggcagacgggcagggggtcgcgtccctgtcatcaaagccctgaaccacagtgctcttctcaccgcagcctggaagcggaatgagcttttggagacttcctgggacttgctgtccttgtccaggtctgccaggtgtaggggaggtgtgactggttccatcatggaccggttcctccgtggaccggttccgccatggaccggttccgccatggaccggttccgccatggaccactcctgccctggaccactcctgccctggaccggttctgccgtggactggttcccgccgtggaccagttcccgctgtatactggttctgccctggactggttcccgctgtggactggttccttggggctctaagtgcggaagggcccagagctggtccctgcccagcgccctgctagggctgtgtccttggctccaggggccttgggactggcttcccagcgttccctcggtgtgtcacaggctgcatgacccctggaatgcgggcagggccacagccacagtctgtctgatccctgagcccaggacaggctcacgtcctcagcgacccactggtgactgacttcccagactctcctctgtccctcaggagcagccgtgtcctctcccaggccctaggacactgccagagactgtgggacatacaggcataagtgatgtgtgtgtttctgcttctgttttaaaaatccagggtcattacacacagcatggaaattagcacaaaatgctgtgcaaacgtcagatgctcccaaaccagcaaagggatgggcttgcttcacatcagatgcgggcacgccttacccctgccttccgtgtccccaccccagggtcaagggttcctcagaccagccatgcctcctcctcctgccgcctccttttctagatggggaggggattccgtcacaagaagagccgcccctcggccgtgtgcaggaagccccatgtcgctttgccgagatcagccctgggaggatccccttctctagctcagatcatgccgtgtggccagaaggctgcggacacaactgacctgcttctcgaggtggttgatgttttaaacaggaagctccacggagttcagccctgtgtgcatttcctcatgtatgtaaacgccaagactgaatgtgagaggtgttggccgcgggccttaagtctgagcagatccatctggaatgttcggggtgtgctgtctggatgtggtgcgctaaaaacacggaataaagatcagtgacaaagccgcgg

SEQ ID NO: 333929 - DNA, 775 bp, Homo sapiens
agcggggtaggaggcggaagagcttctcggctctaggctctggagtcccgggagcagtgaggggccacccggggcacaggaaagggccgctaggggagggccgggtgcactcggggtgtctgggccgcgggtctgagggatgaggaggggccatggccagcgacggggccaggaagcaattctggaagcgcagcaacagcaagctcccgggcagcatccagcacgtgtatggtgcccagcaccccccctttgatccactgttacatggcactttgctcaggtccacggccaagatgccgaccacaccagtgaaggccaagagggtcagcaccttccaggagtttgagagcaataccagcgatgcctgggacgctggggaggacgacgatgagctcctggccatggcggcggagagcctgaactccgaggtggtcatggagacggccaaccgtgtgctgcgtaaccacagccagcggcaggggcggcccacgctgcaggaggggccagggcttcagcagaagcccaggcccgaggcagagccgccctcaccccccagcggcgacctgcttctcgaggtggttgatgttttaaacaggaagctccacggagttcagccctgtgtgcatttcctcatgtatgtaaacgccaagactgaatgtgagaggtgttggccgcgggccttaagtctgagcagatccatctggaatgttcggggtgtgctgtctggatgtggtgcgctaaaaacacggaataaagatcagtgacaaagccgcgg

SEQ ID NO: 333930 - DNA, 299 bp, Homo sapiens
cagctggctgacctcctctgtgtgtgtttcttttttcccacaatttgtgctcctctctgtgtcagatttcagaatgccaagcttaggtatgatgcaagtctttttatttcacgcttaataatagggactccatgaattagctataaccatgtatattttttgtttatttctcacccagggttaccttcccgccaatgtagaccggagaccagccactctccagagaaaacaaaaagaatattttgcatttattgagcactattacgattctaggaacgacgaagttcaccaggacacat

SEQ ID NO: 333931 - DNA, 3780 bp, Homo sapiens
agcggggtaggaggcggaagagcttctcggctctaggctctggagtcccgggagcagtgaggggccacccggggcacaggaaagggccgctaggggagggccgggtgcactcggggtgtctgggccgcgggtctgagggatgaggaggggccatggccagcgacggggccaggaagcaattctggaagcgcagcaacagcaagctcccgggcagcatccagcacgtgtatggtgcccagcaccccccctttgatccactgttacatggcactttgctcaggtccacggccaagatgccgaccacaccagtgaaggccaagagggtcagcaccttccaggagtttgagagcaataccagcgatgcctgggacgctggggaggacgacgatgagctcctggccatggcggcggagagcctgaactccgaggtggtcatggagacggccaaccgtgtgctgcgtaaccacagccagcggcaggggcggcccacgctgcaggaggggccagggcttcagcagaagcccaggcccgaggcagagccgccctcaccccccagcggcgacctccggctggtgaagtcggtcagtgagagccacacgtcctgtcctgcagaaagtgccagcgatgccgcccctctgcagaggtcccagtctctcccacactcggccaccgtcacgctgggtggcacatctgaccccagcactctcagcagctcagcgctgagcgaaagagaggcctcccggctcgacaagttcaagcagctgcttgccggccccaacacggaccttgaggaattacggaggttgagctggtccggaatccctaagccagtgcgtccaatgacgtggaagctcctctcaggttaccttcccgccaatgtagaccggagaccagccactctccagagaaaacaaaaagaatattttgcatttattgagcactattacgattctaggaacgacgaagttcaccaggacacatacaggcagatccacatagacatccctcgcatgagccctgaagcgttgatcctgcagcccaaggtgacggagatttttgaaaggatcttgttcatatgggcgatccgccacccagccagtggatacgttcagggtataaatgatctcgtcactcctttctttgtggtcttcatttgtgaatacatagaggcagaggaggtggacacggtggacgtctccggcgtgcccgcagaggtgctgtgcaacatcgaggccgacacctactggtgcatgagcaagctgctggatggcattcaggacaactacacctttgcccaacctgggattcaaatgaaagtgaaaatgttagaagaactcgtgagccggattgatgagcaagtgcaccggcacctggaccaacacgaagtgagatacctgcagtttgccttccgctggatgaacaacctgctgatgagggaggtgcccctgcgttgtaccatccgcctgtgggacacctaccagtctgaaccggacggcttttctcatttccacttgtacgtgtgcgctgcttttctcgtgagatggaggaaggaaatactagaagaaaaagattttcaagagctgctgctcttcctccagaacctgcccacagcccactgggatgatgaggacatcagcctgttgctggccgaggcctaccgcctcaagtttgcttttgccgacgcccccaatcactacaagaaatgagcccaggcccacccgcagctggcctcactgtcccgggtggcgcgccccacctgcctggctggtggtaggcccctgtgagctggtcccgggctgctaaaaggccttgtgaggtggccccaccctccaggggagctggtgaagatgggccacagacctggtctagggctgacaaagacagggacagcctttgttttctgagataccaaagagagccaggggagggccccgggttcggcggccagaggcaggtcaggggtcccctctccctctccctgcaatgtccttgccaaatgactgcctcctgctgcccctagtccggggcagcctaggaggccgaccctctttggagtcctgctgtctgggtgccagggccggaacgaggtagtggccatctcatacctactctgaaatgcaaaacttctattctgttgagtgaaagaataaaatgtagacaaaatctagaccgagacgttgcgctgacccggggtctctgtgccgcgaggtcccctcacagctgtatttcactgctgctggccctttccctccgtgtgttttcctgcttgcttggtttaaacgtggctgggaagctgaaggctggagtccaagccgtgagcccgccgagtgcctgggaggccgtgggaccaaaggctgggagcagagggaggcctcgccatcgccttactttccaccttgaacctcttttacaagagagaaacccccacctccctgaggtccagggccaagtggccccgccacgcaggtaggcgccggcctcagccagagcccctggaggcccacccaggctgtcgggccatgttgggctggcagacgggcagggggtcgcgtccctgtcatcaaagccctgaaccacagtgctcttctcaccgcagcctggaagcggaatgagcttttggagacttcctgggacttgctgtccttgtccaggtctgccaggtgtaggggaggtgtgactggttccatcatggaccggttcctccgtggaccggttccgccatggaccggttccgccatggaccggttccgccatggaccactcctgccctggaccactcctgccctggaccggttctgccgtggactggttcccgccgtggaccagttcccgctgtatactggttctgccctggactggttcccgctgtggactggttccttggggctctaagtgcggaagggcccagagctggtccctgcccagcgccctgctagggctgtgtccttggctccaggggccttgggactggcttcccagcgttccctcggtgtgtcacaggctgcatgacccctggaatgcgggcagggccacagccacagtctgtctgatccctgagcccaggacaggctcacgtcctcagcgacccactggtgactgacttcccagactctcctctgtccctcaggagcagccgtgtcctctcccaggccctaggacactgccagagactgtgggacatacaggcataagtgatgtgtgtgtttctgcttctgttttaaaaatccagggtcattacacacagcatggaaattagcacaaaatgctgtgcaaacgtcagatgctcccaaaccagcaaagggatgggcttgcttcacatcagatgcgggcacgccttacccctgccttccgtgtccccaccccagggtcaagggttcctcagaccagccatgcctcctcctcctgccgcctccttttctagatggggaggggattccgtcacaagaagagccgcccctcggccgtgtgcaggaagccccatgtcgctttgccgagatcagccctgggaggatccccttctctagctcagatcatgccgtgtggccagaaggctgcggacacaactgacctgcttctcgaggtggttgatgttttaaacaggaagctccacggagttcagccctgtgtgcatttcctcatgtatgtaaacgccaagactgaatgtgagaggtgttggccgcgggccttaagtctgagcagatccatctggaatgttcggggtgtgctgtctggatgtggtgcgctaaaaacacggaataaagatcagtgacaaagccgcgg

SEQ ID NO: 333932 - DNA, 3638 bp, Homo sapiens
agcggggtaggaggcggaagagcttctcggctctaggctctggagtcccgggagcagtgaggggccacccggggcacaggaaagggccgctaggggagggccgggtgcactcggggtgtctgggccgcgggtctgagggatgaggaggggccatggccagcgacggggccaggaagcaattctggaagcgcagcaacagcaagctcccgggcagcatccagcacgtgtatggtgcccagcaccccccctttgatccactgttacatggcactttgctcaggtccacggccaagatgccgaccacaccagtgaaggccaagagggtcagcaccttccaggagtttgagagcaataccagcgatgcctgggacgctggggaggacgacgatgagctcctggccatggcggcggagagcctgaactccgaggtggtcatggagacggccaaccgtgtgctgcgtaaccacagccagcggcaggggcggcccacgctgcaggaggggccagggcttcagcagaagcccaggcccgaggcagagccgccctcaccccccagcggcgacctccggctggtgaagtcggtcagtgagagccacacgtcctgtcctgcagaaagtgccagcgatgccgcccctctgcagaggtcccagtctctcccacactcggccaccgtcacgctgggtggcacatctgaccccagcactctcagcagctcagcgctgagcgaaagagaggcctcccggctcgacaagttcaagcagctgcttgccggccccaacacggaccttgaggaattacggaggttgagctggtccggaatccctaagccagtgcgtccaatgacgtggaagctcctctcaggttaccttcccgccaatgtagaccggagaccagccactctccagagaaaacaaaaagaatattttgcatttattgagcactattacgattctaggaacgacgaagttcaccaggacacatacaggcagatccacatagacatccctcgcatgagccctgaagcgttgatcctgcagcccaaggtgacggagatttttgaaaggatcttgttcatatgggcgatccgccacccagccagtggatacgttcagggtataaatgatctcgtcactcctttctttgtggtcttcatttgtgaatacataggacaactacacctttgcccaacctgggattcaaatgaaagtgaaaatgttagaagaactcgtgagccggattgatgagcaagtgcaccggcacctggaccaacacgaagtgagatacctgcagtttgccttccgctggatgaacaacctgctgatgagggaggtgcccctgcgttgtaccatccgcctgtgggacacctaccagtctgaaccggacggcttttctcatttccacttgtacgtgtgcgctgcttttctcgtgagatggaggaaggaaatactagaagaaaaagattttcaagagctgctgctcttcctccagaacctgcccacagcccactgggatgatgaggacatcagcctgttgctggccgaggcctaccgcctcaagtttgcttttgccgacgcccccaatcactacaagaaatgagcccaggcccacccgcagctggcctcactgtcccgggtggcgcgccccacctgcctggctggtggtaggcccctgtgagctggtcccgggctgctaaaaggccttgtgaggtggccccaccctccaggggagctggtgaagatgggccacagacctggtctagggctgacaaagacagggacagcctttgttttctgagataccaaagagagccaggggagggccccgggttcggcggccagaggcaggtcaggggtcccctctccctctccctgcaatgtccttgccaaatgactgcctcctgctgcccctagtccggggcagcctaggaggccgaccctctttggagtcctgctgtctgggtgccagggccggaacgaggtagtggccatctcatacctactctgaaatgcaaaacttctattctgttgagtgaaagaataaaatgtagacaaaatctagaccgagacgttgcgctgacccggggtctctgtgccgcgaggtcccctcacagctgtatttcactgctgctggccctttccctccgtgtgttttcctgcttgcttggtttaaacgtggctgggaagctgaaggctggagtccaagccgtgagcccgccgagtgcctgggaggccgtgggaccaaaggctgggagcagagggaggcctcgccatcgccttactttccaccttgaacctcttttacaagagagaaacccccacctccctgaggtccagggccaagtggccccgccacgcaggtaggcgccggcctcagccagagcccctggaggcccacccaggctgtcgggccatgttgggctggcagacgggcagggggtcgcgtccctgtcatcaaagccctgaaccacagtgctcttctcaccgcagcctggaagcggaatgagcttttggagacttcctgggacttgctgtccttgtccaggtctgccaggtgtaggggaggtgtgactggttccatcatggaccggttcctccgtggaccggttccgccatggaccggttccgccatggaccactcctgccctggaccggttctgccgtggactggttcccgccgtggaccagttcccgctgtatactggttctgccctggactggttcccgctgtggactggttccttggggctctaagtgcggaagggcccagagctggtccctgcccagcgccctgctagggctgtgtccttggctccaggggccttgggactggcttcccagcgttccctcggtgtgtcacaggctgcatgacccctggaatgcgggcagggccacagccacagtctgtctgatccctgagcccaggacaggctcacgtcctcagcgacccactggtgactgacttcccagactctcctctgtccctcaggagcagccgtgtcctctcccaggccctaggacactgccagagactgtgggacatacaggcataagtgatgtgtgtgtttctgcttctgttttaaaaatccagggtcattacacacagcatggaaattagcacaaaatgctgtgcaaacgtcagatgctcccaaaccagcaaagggatgggcttgcttcacatcagatgcgggcacgccttacccctgccttccgtgtccccaccccagggtcaagggttcctcagaccagccatgcctcctcctcctgccgcctccttttctagatggggaggggattccgtcacaagaagagccgcccctcggccgtgtgcaggaagccccatgtcgctttgccgagatcagccctgggaggatccccttctctagctcagatcatgccgtgtggccagaaggctgcggacacaactgacctgcttctcgaggtggttgatgttttaaacaggaagctccacggagttcagccctgtgtgcatttcctcatgtatgtaaacgccaagactgaatgtgagaggtgttggccgcgggccttaagtctgagcagatccatctggaatgttcggggtgtgctgtctggatgtggtgcgctaaaaacacggaataaagatcagtgacaaagccgcgg

SEQ ID NO: 333933 - DNA, 3739 bp, Homo sapiens
agcggggtaggaggcggaagagcttctcggctctaggctctggagtcccgggagcagtgaggggccacccggggcacaggaaagggccgctaggggagggccgggtgcactcggggtgtctgggccgcgggtctgagggatgaggaggggccatggccagcgacggggccaggaagcaattctggaagcgcagcaacagcaagctcccgggcagcatccagcacgtgtatggtgcccagcaccccccctttgatccactgttacatggcactttgctcaggtccacggccaagatgccgaccacaccagtgaaggccaagagggtcagcaccttccaggagtttgagagcaataccagcgatgcctgggacgctggggaggacgacgatgagctcctggccatggcggcggagagcctgaactccgaggtggtcatggagacggccaaccgtgtgctgcgtaaccacagccagcggcaggggcggcccacgctgcaggaggggccagggcttcagcagaagcccaggcccgaggcagagccgccctcaccccccagcggcgacctccggctggtgaagtcggtcagtgagagccacacgtcctgtcctgcagaaagtgccagcgatgccgcccctctgcagaggtcccagtctctcccacactcggccaccgtcacgctgggtggcacatctgaccccagcactctcagcagctcagcgctgagcgaaagagaggcctcccggctcgacaagttcaagcagctgcttgccggccccaacacggaccttgaggaattacggaggttgagctggtccggaatccctaagccagtgcgtccaatgacgtggaagctcctctcaggttaccttcccgccaatgtagaccggagaccagccactctccagagaaaacaaaaagaatattttgcatttattgagcactattacgattctaggaacgacgaagttcaccaggacacatacaggcagatccacatagacatccctcgcatgagccctgaagcgttgatcctgcagcccaaggtgacggagatttttgaaaggatcttgttcatatgggcgatccgccacccagccagtggatacgttcagggtataaatgatctcgtcactcctttctttgtggtcttcatttgtgaatacatagaggcagaggaggtggacacggtggacgtctccggcgtgcccgcagaggtgctgtgcaacatcgaggccgacacctactggtgcatgagcaagctgctggatggcattcaggacaactacacctttgcccaacctgggattcaaatgaaagtgaaaatgttagaagaactcgtgagccggattgatgagcaagtgcaccggcacctggaccaacacgaagtgagatacctgcagtttgccttccgctggatgaacaacctgctgatgagggaggtgcccctgcgttgtaccatccgcctgtgggacacctaccagtctgaaccggacggcttttctcatttccacttgtacgtgtgcgctgcttttctcgtgagatggaggaaggaaatactagaagaaaaagattttcaaggatgatgaggacatcagcctgttgctggccgaggcctaccgcctcaagtttgcttttgccgacgcccccaatcactacaagaaatgagcccaggcccacccgcagctggcctcactgtcccgggtggcgcgccccacctgcctggctggtggtaggcccctgtgagctggtcccgggctgctaaaaggccttgtgaggtggccccaccctccaggggagctggtgaagatgggccacagacctggtctagggctgacaaagacagggacagcctttgttttctgagataccaaagagagccaggggagggccccgggttcggcggccagaggcaggtcaggggtcccctctccctctccctgcaatgtccttgccaaatgactgcctcctgctgcccctagtccggggcagcctaggaggccgaccctctttggagtcctgctgtctgggtgccagggccggaacgaggtagtggccatctcatacctactctgaaatgcaaaacttctattctgttgagtgaaagaataaaatgtagacaaaatctagaccgagacgttgcgctgacccggggtctctgtgccgcgaggtcccctcacagctgtatttcactgctgctggccctttccctccgtgtgttttcctgcttgcttggtttaaacgtggctgggaagctgaaggctggagtccaagccgtgagcccgccgagtgcctgggaggccgtgggaccaaaggctgggagcagagggaggcctcgccatcgccttactttccaccttgaacctcttttacaagagagaaacccccacctccctgaggtccagggccaagtggccccgccacgcaggtaggcgccggcctcagccagagcccctggaggcccacccaggctgtcgggccatgttgggctggcagacgggcagggggtcgcgtccctgtcatcaaagccctgaaccacagtgctcttctcaccgcagcctggaagcggaatgagcttttggagacttcctgggacttgctgtccttgtccaggtctgccaggtgtaggggaggtgtgactggttccatcatggaccggttcctccgtggaccggttccgccatggaccggttccgccatggaccggttccgccatggaccactcctgccctggaccactcctgccctggaccggttctgccgtggactggttcccgccgtggaccagttcccgctgtatactggttctgccctggactggttcccgctgtggactggttccttggggctctaagtgcggaagggcccagagctggtccctgcccagcgccctgctagggctgtgtccttggctccaggggccttgggactggcttcccagcgttccctcggtgtgtcacaggctgcatgacccctggaatgcgggcagggccacagccacagtctgtctgatccctgagcccaggacaggctcacgtcctcagcgacccactggtgactgacttcccagactctcctctgtccctcaggagcagccgtgtcctctcccaggccctaggacactgccagagactgtgggacatacaggcataagtgatgtgtgtgtttctgcttctgttttaaaaatccagggtcattacacacagcatggaaattagcacaaaatgctgtgcaaacgtcagatgctcccaaaccagcaaagggatgggcttgcttcacatcagatgcgggcacgccttacccctgccttccgtgtccccaccccagggtcaagggttcctcagaccagccatgcctcctcctcctgccgcctccttttctagatggggaggggattccgtcacaagaagagccgcccctcggccgtgtgcaggaagccccatgtcgctttgccgagatcagccctgggaggatccccttctctagctcagatcatgccgtgtggccagaaggctgcggacacaactgacctgcttctcgaggtggttgatgttttaaacaggaagctccacggagttcagccctgtgtgcatttcctcatgtatgtaaacgccaagactgaatgtgagaggtgttggccgcgggccttaagtctgagcagatccatctggaatgttcggggtgtgctgtctggatgtggtgcgctaaaaacacggaataaagatcagtgacaaagccgcgg

SEQ ID NO: 333934 - DNA, 3370 bp, Homo sapiens
agcggggtaggaggcggaagagcttctcggctctaggctctggagtcccgggagcagtgaggggccacccggggcacaggaaagggccgctaggggagggccgggtgcactcggggtgtctgggccgcgggtctgagggatgaggaggggccatggccagcgacggggccaggaagcaattctggaagcgcagcaacagcaagctcccgggcagcatccagcacgtgtatggtgcccagcaccccccctttgatccactgttacatggcactttgctcaggtccacggccaagatgccgaccacaccagtgaaggccaagagggtcagcaccttccaggagtttgagagcaataccagcgatgcctgggacgctggggaggacgacgatgagctcctggccatggcggcggagagcctgaactccgaggtggtcatggagacggccaaccgtgtgctgcgtaaccacagccagcggcaggggcggcccacgctgcaggaggggccagggcttcagcagaagcccaggcccgaggcagagccgccctcaccccccagcggcgacctccggctggtgaagtcggtcagtgagagccacacgtcctgtcctgcagaaagtgccagcgatgccgcccctctgcagaggtcccagtctctcccacactcggccaccgtcacgctgggtggcacatctgaccccagcactctcagcagctcagcgctgagcgaaagagaggcctcccggctcgacaagttcaagcagctgcttgccggccccaacacggaccttgaggcagaggaggtggacacggtggacgtctccggcgtgcccgcagaggtgctgtgcaacatcgaggccgacacctactggtgcatgagcaagctgctggatggcattcaggacaactacacctttgcccaacctgggattcaaatgaaagtgaaaatgttagaagaactcgtgagccggattgatgagcaagtgcaccggcacctggaccaacacgaagtgagatacctgcagtttgccttccgctggatgaacaacctgctgatgagggaggtgcccctgcgttgtaccatccgcctgtgggacacctaccagtctgaaccggacggcttttctcatttccacttgtacgtgtgcgctgcttttctcgtgagatggaggaaggaaatactagaagaaaaagattttcaagagctgctgctcttcctccagaacctgcccacagcccactgggatgatgaggacatcagcctgttgctggccgaggcctaccgcctcaagtttgcttttgccgacgcccccaatcactacaagaaatgagcccaggcccacccgcagctggcctcactgtcccgggtggcgcgccccacctgcctggctggtggtaggcccctgtgagctggtcccgggctgctaaaaggccttgtgaggtggccccaccctccaggggagctggtgaagatgggccacagacctggtctagggctgacaaagacagggacagcctttgttttctgagataccaaagagagccaggggagggccccgggttcggcggccagaggcaggtcaggggtcccctctccctctccctgcaatgtccttgccaaatgactgcctcctgctgcccctagtccggggcagcctaggaggccgaccctctttggagtcctgctgtctgggtgccagggccggaacgaggtagtggccatctcatacctactctgaaatgcaaaacttctattctgttgagtgaaagaataaaatgtagacaaaatctagaccgagacgttgcgctgacccggggtctctgtgccgcgaggtcccctcacagctgtatttcactgctgctggccctttccctccgtgtgttttcctgcttgcttggtttaaacgtggctgggaagctgaaggctggagtccaagccgtgagcccgccgagtgcctgggaggccgtgggaccaaaggctgggagcagagggaggcctcgccatcgccttactttccaccttgaacctcttttacaagagagaaacccccacctccctgaggtccagggccaagtggccccgccacgcaggtaggcgccggcctcagccagagcccctggaggcccacccaggctgtcgggccatgttgggctggcagacgggcagggggtcgcgtccctgtcatcaaagccctgaaccacagtgctcttctcaccgcagcctggaagcggaatgagcttttggagacttcctgggacttgctgtccttgtccaggtctgccaggtgtaggggaggtgtgactggttccatcatggaccggttcctccgtggaccggttccgccatggaccggttccgccatggaccactcctgccctggaccggttctgccgtggactggttcccgccgtggaccagttcccgctgtatactggttctgccctggactggttcccgctgtggactggttccttggggctctaagtgcggaagggcccagagctggtccctgcccagcgccctgctagggctgtgtccttggctccaggggccttgggactggcttcccagcgttccctcggtgtgtcacaggctgcatgacccctggaatgcgggcagggccacagccacagtctgtctgatccctgagcccaggacaggctcacgtcctcagcgacccactggtgactgacttcccagactctcctctgtccctcaggagcagccgtgtcctctcccaggccctaggacactgccagagactgtgggacatacaggcataagtgatgtgtgtgtttctgcttctgttttaaaaatccagggtcattacacacagcatggaaattagcacaaaatgctgtgcaaacgtcagatgctcccaaaccagcaaagggatgggcttgcttcacatcagatgcgggcacgccttacccctgccttccgtgtccccaccccagggtcaagggttcctcagaccagccatgcctcctcctcctgccgcctccttttctagatggggaggggattccgtcacaagaagagccgcccctcggccgtgtgcaggaagccccatgtcgctttgccgagatcagccctgggaggatccccttctctagctcagatcatgccgtgtggccagaaggctgcggacacaactgacctgcttctcgaggtggttgatgttttaaacaggaagctccacggagttcagccctgtgtgcatttcctcatgtatgtaaacgccaagactgaatgtgagaggtgttggccgcgggccttaagtctgagcagatccatctggaatgttcggggtgtgctgtctggatgtggtgcgctaaaaacacggaataaagatcagtgacaaagccgcgg

SEQ ID NO: 333935 - DNA, 2273 bp, Homo sapiens
  misc_feature (2209)..(2209): n is a, c, g, or t
  misc_feature (2219)..(2219): n is a, c, g, or t
agcggggtaggaggcggaagagcttctcggctctaggctctggagtcccgggagcagtgaggggccacccggggcacaggaaagggccgctaggggagggccgggtgcactcggggtgtctgggccgcgggtctgagggatgaggaggggccatggccagcgacggggccaggaagcaattctggaagcgcagcaacagcaagctcccgggcagcatccagcacgtgtatggtgcccagcaccccccctttgatccactgttacatggcactttgctcaggtccacggccaagatgccgaccacaccagtgaaggccaagagggtcagcaccttccaggagtttgagagcaataccagcgatgcctgggacgctggggaggacgacgatgagctcctggccatggcggcggagagcctgaactccgaggtggtcatggagacggccaaccgtgtgctgcgtaaccacagccagcggcaggggcggcccacgctgcaggaggggccagggcttcagcagaagcccaggcccgaggcagagccgccctcaccccccagcggcgacctccggctggtgaagtcggtcagtgagagccacacgtcctgtcctgcagaaagtgccagcgatgccgcccctctgcagaggtcccagtctctcccacactcggccaccgtcacgctgggtggcacatctgaccccagcactctcagcagctcagcgctgagcgaaagagaggcctcccggctcgacaagttcaagcagctgcttgccggccccaacacggaccttgaggaattacggaggttgagctggtccggaatccctaagccagtgcgtccaatgacgtggaagctcctctcaggttaccttcccgccaatgtagaccggagaccagccactctccagagaaaacaaaaagaatattttgcatttattgagcactattacgattctaggaacgacgaagttcaccaggacacatacaggcagatccacatagacatccctcgcatgagccctgaagcgttgatcctgcagcccaaggtgacggagatttttgaaaggatcttgttcatatgggcgatccgccacccagccagtggatacgttcagggtataaatgatctcgtcactcctttctttgtggtcttcatttgtgaatacatagaggcagaggaggtggacacggtggacgtctccggcgtgcccgcagaggtgctgtgcaacatcgaggccgacacctactggtgcatgagcaagctgctggatggcattcaggacaactacacctttgcccaacctgggattcaaatgaaagtgaaaatgttagaagaactcgtgagccggattgatgagcaagtgcaccggcacctggaccaacacgaagtgagatacctgcagtttgccttccgctggatgaacaacctgctgatgagggaggtgcccctgcgttgtaccatccgcctgtgggacacctaccagtctgaaccggacggcttttctcatttccacttgtacgtgtgcgctgcttttctcgtgagatggaggaaggaaatactagaagaaaaagattttcaagagctgctgctcttcctccagaacctgcccacagcccactgggatgatgaggacatcagcctgttgctggccgaggcctaccgcctcaagtttgcttttgccgacgcccccaatcactacaagaaatgagcccaggcccacccgcagctggcctcactgtcccgggtggcgcgccccacctgcctggctggtggtaggcccctgtgagctggtcccgggctgctaaaaggccttgtgaggtggccccaccctccaggggagctggtgaagatgggccacagacctggtctagggctgacaaagacagggacagcctttgttttctgagataccaaagagagccaggggagggccccgggttcggcggccagaggcaggtcaggggtcccctctccctctccctgcaatgtccttgccaaatgactgcctcctgctgcccctagtccggggcagcctaggaggccgaccctctttggagtcctgctgtctgggtgccagggccggaacgaggtagtggccatctcatacctactctgaaatgcaaaacttctattctgttgagtgaaagaataaaatgtagacaaaatcaaaaaaaaaaaaaaaaaaaaaaaaaaaaaaaaaaaaaaaaaaanaaaaaaaaanaaaaaaaaaaaaaaaaaaaaaaaaaaaaaaaaaaaaaaaaaaaaaaaaaaaaaa

SEQ ID NO: 333936 - DNA, 1343 bp, Homo sapiens
agcggggtaggaggcggaagagcttctcggctctaggctctggagtcccgggagcagtgaggggccacccggggcacaggaaagggccgctaggggagggccgggtgcactcggggtgtctgggccgcgggtctgagggatgaggaggggccatggccagcgacggggccaggaagcaattctggaagcgcagcaacagcaagctcccgggcagcatccagcacgtgtatggtgcccagcaccccccctttgatccactgttacatggcactttgctcaggtccacggccaagatgccgaccacaccagtgaaggccaagagggtcagcaccttccaggagtttgagagcaataccagcgatgcctgggacgctggggaggacgacgatgagctcctggccatggcggcggagagcctgaactccgaggtggtcatggagacggccaaccgtgtgctgcgtaaccacagccagcggcaggggcggcccacgctgcaggaggggccagggcttcagcagaagcccaggcccgaggcagagccgccctcaccccccagcggcgacctccggctggtgaagtcggtcagtgagagccacacgtcctgtcctgcagaaagtgccagcgatgccgcccctctgcagaggtcccagtctctcccacactcggccaccgtcacgctgggtggcacatctgaccccagcactctcagcagctcagcgctgagcgaaagagaggcctcccggctcgacaagttcaagcagctgcttgccggccccaacacggaccttgaggaattacggaggttgagctggtccggaatccctaagccagtgcgtccaatgacgtggaagctcctctcaggttaccttcccgccaatgtagaccggagaccagccactctccagagaaaacaaaaagaatattttgcatttattgagcactattacgattctaggaacgacgaagttcaccaggacacatacaggcagatccacatagacatccctcgcatgagccctgaagcgttgatcctgcagcccaaggtgacggagatttttgaaaggatcttgttcatatgggcgatccgccacccagccagtggatacgttcagggtataaatgatctcgtcactcctttctttgtggtcttcatttgtgaatacatagaggcagaggaggtggacacggtggacgtctccggcgtgcccgcagaggtgctgtgcaacatcgaggccgacacctactggtgcatgagcaagctgctggatggcattcagacaactacacctttgcccaacctgggacccttggggcttaagggacccttgggggtaccgagctcg

SEQ ID NO: 333937 - DNA, 1485 bp, Homo sapiens
agcggggtaggaggcggaagagcttctcggctctaggctctggagtcccgggagcagtgaggggccacccggggcacaggaaagggccgctaggggagggccgggtgcactcggggtgtctgggccgcgggtctgagggatgaggaggggccatggccagcgacggggccaggaagcaattctggaagcgcagcaacagcaagctcccgggcagcatccagcacgtgtatggtgcccagcaccccccctttgatccactgttacatggcactttgctcaggtccacggccaagatgccgaccacaccagtgaaggccaagagggtcagcaccttccaggagtttgagagcaataccagcgatgcctgggacgctggggaggacgacgatgagctcctggccatggcggcggagagcctgaactccgaggtggtcatggagacggccaaccgtgtgctgcgtaaccacagccagcggcaggggcggcccacgctgcaggaggggccagggcttcagcagaagcccaggcccgaggcagagccgccctcaccccccagcggcgacctccggctggtgaagtcggtcagtgagagccacacgtcctgtcctgcagaaagtgccagcgatgccgcccctctgcagaggtcccagtctctcccacactcggccaccgtcacgctgggtggcacatctgaccccagcactctcagcagctcagcgctgagcgaaagagaggcctcccggctcgacaagttcaagcagctgcttgccggccccaacacggaccttgaggaattacggaggttgagctggtccggaatccctaagccagtgcgtccaatgacgtggaagctcctctcaggttaccttcccgccaatgtagaccggagaccagccactctccagagaaaacaaaaagaatattttgcatttattgagcactattacgattctaggaacgacgaagttcaccaggacacatacaggcagatccacatagacatccctcgcatgagccctgaagcgttgatcctgcagcccaaggtgacggagatttttgaaaggatcttgttcatatgggcgatccgccacccagccagtggatacgttcagggtataaatgatctcgtcactcctttctttgtggtcttcatttgtgaatacataggtaagatttcttgcaaacattaaacgtgaactttagtggacttgctgtgtgttactatgtataattataacaatattgaaaattgctactaagtgtaatgttattaatgataggtaatattagagaataatagttttctcatcaacaacagctttccaaaatgtctttaatctacatgctcaactactgaagacattaaattgcagttataatgatgaatatcttctttttaacaatatttgaagatagataatatatttggggagtgtagtttattctaaaggccatcacagtaatggctttaatggtttcagtcat

SEQ ID NO: 333938 - DNA, 1222 bp, Homo sapiens
agcggggtaggaggcggaagagcttctcggctctaggctctggagtcccgggagcagtgaggggccacccggggcacaggaaagggccgctaggggagggccgggtgcactcggggtgtctgggccgcgggtctgagggatgaggaggggccatggccagcgacggggccaggaagcaattctggaagcgcagcaacagcaagctcccgggcagcatccagcacgtgtatggtgcccagcaccccccctttgatccactgttacatggcactttgctcaggtccacggccaagatgccgaccacaccagtgaaggccaagagggtcagcaccttccaggagtttgagagcaataccagcgatgcctgggacgctggggaggacgacgatgagctcctggccatggcggcggagagcctgaactccgaggtggtcatggagacggccaaccgtgtgctgcgtaaccacagccagcggcaggggcggcccacgctgcaggaggggccagggcttcagcagaagcccaggcccgaggcagagccgccctcaccccccagcggcgacctccggctggtgaagtcggtcagtgagagccacacgtcctgtcctgcagaaagtgccagcgatgccgcccctctgcagaggtcccagtctctcccacactcggccaccgtcacgctgggtggcacatctgaccccagcactctcagcagctcagcgctgagcgaaagagaggcctcccggctcgacaagttcaagcagctgcttgccggccccaacacggaccttgaggaattacggaggttgagctggtccggaatccctaagccagtgcgtccaatgacgtggaagctcctctcaggttaccttcccgccaatgtagaccggagaccagccactctccagagaaaacaaaatataaataaataaaaataaaagagtatactcctggcatgctttttatctgagaagatgtaaaacagggaaaagaacttcaggccgttctctttgtggctgagtttcattctgcctgcgtggtgacagcagccttgagctctctgggaattcacatcctgagcagtgtgctaggaggatgcgagggatgctggtgactctgctgtgagtttgagctgcttctgccaaaaaactcacgctcaggactcacaccttgtctatattttgagttacatacaataaagattttttaaaaaatcacagattca

SEQ ID NO: 333939 - DNA, 476 bp, Homo sapiens
ccgcctcggcctcccaaagtgctggaactacaggtgtgagccaccacgcctggcagctttgtgttcttttctttctgtgatcttgccttagatcacacagataaaacatgacaggacctggaccttaacacagtttggctctcaatcctgttctcataaccatcactgccttcatttatctgtgtcatcctcagacctgacacatagtaggtgctcagtcagtgttcactaagtaaatgatgaccaagaactctttgactgggtccaaggtgcttatcccaatacttcgccatggctacctccctcattcctcagctgacttgctctctctagcctggctgctcctattttatgtcctagacatggagccatggcaatgatgtagagctaacaggtgatacggtagccatcataatttaatgagtatggggctcatgcaaccacaagacacaggagccgagagctagctgtgcaca

SEQ ID NO: 333940 - DNA, 749 bp, Homo sapiens
gccgatgcgcagccgctggtcccggacaccaagaccaggaatgactgtgggagtctggcattctacagagagtgctgctgacctccagcgggacggctctcagggtgacccagcagggcccaagtgctgctcccttgttgcctcacttgcccttccccaacgtagcaggaggcagtccaggcatgagggattcagcctgttggggcagtcacgcccatgggatggggctagggaccataggaatgaaccccctcaccccatggagcttctaaagtgttaccacagtggggaagaggaagggccaaggctgttgtcccgaaattacagagtcgtggtgagtccccatggagcagcctcccaaggtcacattgctctgaaatggcagagtcaggacttgaacccaggtctgccctctcagcgatgggtcctctgcctcttctgtgtcgagggaggtagggcctggcccgggccttcctcactcagctttgtcagatagggagtcaagctgcagctctctgtggctacacttatgtccagccctggactaggagtcaggaaagccggcttctgcccccacctacccctctcaccaaatggcatacggacttctcccaagacctcctctcctctggccttttcctaagactgagaaatgaatgccttgcaaccttgggcaagttcctgctccaagcctccgtttcccggtttgaagatggtgttggctttgctccccacctgtctcacccact

SEQ ID NO: 333941 - DNA, 1946 bp, Homo sapiens
cgcgcatagcgcccacgcacgcgcactggggtgtccgccgggcatcgctctgtccagttattccagtttctctgggagcagccgagttgaccccacggtctgagatgtccaagctgcccgcagacagcagtgtcccgcagacaggcgcggcgaatggtgacagagacgtcccgcaggcggaggtaggccgcgggaggcgggagccggccccggcacagcctgaggaggccggggaaggcgcgatggcggcggccaggggaggcccggtgccggcggccagggaaggtcggatggcggcggccagggcagccccggcggcggcagccaggggagccccggtggcagcggcggcgttggccagggcagccgcggcgggcagggaaagcccggcggcggcggcggccagggaagcccggatggcggaggtcgcccgcttgctgggggagccagtggacgaagagggtcccgagggcaggcccaggtccagacacgggaacggaggcctggctgcgttgccctatctccgtctccgccacccacttagcgttttaggcatcaattaccagcagtttctccgccactatctggaaaattacccgattgctcccggcagaatacaagagcttgaagaacgccgcaggcgattcgtggaagcctgcagagcaagggaagcagcgtttgatgccgaatatcaggcgaaatcctcacagggtggacctcgatattttaacctttacgatagctctgactgcctctgaagttatcaaccctctgatagaagaacttggttgcgataagtttatcaatagagaatagttatgtggtgacactacttcaagagaacctctgcattccagtcataccaatcctgcaacttgattttcagaagtcaagagtatatcgcgataagacagtgcacaggtggaggggaaaaaaagggggagggggaagcttatcttgaaaaagcatcacagaagtagaaaaaaatgtcgaaagcattataactgtaacgttctttgagtttgtgattgatccacatttttccccctgcattatggaaaatgtctctcagcattgctttattacaaagtaaaggatggttttataaaattgagactgatgaaacatcaatactagagcccatgaggatgaaagaaattatcaaatagtgctgaacagaataagatgttaacgctgagttattaggactggaaggctatgaaaagaacttgaaattgtcggaatatgtgctctcttcatgtcatattcaatagaagtttctagtttaagattgattttgtgttttcttaggcatttcaagtgacaagcaaagtaaatgtatatattatgtgataaatcatgttttcaagaacgtcaaatttctggacttttttctttcaatttttaatttttaaagtttttttggtattaaaaaatctattcacaagccaaaaaatatataaaatatacagcgaaaagccttccattcttgttttcctccatccagtaccaacgatgacctctaatagccacagtttcctttccgtccttctagtttccttacgtgtacacaggcacatataaatctgggtttacttgttttatttcttcacagaagtcggcatattatatttactggtttatacattgctttctcattaagaacatatgttgacccttccaaaccactgtatttcctcattattttttaaagtggcattttattccattctgaggttatgtccaaatttacttaaccagggatatattgacggacatttaggttgtttcccatctctttctttgggcagaataaaaaattgctagagtagttcatcttgtacaattgctagagtagttcatcttgtatatcatgtggcatgtgcacaaatatagtattgcttcaattaaaaattcacttcatatttgaacatctctgaaatgtg

SEQ ID NO: 333942 - DNA, 1420 bp, Homo sapiens
cgcgcatagcgcccacgcacgcgcactggggtgtccgccgggcatcgctctgtccagttattccagtttctctgggagcagccgagttgaccccacggtctgagatgtccaagctgcccgcagacagcagtgtcccgcagacaggcgcggcgaatggtgacagagacgtcccgcaggcggaggtaggccgcgggaggcgggagccggccccggcacagcctgaggaggccggggaaggcgcgatggcggcggccaggggaggcccggtgccggcggccagggaaggtcggatggcggcggccagggcagccccggcggcggcagccaggggagccccggtggcagcggcggcgttggccagggcagccgcggcgggcagggaaagcccggcggcggcggcggccagggaagcccggatggcgtatgtgttcgcgcccggctttttgcctggggggggacaaccccatgttggacacccgaaaggaagggtgcccccccgagagggggcaaggcgcccccagggtcccaggacacgggcaaacgggaagggcctggctgcgttgccctatctccgtctccgccacccacttagcgttttaggcatcaattaccagcagtttctccgccactatctggaaaattacccgattgctcccggcagaatacaagagcttgaagaacgccgcaggcgattcgtggaagcctgcagagcaagggaagcagcgtttgatgccgaatatcaggcgaaatcctcacagggtggacctcgatattttaacctttacgatagctctgactgcctctgaagttatcaaccctctgatagaagaacttggttgcgataagtttatcaatagagaatagttatgtggtgacactacttcaagagaacctctgcattccagtcataccaatcctgcaacttgattttcagaagtcaagagtatatcgcgataagacagtgcacaggtggaggggaaaaaaagggggagggggaagcttatcttgaaaaagcatcacagaagtagaaaaaaatgtcgaaagcattataactgtaacgttctttgagtttgtgattgatccacatttttccccctgcattatggaaaatgtctctcagcattgctttattacaaagtaaaggatggttttataaaattgagactgatgaaacatcaatactagagcccatgaggatgaaagaaattatcaaatagtgctgaacagaataagatgttaacgctgagttattaggactggaaggctatgaaaagaacttgaaattgtcggaatatgtgctctcttcatgtcatattcaatagaagtttctagtttaagattgattttgtgttttcttaggcatttcaagtgacaagcaaagtaaatgtatatattatgtgataaatcatgttttcaagaa

SEQ ID NO: 333943 - DNA, 1372 bp, Homo sapiens
cgcgcatagcgcccacgcacgcgcactggggtgtccgccgggcatcgctctgtccagttattccagtttctctgggagcagccgagttgaccccacggtctgagatgtccaagctgcccgcagacagcagtgtcccgcagacaggcgcggcgaatggtgacagagacgtcccgcaggcggaggtaggccgcgggaggcgggagccggccccggcacagcctgaggaggccggggaaggcgcgatggcggcggccaggggaggcccggtgccggcggccagggaaggtcggatggcggcggccagggcagccccggcggcggcagccaggggagccccggtggcagcggcggcgttggccagggcagccgcggcgggcagggaaagcccggcggcggcggcggccagggaagcccggatggcggaggtcgcccgcttgctgggggagccagtggacgaagagggtcccgagggcaggcccaggtccagacacgggaacggaggcctggctgcgttgccctatctccgtctccgccacccacttagcgttttaggcatcaattaccagcagtttctccgccactatctggaaaattacccgattgctcccggcagaatacaagagcttgaagaacgccgcaggcgattcgtggaagcctgcagagcaagggaagcagcgtttgatgccgaatatcaggcgaaatcctcacagggtggacctcgatattttaacctttacgatagctctgactgcctctgaagttatcaaccctctgatagaagaacttggttgcgataagtttatcaatagagaatagttatgtggtgacactacttcaagagaacctctgcattccagtcataccaatcctgcaacttgattttcagaagtcaagagtatatcgcgataagacagtgcacaggtggaggggaaaaaaagggggagggggaagcttatcttgaaaaagcatcacagaagtagaaaaaaatgtcgaaagcattataactgtaacgttctttgagtttgtgattgatccacatttttccccctgcattatggaaaatgtctctcagcattgctttattacaaagtaaaggatggttttataaaattgagactgatgaaacatcaatactagagcccatgaggatgaaagaaattatcaaatagtgctgaacagaataagatgttaacgctgagttattaggactggaaggctatgaaaagaacttgaaattgtcggaatatgtgctctcttcatgtcatattcaatagaagtttctagtttaagattgattttgtgttttcttaggcatttcaagtgacaagcaaagtaaatgtatatattatgtgataaatcatgttttcaagaa

SEQ ID NO: 333944 - DNA, 1440 bp, Homo sapiens
cgcgcatagcgcccacgcacgcgcactggggtgtccgccgggcatcgctctgtccagttattccagtttctctgggagcagccgagttgaccccacggtctgagatgtccaagctgcccgcagacagcagtgtcccgcagacaggcgcggcgaatggtgacagagacgtcccgcaggcggaggtaggccgcgggaggcgggagccggccccggcacagcctgaggaggccggggaaggcgcgatggcggcggccaggggaggcccggtgccggcggccagggaaggtcggatggcggcggccagggcagccccggcggcggcagccaggggagccccggtggcagcggcggcgttggccagggcagccgcggcgggcagggaaagcccggcggcggcggcggccagggaagcccggatggcggaggtcgcccgcttgctgggggagccagtggacgaagagggtcccgagggcaggcccaggtccagacacgggaacggaggcctggctgcgttgccctatctccgtctccgccacccacttagcgttttaggcatcaattaccagcagtttctccgccactatctggaaaattacccgattgctcccggcagaatacaagagcttgaagaacgccgcaggcgattcgtggaagcctgcagagcaagggaagcagcgtttgatgccgaatatcaggcgaaatcctcacagggtggacctcgatattttaacctttacgatagctctgactgcctctgaagttatcaaccctctgatagaagaacttggttgcgataagtttatcaatagagaatagttatgtggtgacactacttcaagagaacctctgcattccagtcataccaatcctgcaacttgattttcagaagtcaagagtatatcgcgataagacagtgcacaggtggaggggaaaaaaagggggagggggaagcttatcttgaaaaagcatcacagaagtagaaaaaaatgtcgaaagcattataactgtaacgttctttgagtttgtgattgatccacatttttccccctgcattatggaaaatgtctctcagcattgctttattacaaagtaaaggatggttttataaaattgagactgatgaaacatcaatactagagcccatgaggatgaaagaaattatcaaatagtgctgaacagaataagatgttaacgctgagttattaggactggaaggctatgaaaagaacttgaaattgtcggaatatgtgctctcttcatgtcatattcaatagaagtttctagtttaagattgattttgtgttttcttaggcatttcaagtgacaagcaaagtaaatgtatatattatgtgataaatcatgttttcaagaaaaaccaaaaaaatcctcggggcccaggcggggccaaaaaagcatggatggcctggcaagggtccgaca

SEQ ID NO: 333945 - DNA, 154 bp, Homo sapiens
tgccactgtgcaaattagctgtgcagcatcccaggggcaccccaagcaggcttgcccagcctcatgcaatgctttctgttgagctatcaggagagtgtatgctctggccccatctctccattctcaagatactttttcaacccctactagaaag

SEQ ID NO: 333946 - DNA, 418 bp, Homo sapiens
gagccaggagagtgatagcttggggtaccattccccatctgtttctgggggagcctgctgcagtactactctctggtctgccctggaaaaacccagaagcatactgcatcacagcttgagaaattacatctatagggggagcagggagctagataccatgaataccaataatatgagggatacccgtggaactggtgctggaagagatgaaaagaagttatgcatggaggcaggttgcagctgggtaggcctgagctgtagcttccagttccagggaaaatcataggcggaatggatgaaaagaaactggaatatgaccaacagcttctgtgaagaacataacagcttgtatgaatagaaaaagtgcagtgggcacccagatttgaactggggacctcttgatctgcagtcaaatgct

SEQ ID NO: 333947 - DNA, 373 bp, Homo sapiens
aatcttaatcagaaccctcccaatagcccttggcaccaggaaatagcttccagtgacgtggaagaacaaggttaactttgcagacactcatgttgttagaatttttaatatgcttttcaccgactattctaaactctgtagcatgagtgataatggacaatcatattgccctggacttcctgctggccagtgagtgtgggaggtgtgtggttgataacacctcatgctgcacctgggttagtaacatatttcactggcttaactccagatgtggcatctggctatggtctgattgcactaatgtaatagcatgatcactctcatctaattttgcccaagacaaacagaacagacttggtctgatacgtttaca

SEQ ID NO: 333948 - DNA, 399 bp, Homo sapiens
gctcttccctgtgccaggagaaggggcggctctggaaggccaagctgccagccccgcctgccctttcctctagccgccccgtcacatgcccatgagccctgcaacacggtcttcattttcttctttttttgagtgactggatgccaaaacacattcttttcaattaggccacaggatttcattcagaccacaggctgcatgccgccactttaaaccatcgtgcgaaagaaaaaaataactgcacaaacaatagtcaacaccatagatatctcaattggcttagcttacactattctgactgaaaatttaaagttgagcaaactttccactcaatgggtaccaaaactgttgtgcccagatcagctgcagacaagagctgagcttccaatggaaattttt

SEQ ID NO: 333949 - DNA, 363 bp, Homo sapiens
tgtactctcaaactaccagtgcgtgccacgatgcctgactaatttttgtattttttgtagagatggggttttgccatgttgcccaggctggtcttgaactcctgggctcaagcaatccgcccacctcagccttccacagcgctgagattacaggcgtgagccaccacgcccggcaacgttttcttataacattgaaagctgaagacaatacaattacccatcaacagagaaccagataaatgaagtgtggaacatccacagcgtcgaataaaatcatggtgtggatctgtatttcctgacaactaaagattccgtgataaagtgtgaagcgaaaaaaagcaagctgccaaacaacatgtagaa

SEQ ID NO: 333950 - DNA, 330 bp, Homo sapiens
atttctcttaggaacctgagtcctctatctatgcttcctaattctcagcaacaccctttggaagaaagtatatagcaatgataacctggacttgactagagaataactattagacactgtctggccacagggtcactaggttctcattgaagctaagctgacaatataacaccttataacttttcatcttttcaagtttaccaagtgttatctggaagaagcacatgattatgttaaatgtatataactccacattgtaaacttaatgtttggagagaaaagaacacatttcttaattttaataacagcatctttttttttttttctttt

SEQ ID NO: 333951 - DNA, 3562 bp, Homo sapiens
ctgggcagctgttgtcgcgtggcgggcggccgggcggcggcgctgcggggaccgggtgcgggaggccccgccgcgcggccccggctgggcggtgacggtggcggccggcggcacctggggcaggggcagccgcgcgagctggcgggctgtggcagccgcgcggacggcggcttccgcccctcccgggtggtggtggtggccaaaaccacccggtacgagttcgagcagcagcggtaccgttacgcggagctctcggaggaggacctgaagcagctgcttgcattgaaaggctctagttacagtggacttcttgaacgacatcatattcacaccaaaaatgtagaacatattatagatagtttacggaatgagggaattgaggttcgtctagtaaagaggagagaatatgatgaagagactgttcgatgggcagatgctgtcatagctgcaggaggtgatggcacaatgctgctggcagcgagtaaagtcttggacagacttaaaccagttataggggtaaacactgatccagaacggtctgagggtcatttatgcctgcccgttcgatatacacattcctttccagaagccttacagaagttctatcgtggtgagttcaggtggttgtggaggcagagaatcaggttataccttgaagggactggcataaaccctgtacctgtggaccttcacgagcagcagctaagcttgaatcagcacaatagagcccttaacattgaaagagctcatgatgaaaggtctgaggcttcaggaccccaacttctgccagtgagagcactaaatgaagtcttcattggggagagtctgtcatccagggcttcctactatgagatttcagttgatgatggtccatgggaaaaacagaagagttcagggctcaatttgtgtactggaacaggatcaaaggcctggtcattcaatattaacagggttgcaactcaggctgtagaagatgttttaaatattgcaaaacgacaaggaaatttgagtcttccattgaacagagaattggtagagaaagtaacaaatgaatataatgaatcactgctctacagtccggaagaaccaaaaatacttttcagtattcgagaaccaatagcaaatagagttttctcaagcagtcgtcagcgttgtttctcctcaaaggtttgtgttcgttctcgttgttgggatgcctgtatggttgtggatggaggaacttcttttgagtttaatgatggtgcaattgcttcgatgatgatcaataaagaagatgagcttcgaactgtgcttcttgaacagtgaaggatttcctcatgacaaattttgattactggcgagaatatttttacttcagaaacagactaccagtcgtaaagtgacattttttggttattgttgagactgcttgcccgtgggctcagaagtgagatttgcattattcttctgttggattctgatagaaaaaaagacattcactgtataagaaaatggatggactgaaccaattagaattgataccagtgaaatttttatattgcttacaattggtaaccaagagtgctgatacctttttaaatttagaggggcaggcttaaataaaggactaaatatttaggatttgaaacttaactgtataagtgtgttttccttccctttcctcctaattgtgggattgtcagaactgaacacatatcatttgattagtgcatattttttatagtacctgaaaaccaagattttgaaaaaattttcaagacagagaattttgataaatcctgacattgacctaattgacataggtaaatatgtttgtatatgtgctaataattttctaatttcggaacacgatgatgttatgactattgatttaaaaatttcaaataataatttttgaaattatagatgaatgctttcatttgagtttcattctgtaattcagcagttctgggtgaaatacagatagcaaaacaaatcatgatgctgttacaaatgtattagttatccaataagtgttttaagtcaatttttttaaaatgatatgagtcttacaggtttcttccatctttaaaatgctcaaacatggattcagggactaaaaggatgaactgattagacattttctattaggagtttggtaaaatattgtaaaaatatcttcacctgtgttaggagtattatcagaaagaatggattctttaataaatatgtaaaacacagtagttttggaattgccttccttagtattgtggttttcacctagcttatattccaagatttacagaatagcttttaggataagatgttaggactttttttttttccccatgagaattcctttatttttggaggaaattattatctaattattgatctacttataagtaatcctagaatttttgccaaaagatcctgtcgttgcataatcaaacagttggtattctcgtgccgttgttcaaagtcatgtgtttctttcatttggtgctgaaaatttctgttcaatcattgacaaatatttattgaacacccactctgtgccatgtaaaactatgtcaggtgctggatatgttgatgaatgaaacagactctatccttatacaatttgagtcttgtgggctcagaagtaaattctgtgaaagctggacggatagtcgaattgagtgctcttagttttgccaatatttaacatgttgttcttatcaattttttaaaataaatgttaatgtacaaagttaatctaggttttgatgtatatccagagaatcaatttttcttaaagtatctgcgtagacattcatagcaaagaatttatgacatatcagatagaaatacattaaaatgtagtgttttcccagagattgatctggcttttttttttgatatacataagataccactttataaagaagctccatactatagaacctcccctaacaggcttaaaataccttctttttttttttttttttttggaaaacggagtcttgctttgtcacccaggctggactgcagtggcatgatctcggctctgcaacctccatctcccaggttcaagcgattctcctgcctcagcctcccaagtagctgggattacaggcaggcaccactatgcctggctaattttttgtatttttagtagatatggggattcaccatgttggtcaggctggtctcgaactcctgaccttgtgatctgcctgcctcggcctcccagtattgggattacaggcatgagccaccatgcccggccttaaaatgccttcttaaaggaaaaatgccaactccatccttaatctcaaggaaatctgattgtccaaatagatctgttaatatgtaacatattaataggtaacttgctgtgtaaaattataagccatattttaaaaggttttaaaaatacttattgtgctccatttgtgatataatttctaacatttctgctctgtgatgggggtttatttgtaagaataagaggcaaaggaatgttagcatagcaaaaatgtgtttgaatgagttaaccttttaatcgcaaccctatgtgaataaaattactccactgtta

SEQ ID NO: 333952 - DNA, 3509 bp, Homo sapiens
ctgggcagctgttgtcgcgtggcgggcggccgggcggcggcgctgcggggaccgggtgcgggaggccccgccgcgcggccccggctgggcggtgacggtggcggccggcggcacctggggcaggggcagccgcgcgagctggcgggctgtggcagccgcgcggacggcggcttccgcccctcccgggtggtggtggtggccaaaaccacccggtacgagttcgagcagcagcggtaccgttacgcggagctctcggaggaggacctgaagcagctgcttgcattgaaaggctctagttacagtggacttcttgaacgacatcatattcacaccaaaaatgtagaacatattatagatagtttacggaatgagggaattgaggttcgtctagtaaagaggagagaatatgatgaagagactgttcgatgggcagatgctgtcatagctgcaggaggtgatggcacaatgctgctggcagcgagtaaagtcttggacagacttaaaccagttataggggtaaacactgatccagaacggtctgagggtcatttatgcctgcccgttcgatatacacattcctttccagaagccttacagaagttctatcgtggtgagttcaggtggttgtggaggcagagaatcaggttataccttgaagggactggcataaaccctgtacctgtggaccttcacgagcagcagctaagcttgaatcagcacaatagagcccttaacattgaaagagctcatgatgaaaggtctgaggcttcaggaccccaacttctgccagtgagagcactaaatgaagtcttcattggggagagtctgtcatccagggcttcctactatgagatttcagttgatgatggtccatgggaaaaacagaagagttcagggctcaatttgtgtactggaacaggatcaaaggcctggtcattcaatattaacagggttgcaactcaggctgtagaagatgttttaaatattgcaaaacgacaaggaaatttgagtcttccattgaacagagaattggtagagaaagtaacaaatgaatataatgaatcactgctctacagtccggaagaaccaaaaatacttttcagtattcgagaaccaatagcaaatagagttttctcaagcagtcgtcagcgttgtttctcctcaaaggtttgtgttcgttctcgttgttgggatgcctgtatggttgtggatggaggaacttcttttgagtttaatgatggtgcaattgcttcgatgatgatcaataaagaagatgagcttcgaactgtgcttcttgaacagtgaaggatttcctcatgacaaattttgattactggcgagaatatttttacttcagaaacagactaccagtcgtaaagtgacattttttggttattgttgagactgcttgcccgtgggctcagaagtgagatttgcattattcttctgttggattctgatagaaaaaaagacattcactgtataagaaaatggatggactgaaccaattagaattgataccagtgaaatttttatattgcttacaattggtaaccaagagtgctgatacctttttaaatttagaggggcaggcttaaataaaggactaaatatttaggatttgaaacttaactgtataagtgtgttttccttccctttcctcctaattgtgggattgtcagaactgaacacatatcatttgattagtgcatattttttatagtacctgaaaaccaagattttgaaaaaattttcaagacagagaattttgataaatcctgacattgacctaattgacataggtaaatatgtttgtatatgtgctaataattttctaatttcggaacacgatgatgttatgactattgatttaaaaatttcaaataataatttttgaaattatagatgaatgctttcatttgagtttcattctgtaattcagcagttctgggtgaaatacagatagcaaaacaaatcatgatgctgttacaaatgtattagttatccaataagtgttttaagtcaatttttttaaaatgatatgagtcttacaggtttcttccatctttaaaatgctcaaacatggattcagggactaaaaggatgaactgattagacattttctattaggagtttggtaaaatattgtaaaaatatcttcacctgtgttaggagtattatcagaaagaatggattctttaataaatatgtaaaacacagtagttttggaattgccttccttagtattgtggttttcacctagcttatattccaagatttacagaatagcttttaggataagatgttaggactttttttttttccccatgagaattcctttatttttggaggaaattattatctaattattgatctacttataagtaatcctagaatttttgccaaaagatcctgtcgttgcataatcaaacagttggtattctcgtgccgttgttcaaagtcatgtgtttctttcatttggtgctgaaaatttctgttcaatcattgacaaatatttattgaacacccactctgtgccatgtaaaactatgtcaggtgctggatatgttgatgaatgaaacagactctatccttatacaatttgagtcttgtgggctcagaagtaaattctgtgaaagctggacggatagtcgaattgagtgctcttagttttgccaatatttaacatgttgttcttatcaattttttaaaataaatgttaatgtacaaagttaatctaggttttgatgtatatccagagaatcaatttttcttaaagtatctgcgtagacattcatagcaaagaatttatgacatatcagatagaaatacattaaataccactttataaagaagctccatactatagaacctcccctaacaggcttaaaataccttctttttttttttttttttttggaaaacggagtcttgctttgtcacccaggctggactgcagtggcatgatctcggctctgcaacctccatctcccaggttcaagcgattctcctgcctcagcctcccaagtagctgggattacaggcaggcaccactatgcctggctaattttttgtatttttagtagatatggggattcaccatgttggtcaggctggtctcgaactcctgaccttgtgatctgcctgcctcggcctcccagtattgggattacaggcatgagccaccatgcccggccttaaaatgccttcttaaaggaaaaatgccaactccatccttaatctcaaggaaatctgattgtccaaatagatctgttaatatgtaacatattaataggtaacttgctgtgtaaaattataagccatattttaaaaggttttaaaaatacttattgtgctccatttgtgatataatttctaacatttctgctctgtgatgggggtttatttgtaagaataagaggcaaaggaatgttagcatagcaaaaatgtgtttgaatgagttaaccttttaatcgcaaccctatgtgaataaaattactccactgtta

SEQ ID NO: 333953 - DNA, 3628 bp, Homo sapiens
ctgggcagctgttgtcgcgtggcgggcggccgggcggcggcgctgcggggaccgggtgcgggaggccccgccgcgcggccccggctgggcggtgacggtggcggccggcggcacctggggcaggggcagccgcgcgagctggcgggctgtggcagccgcgcggacggcggcttccgcccctcccgggtggtggtggtggccaaaaccacccggtacgagttcgagcagcagcggtaccgttacgcggagctctcggaggaggacctgaagcagctgcttgcattgaaaggctctagttacagtggacttcttgaacgacatcatattcacaccaaaaatgtagaacatattatagatagtttacggaatgagggaattgaggttcgtctagtaaagaggagagaatatgatgaagagactgttcgatgggcagatgctgtcatagctgcaggaggtgatggcacaatgctgctggcagcgagtaaagtcttggacagacttaaaccagttataggggtaaacactgatccagaacggtctgagggtcatttatgcctgcccgttcgatatacacattcctttccagaagccttacagaagttctatcgtggtgagttcaggtggttgtggaggcagagaatcaggttataccttgaagggactggcataaaccctgtacctgtggaccttcacgagcagcagctaagcttgaatcagcacaatagagcccttaacattgaaagagctcatgatgaaaggtctgaggcttcaggaccccaacttctgccagtgagagcactaaatgaagtcttcattggggagagtctgtcatccagaatgtcttattcttgggctgtagcagtggacaatttaagaagaagtatacccactctaaagggactggcttcctactatgagatttcagttgatgatggtccatgggaaaaacagaagagttcagggctcaatttgtgtactggaacaggatcaaaggcctggtcattcaatattaacagggttgcaactcaggctgtagaagatgttttaaatattgcaaaacgacaaggaaatttgagtcttccattgaacagagaattggtagagaaagtaacaaatgaatataatgaatcactgctctacagtccggaagaaccaaaaatacttttcagtattcgagaaccaatagcaaatagagttttctcaagcagtcgtcagcgttgtttctcctcaaaggtttgtgttcgttctcgttgttgggatgcctgtatggttgtggatggaggaacttcttttgagtttaatgatggtgcaattgcttcgatgatgatcaataaagaagatgagcttcgaactgtgcttcttgaacagtgaaggatttcctcatgacaaattttgattactggcgagaatatttttacttcagaaacagactaccagtcgtaaagtgacattttttggttattgttgagactgcttgcccgtgggctcagaagtgagatttgcattattcttctgttggattctgatagaaaaaaagacattcactgtataagaaaatggatggactgaaccaattagaattgataccagtgaaatttttatattgcttacaattggtaaccaagagtgctgatacctttttaaatttagaggggcaggcttaaataaaggactaaatatttaggatttgaaacttaactgtataagtgtgttttccttccctttcctcctaattgtgggattgtcagaactgaacacatatcatttgattagtgcatattttttatagtacctgaaaaccaagattttgaaaaaattttcaagacagagaattttgataaatcctgacattgacctaattgacataggtaaatatgtttgtatatgtgctaataattttctaatttcggaacacgatgatgttatgactattgatttaaaaatttcaaataataatttttgaaattatagatgaatgctttcatttgagtttcattctgtaattcagcagttctgggtgaaatacagatagcaaaacaaatcatgatgctgttacaaatgtattagttatccaataagtgttttaagtcaatttttttaaaatgatatgagtcttacaggtttcttccatctttaaaatgctcaaacatggattcagggactaaaaggatgaactgattagacattttctattaggagtttggtaaaatattgtaaaaatatcttcacctgtgttaggagtattatcagaaagaatggattctttaataaatatgtaaaacacagtagttttggaattgccttccttagtattgtggttttcacctagcttatattccaagatttacagaatagcttttaggataagatgttaggactttttttttttccccatgagaattcctttatttttggaggaaattattatctaattattgatctacttataagtaatcctagaatttttgccaaaagatcctgtcgttgcataatcaaacagttggtattctcgtgccgttgttcaaagtcatgtgtttctttcatttggtgctgaaaatttctgttcaatcattgacaaatatttattgaacacccactctgtgccatgtaaaactatgtcaggtgctggatatgttgatgaatgaaacagactctatccttatacaatttgagtcttgtgggctcagaagtaaattctgtgaaagctggacggatagtcgaattgagtgctcttagttttgccaatatttaacatgttgttcttatcaattttttaaaataaatgttaatgtacaaagttaatctaggttttgatgtatatccagagaatcaatttttcttaaagtatctgcgtagacattcatagcaaagaatttatgacatatcagatagaaatacattaaaatgtagtgttttcccagagattgatctggcttttttttttgatatacataagataccactttataaagaagctccatactatagaacctcccctaacaggcttaaaataccttctttttttttttttttttttggaaaacggagtcttgctttgtcacccaggctggactgcagtggcatgatctcggctctgcaacctccatctcccaggttcaagcgattctcctgcctcagcctcccaagtagctgggattacaggcaggcaccactatgcctggctaattttttgtatttttagtagatatggggattcaccatgttggtcaggctggtctcgaactcctgaccttgtgatctgcctgcctcggcctcccagtattgggattacaggcatgagccaccatgcccggccttaaaatgccttcttaaaggaaaaatgccaactccatccttaatctcaaggaaatctgattgtccaaatagatctgttaatatgtaacatattaataggtaacttgctgtgtaaaattataagccatattttaaaaggttttaaaaatacttattgtgctccatttgtgatataatttctaacatttctgctctgtgatgggggtttatttgtaagaataagaggcaaaggaatgttagcatagcaaaaatgtgtttgaatgagttaaccttttaatcgcaaccctatgtgaataaaattactccactgtta

SEQ ID NO: 333954 - DNA, 3575 bp, Homo sapiens
ctgggcagctgttgtcgcgtggcgggcggccgggcggcggcgctgcggggaccgggtgcgggaggccccgccgcgcggccccggctgggcggtgacggtggcggccggcggcacctggggcaggggcagccgcgcgagctggcgggctgtggcagccgcgcggacggcggcttccgcccctcccgggtggtggtggtggccaaaaccacccggtacgagttcgagcagcagcggtaccgttacgcggagctctcggaggaggacctgaagcagctgcttgcattgaaaggctctagttacagtggacttcttgaacgacatcatattcacaccaaaaatgtagaacatattatagatagtttacggaatgagggaattgaggttcgtctagtaaagaggagagaatatgatgaagagactgttcgatgggcagatgctgtcatagctgcaggaggtgatggcacaatgctgctggcagcgagtaaagtcttggacagacttaaaccagttataggggtaaacactgatccagaacggtctgagggtcatttatgcctgcccgttcgatatacacattcctttccagaagccttacagaagttctatcgtggtgagttcaggtggttgtggaggcagagaatcaggttataccttgaagggactggcataaaccctgtacctgtggaccttcacgagcagcagctaagcttgaatcagcacaatagagcccttaacattgaaagagctcatgatgaaaggtctgaggcttcaggaccccaacttctgccagtgagagcactaaatgaagtcttcattggggagagtctgtcatccagaatgtcttattcttgggctgtagcagtggacaatttaagaagaagtatacccactctaaagggactggcttcctactatgagatttcagttgatgatggtccatgggaaaaacagaagagttcagggctcaatttgtgtactggaacaggatcaaaggcctggtcattcaatattaacagggttgcaactcaggctgtagaagatgttttaaatattgcaaaacgacaaggaaatttgagtcttccattgaacagagaattggtagagaaagtaacaaatgaatataatgaatcactgctctacagtccggaagaaccaaaaataatatttccttctgcctagggtttgtgttcgttctcgttgttgggatgcctgtatggttgtggatggaggaacttcttttgagtttaatgatggtgcaattgcttcgatgatgatcaataaagaagatgagcttcgaactgtgcttcttgaacagtgaaggatttcctcatgacaaattttgattactggcgagaatatttttacttcagaaacagactaccagtcgtaaagtgacattttttggttattgttgagactgcttgcccgtgggctcagaagtgagatttgcattattcttctgttggattctgatagaaaaaaagacattcactgtataagaaaatggatggactgaaccaattagaattgataccagtgaaatttttatattgcttacaattggtaaccaagagtgctgatacctttttaaatttagaggggcaggcttaaataaaggactaaatatttaggatttgaaacttaactgtataagtgtgttttccttccctttcctcctaattgtgggattgtcagaactgaacacatatcatttgattagtgcatattttttatagtacctgaaaaccaagattttgaaaaaattttcaagacagagaattttgataaatcctgacattgacctaattgacataggtaaatatgtttgtatatgtgctaataattttctaatttcggaacacgatgatgttatgactattgatttaaaaatttcaaataataatttttgaaattatagatgaatgctttcatttgagtttcattctgtaattcagcagttctgggtgaaatacagatagcaaaacaaatcatgatgctgttacaaatgtattagttatccaataagtgttttaagtcaatttttttaaaatgatatgagtcttacaggtttcttccatctttaaaatgctcaaacatggattcagggactaaaaggatgaactgattagacattttctattaggagtttggtaaaatattgtaaaaatatcttcacctgtgttaggagtattatcagaaagaatggattctttaataaatatgtaaaacacagtagttttggaattgccttccttagtattgtggttttcacctagcttatattccaagatttacagaatagcttttaggataagatgttaggactttttttttttccccatgagaattcctttatttttggaggaaattattatctaattattgatctacttataagtaatcctagaatttttgccaaaagatcctgtcgttgcataatcaaacagttggtattctcgtgccgttgttcaaagtcatgtgtttctttcatttggtgctgaaaatttctgttcaatcattgacaaatatttattgaacacccactctgtgccatgtaaaactatgtcaggtgctggatatgttgatgaatgaaacagactctatccttatacaatttgagtcttgtgggctcagaagtaaattctgtgaaagctggacggatagtcgaattgagtgctcttagttttgccaatatttaacatgttgttcttatcaattttttaaaataaatgttaatgtacaaagttaatctaggttttgatgtatatccagagaatcaatttttcttaaagtatctgcgtagacattcatagcaaagaatttatgacatatcagatagaaatacattaaaatgtagtgttttcccagagattgatctggcttttttttttgatatacataagataccactttataaagaagctccatactatagaacctcccctaacaggcttaaaataccttctttttttttttttttttttggaaaacggagtcttgctttgtcacccaggctggactgcagtggcatgatctcggctctgcaacctccatctcccaggttcaagcgattctcctgcctcagcctcccaagtagctgggattacaggcaggcaccactatgcctggctaattttttgtatttttagtagatatggggattcaccatgttggtcaggctggtctcgaactcctgaccttgtgatctgcctgcctcggcctcccagtattgggattacaggcatgagccaccatgcccggccttaaaatgccttcttaaaggaaaaatgccaactccatccttaatctcaaggaaatctgattgtccaaatagatctgttaatatgtaacatattaataggtaacttgctgtgtaaaattataagccatattttaaaaggttttaaaaatacttattgtgctccatttgtgatataatttctaacatttctgctctgtgatgggggtttatttgtaagaataagaggcaaaggaatgttagcatagcaaaaatgtgtttgaatgagttaaccttttaatcgcaaccctatgtgaataaaattactccactgtta

SEQ ID NO: 333955 - DNA, 2976 bp, Homo sapiens
aggcaggaggtgacaatcaagctgttggccaggacagcagtatataaagacgactggaactggagaacacacttttttagctcatcacatggcttttggcagaaggcttcagttcctcaccatgttggtctctccaaagggttgttcatgttatctcttcctctagagcagggtctgaggcttcaggaccccaacttctgccagtgagagcactaaatgaagtcttcattggggagagtctgtcatccagggcttcctactatgagatttcagttgatgatggtccatgggaaaaacagaagagttcagggctcaatttgtgtactggaacaggatcaaaggcctggtcattcaatattaacagggttgcaactcaggctgtagaagatgttttaaatattgcaaaacgacaaggaaatttgagtcttccattgaacagagaattggtagagaaagtaacaaatgaatataatgaatcactgctctacagtccggaagaaccaaaaatacttttcagtattcgagaaccaatagcaaatagagttttctcaagcagtcgtcagcgttgtttctcctcaaaggtttgtgttcgttctcgttgttgggatgcctgtatggttgtggatggaggaacttcttttgagtttaatgatggtgcaattgcttcgatgatgatcaataaagaagatgagcttcgaactgtgcttcttgaacagtgaaggatttcctcatgacaaattttgattactggcgagaatatttttacttcagaaacagactaccagtcgtaaagtgacattttttggttattgttgagactgcttgcccgtgggctcagaagtgagatttgcattattcttctgttggattctgatagaaaaaaagacattcactgtataagaaaatggatggactgaaccaattagaattgataccagtgaaatttttatattgcttacaattggtaaccaagagtgctgatacctttttaaatttagaggggcaggcttaaataaaggactaaatatttaggatttgaaacttaactgtataagtgtgttttccttccctttcctcctaattgtgggattgtcagaactgaacacatatcatttgattagtgcatattttttatagtacctgaaaaccaagattttgaaaaaattttcaagacagagaattttgataaatcctgacattgacctaattgacataggtaaatatgtttgtatatgtgctaataattttctaatttcggaacacgatgatgttatgactattgatttaaaaatttcaaataataatttttgaaattatagatgaatgctttcatttgagtttcattctgtaattcagcagttctgggtgaaatacagatagcaaaacaaatcatgatgctgttacaaatgtattagttatccaataagtgttttaagtcaatttttttaaaatgatatgagtcttacaggtttcttccatctttaaaatgctcaaacatggattcagggactaaaaggatgaactgattagacattttctattaggagtttggtaaaatattgtaaaaatatcttcacctgtgttaggagtattatcagaaagaatggattctttaataaatatgtaaaacacagtagttttggaattgccttccttagtattgtggttttcacctagcttatattccaagatttacagaatagcttttaggataagatgttaggactttttttttttccccatgagaattcctttatttttggaggaaattattatctaattattgatctacttataagtaatcctagaatttttgccaaaagatcctgtcgttgcataatcaaacagttggtattctcgtgccgttgttcaaagtcatgtgtttctttcatttggtgctgaaaatttctgttcaatcattgacaaatatttattgaacacccactctgtgccatgtaaaactatgtcaggtgctggatatgttgatgaatgaaacagactctatccttatacaatttgagtcttgtgggctcagaagtaaattctgtgaaagctggacggatagtcgaattgagtgctcttagttttgccaatatttaacatgttgttcttatcaattttttaaaataaatgttaatgtacaaagttaatctaggttttgatgtatatccagagaatcaatttttcttaaagtatctgcgtagacattcatagcaaagaatttatgacatatcagatagaaatacattaaaatgtagtgttttcccagagattgatctggcttttttttttgatatacataagataccactttataaagaagctccatactatagaacctcccctaacaggcttaaaataccttctttttttttttttttttttggaaaacggagtcttgctttgtcacccaggctggactgcagtggcatgatctcggctctgcaacctccatctcccaggttcaagcgattctcctgcctcagcctcccaagtagctgggattacaggcaggcaccactatgcctggctaattttttgtatttttagtagatatggggattcaccatgttggtcaggctggtctcgaactcctgaccttgtgatctgcctgcctcggcctcccagtattgggattacaggcatgagccaccatgcccggccttaaaatgccttcttaaaggaaaaatgccaactccatccttaatctcaaggaaatctgattgtccaaatagatctgttaatatgtaacatattaataggtaacttgctgtgtaaaattataagccatattttaaaaggttttaaaaatacttattgtgctccatttgtgatataatttctaacatttctgctctgtgatgggggtttatttgtaagaataagaggcaaaggaatgttagcatagcaaaaatgtgtttgaatgagttaaccttttaatcgcaaccctatgtgaataaaattactccactgtta

SEQ ID NO: 333956 - DNA, 2684 bp, Homo sapiens
catccgcgatccgcagaacacgagtggtagctagaaacaggatcaaaggcctgggtcattcaatattaacagggttgcaactcaggctgtagaagatgttttaaatattgcaaaacgacaaggaaatttgagtcttccattgaacagagaattggtagagaaagtaacaaatgaatataatgaatcactgctctacagtccggaagaaccaaaaatacttttcagtattcgagaaccaatagcaaatagagttttctcaagcagtcgtcagcgttgtttctcctcaaaggtttgtgttcgttctcgttgttgggatgcctgtatggttgtggatggaggaacttcttttgagtttaatgatggtgcaattgcttcgatgatgatcaataaagaagatgagcttcgaactgtgcttcttgaacagtgaaggatttcctcatgacaaattttgattactggcgagaatatttttacttcagaaacagactaccagtcgtaaagtgacattttttggttattgttgagactgcttgcccgtgggctcagaagtgagatttgcattattcttctgttggattctgatagaaaaaaagacattcactgtataagaaaatggatggactgaaccaattagaattgataccagtgaaatttttatattgcttacaattggtaaccaagagtgctgatacctttttaaatttagaggggcaggcttaaataaaggactaaatatttaggatttgaaacttaactgtataagtgtgttttccttccctttcctcctaattgtgggattgtcagaactgaacacatatcatttgattagtgcatattttttatagtacctgaaaaccaagattttgaaaaaattttcaagacagagaattttgataaatcctgacattgacctaattgacataggtaaatatgtttgtatatgtgctaataattttctaatttcggaacacgatgatgttatgactattgatttaaaaatttcaaataataatttttgaaattatagatgaatgctttcatttgagtttcattctgtaattcagcagttctgggtgaaatacagatagcaaaacaaatcatgatgctgttacaaatgtattagttatccaataagtgttttaagtcaatttttttaaaatgatatgagtcttacaggtttcttccatctttaaaatgctcaaacatggattcagggactaaaaggatgaactgattagacattttctattaggagtttggtaaaatattgtaaaaatatcttcacctgtgttaggagtattatcagaaagaatggattctttaataaatatgtaaaacacagtagttttggaattgccttccttagtattgtggttttcacctagcttatattccaagatttacagaatagcttttaggataagatgttaggactttttttttttccccatgagaattcctttatttttggaggaaattattatctaattattgatctacttataagtaatcctagaatttttgccaaaagatcctgtcgttgcataatcaaacagttggtattctcgtgccgttgttcaaagtcatgtgtttctttcatttggtgctgaaaatttctgttcaatcattgacaaatatttattgaacacccactctgtgccatgtaaaactatgtcaggtgctggatatgttgatgaatgaaacagactctatccttatacaatttgagtcttgtgggctcagaagtaaattctgtgaaagctggacggatagtcgaattgagtgctcttagttttgccaatatttaacatgttgttcttatcaattttttaaaataaatgttaatgtacaaagttaatctaggttttgatgtatatccagagaatcaatttttcttaaagtatctgcgtagacattcatagcaaagaatttatgacatatcagatagaaatacattaaaatgtagtgttttcccagagattgatctggcttttttttttgatatacataagataccactttataaagaagctccatactatagaacctcccctaacaggcttaaaataccttctttttttttttttttttttggaaaacggagtcttgctttgtcacccaggctggactgcagtggcatgatctcggctctgcaacctccatctcccaggttcaagcgattctcctgcctcagcctcccaagtagctgggattacaggcaggcaccactatgcctggctaattttttgtatttttagtagatatggggattcaccatgttggtcaggctggtctcgaactcctgaccttgtgatctgcctgcctcggcctcccagtattgggattacaggcatgagccaccatgcccggccttaaaatgccttcttaaaggaaaaatgccaactccatccttaatctcaaggaaatctgattgtccaaatagatctgttaatatgtaacatattaataggtaacttgctgtgtaaaattataagccatattttaaaaggttttaaaaatacttattgtgctccatttgtgatataatttctaacatttctgctctgtgatgggggtttatttgtaagaataagaggcaaaggaatgttagcatagcaaaaatgtgtttgaatgagttaaccttttaatcgcaaccctatgtgaataaaattactccactgtta

SEQ ID NO: 333957 - DNA, 1627 bp, Homo sapiens
ctgggcagctgttgtcgcgtggcgggcggccgggcggcggcgctgcggggaccgggtgcgggaggccccgccgcgcggccccggctgggcggtgacggtggcggccggcggcacctggggcaggggcagccgcgcgagctggcgggctgtggcagccgcgcggacggcggcttccgcccctcccgggtggtggtggtggccaaaaccacccggtacgagttcgagcagcagcggtaccgttacgcggagctctcggaggaggacctgaagcagctgcttgcattgaaaggctctagttacagtggacttcttgaacgacatcatattcacaccaaaaatgtagaacatattatagatagtttacggaatgagggaattgaggttcgtctagtaaagaggagagaatatgatgaagagactgttcgatgggcagatgctgtcatagctgcaggaggtgatggcacaatgctgctggcagcgagtaaagtcttggacagacttaaaccagttataggggtaaacactgatccagaacggtctgagggtcatttatgcctgcccgttcgatatacacattcctttccagaagccttacagaagttctatcgtggtgagttcaggtggttgtggaggcagagaatcaggttataccttgaagggactggcataaaccctgtacctgtggaccttcacgagcagcagctaagcttgaatcagcacaatagagcccttaacattgaaagagctcatgatgaaaggtctgaggcttcaggaccccaacttctgccagtgagagcactaaatgaagtcttcattggggagagtctgtcatccagggcttcctactatgagatttcagttgatgatggtccatgggaaaaacagaagagttcagggctcaatttgtgtactggaacaggatcaaaggcctggtcattcaatattaacagggttgcaactcaggctgtagaagatgttttaaatattgcaaaacgacaaggaaatttgagtcttccattgaacagagaattggtagagaaagtaacaaatgaatataatgaatcactgctctacagtccggaagaaccaaaaatacttttcagtattcgagaaccaatagcaaatagagttttctcaagcagtcgtcagcgttgtttctcctcaaaggtttgtgttcgttctcgttgttgggatgcctgtatggttgtggatggaggaacttcttttgagtttaatgatggtgcaattgcttcgatgatgatcaataaagaagatgagcttcgaactgtgcttcttgaacagtgaaggatttcctcatgacaaattttgattactggcgagaatatttttacttcagaaacagactaccagtcgtaaagtgacattttttggttattgttgagactgcttgcccgtgggctcagaagtgagatttgcattattcttctgttggattctgatagaaaaaaagacattcactgtataagaaaatggatggactgaaccaattagaattgataccagtgaaatttttatattgcttacaattggtaaccaagagtgctgatacctttttaaatttagaggggcaggcttaaataaaggactaaatatttaggatttgaaa

SEQ ID NO: 333958 - DNA, 414 bp, Homo sapiens
tgcataattgctctccaactgcaatatctctgttcccatcaatgtatgaaaatacttgtctcatcatacccatactagcacattatttaccagtttttaactttgttcatttagaacttcctcctaatttctaagaattttctatattttaagtaggttattcctttttgatttttagcatgtttttagaattaaaactaagaattatgtgatttttgtttctaggtcattcaatattaacagggttgcaactcaggctgtagaagatgttttaaatattggtgagtaccaaaacagctattggagtagtcccctcttatccgcaggggacaagttccagaacccccagtgaatgctgaaaccttggatactaccaaacccttatactatgcattaatttctttttctttcttc

SEQ ID NO: 333959 - DNA, 409 bp, Homo sapiens
cgagggggggctactgtttatttatgataatatgctatataatgtatacatgttgttttatattagctattatgttacataataacatatatatatataacacatatacactttaagcatttttccccctttttcaaggaaaatatatatataagatatatatatttataacatacattttccccctttcctttttcaacagccaaaacgacaaggaaatttgagtcttccattgaacagagaattggtagagaaaggtcagtgacaaatgataataatcactaacagtttagttctgtttcagttttaaggatgatagtgtgaagtgttgtttaattagcaaagtacttttttttactcaaacatgcttttaatacaatatccccttaaatgtctttaagcaacataa

SEQ ID NO: 333960 - DNA, 3406 bp, Homo sapiens
agccgccgcgggctctgattggccgatagagttagcctgggggcgggagaagagcgacctcggggaagcgtgtggtgcggggaggtcgcccccgggcggcgaagcggccattatgcaggccttgcattgaaaggctctagttacagtggacttcttgaacgacatcatattcacaccaaaaatgtagaacatattatagatagtttacggaatgagggaattgaggttcgtctagtaaagaggagagaatatgatgaagagactgttcgatgggcagatgctgtcatagctgcaggaggtgatggcacaatgctgctggcagcgagtaaagtcttggacagacttaaaccagttataggggtaaacactgatccagaacggtctgagggtcatttatgcctgcccgttcgatatacacattcctttccagaagccttacagaagttctatcgtggtgagttcaggtggttgtggaggcagagaatcaggttataccttgaagggactggcataaaccctgtacctgtggaccttcacgagcagcagctaagcttgaatcagcacaatagagcccttaacattgaaagagctcatgatgaaaggtctgaggcttcaggaccccaacttctgccagtgagagcactaaatgaagtcttcattggggagagtctgtcatccagggcttcctactatgagatttcagttgatgatggtccatgggaaaaacagaagagttcagggctcaatttgtgtactggaacaggatcaaaggcctggtcattcaatattaacagggttgcaactcaggctgtagaagatgttttaaatattgcaaaacgacaaggaaatttgagtcttccattgaacagagaattggtagagaaagtaacaaatgaatataatgaatcactgctctacagtccggaagaaccaaaaatacttttcagtattcgagaaccaatagcaaatagagttttctcaagcagtcgtcagcgttgtttctcctcaaaggtttgtgttcgttctcgttgttgggatgcctgtatggttgtggatggaggaacttcttttgagtttaatgatggtgcaattgcttcgatgatgatcaataaagaagatgagcttcgaactgtgcttcttgaacagtgaaggatttcctcatgacaaattttgattactggcgagaatatttttacttcagaaacagactaccagtcgtaaagtgacattttttggttattgttgagactgcttgcccgtgggctcagaagtgagatttgcattattcttctgttggattctgatagaaaaaaagacattcactgtataagaaaatggatggactgaaccaattagaattgataccagtgaaatttttatattgcttacaattggtaaccaagagtgctgatacctttttaaatttagaggggcaggcttaaataaaggactaaatatttaggatttgaaacttaactgtataagtgtgttttccttccctttcctcctaattgtgggattgtcagaactgaacacatatcatttgattagtgcatattttttatagtacctgaaaaccaagattttgaaaaaattttcaagacagagaattttgataaatcctgacattgacctaattgacataggtaaatatgtttgtatatgtgctaataattttctaatttcggaacacgatgatgttatgactattgatttaaaaatttcaaataataatttttgaaattatagatgaatgctttcatttgagtttcattctgtaattcagcagttctgggtgaaatacagatagcaaaacaaatcatgatgctgttacaaatgtattagttatccaataagtgttttaagtcaatttttttaaaatgatatgagtcttacaggtttcttccatctttaaaatgctcaaacatggattcagggactaaaaggatgaactgattagacattttctattaggagtttggtaaaatattgtaaaaatatcttcacctgtgttaggagtattatcagaaagaatggattctttaataaatatgtaaaacacagtagttttggaattgccttccttagtattgtggttttcacctagcttatattccaagatttacagaatagcttttaggataagatgttaggactttttttttttccccatgagaattcctttatttttggaggaaattattatctaattattgatctacttataagtaatcctagaatttttgccaaaagatcctgtcgttgcataatcaaacagttggtattctcgtgccgttgttcaaagtcatgtgtttctttcatttggtgctgaaaatttctgttcaatcattgacaaatatttattgaacacccactctgtgccatgtaaaactatgtcaggtgctggatatgttgatgaatgaaacagactctatccttatacaatttgagtcttgtgggctcagaagtaaattctgtgaaagctggacggatagtcgaattgagtgctcttagttttgccaatatttaacatgttgttcttatcaattttttaaaataaatgttaatgtacaaagttaatctaggttttgatgtatatccagagaatcaatttttcttaaagtatctgcgtagacattcatagcaaagaatttatgacatatcagatagaaatacattaaaatgtagtgttttcccagagattgatctggcttttttttttgatatacataagataccactttataaagaagctccatactatagaacctcccctaacaggcttaaaataccttctttttttttttttttttttggaaaacggagtcttgctttgtcacccaggctggactgcagtggcatgatctcggctctgcaacctccatctcccaggttcaagcgattctcctgcctcagcctcccaagtagctgggattacaggcaggcaccactatgcctggctaattttttgtatttttagtagatatggggattcaccatgttggtcaggctggtctcgaactcctgaccttgtgatctgcctgcctcggcctcccagtattgggattacaggcatgagccaccatgcccggccttaaaatgccttcttaaaggaaaaatgccaactccatccttaatctcaaggaaatctgattgtccaaatagatctgttaatatgtaacatattaataggtaacttgctgtgtaaaattataagccatattttaaaaggttttaaaaatacttattgtgctccatttgtgatataatttctaacatttctgctctgtgatgggggtttatttgtaagaataagaggcaaaggaatgttagcatagcaaaaatgtgtttgaatgagttaaccttttaatcgcaaccctatgtgaataaaattactccactgtta

SEQ ID NO: 333961 - DNA, 3539 bp, Homo sapiens
agccgccgcgggctctgattggccgatagagttagcctgggggcgggagaagagcgacctcggggaagcgtgtggtgcggggaggtcgcccccgggcggcgaagcggccattatgcaggcgtgagtgaaacgaataaacaaacaaacaaaacccactagctggggcctccatttcttccccgcccacctttctcccgcgtggggtctcccgtttcccaatcgccacgctttccccgccttcgtcaacgcctggcttgcattgaaaggctctagttacagtggacttcttgaacgacatcatattcacaccaaaaatgtagaacatattatagatagtttacggaatgagggaattgaggttcgtctagtaaagaggagagaatatgatgaagagactgttcgatgggcagatgctgtcatagctgcaggaggtgatggcacaatgctgctggcagcgagtaaagtcttggacagacttaaaccagttataggggtaaacactgatccagaacggtctgagggtcatttatgcctgcccgttcgatatacacattcctttccagaagccttacagaagttctatcgtggtgagttcaggtggttgtggaggcagagaatcaggttataccttgaagggactggcataaaccctgtacctgtggaccttcacgagcagcagctaagcttgaatcagcacaatagagcccttaacattgaaagagctcatgatgaaaggtctgaggcttcaggaccccaacttctgccagtgagagcactaaatgaagtcttcattggggagagtctgtcatccagggcttcctactatgagatttcagttgatgatggtccatgggaaaaacagaagagttcagggctcaatttgtgtactggaacaggatcaaaggcctggtcattcaatattaacagggttgcaactcaggctgtagaagatgttttaaatattgcaaaacgacaaggaaatttgagtcttccattgaacagagaattggtagagaaagtaacaaatgaatataatgaatcactgctctacagtccggaagaaccaaaaatacttttcagtattcgagaaccaatagcaaatagagttttctcaagcagtcgtcagcgttgtttctcctcaaaggtttgtgttcgttctcgttgttgggatgcctgtatggttgtggatggaggaacttcttttgagtttaatgatggtgcaattgcttcgatgatgatcaataaagaagatgagcttcgaactgtgcttcttgaacagtgaaggatttcctcatgacaaattttgattactggcgagaatatttttacttcagaaacagactaccagtcgtaaagtgacattttttggttattgttgagactgcttgcccgtgggctcagaagtgagatttgcattattcttctgttggattctgatagaaaaaaagacattcactgtataagaaaatggatggactgaaccaattagaattgataccagtgaaatttttatattgcttacaattggtaaccaagagtgctgatacctttttaaatttagaggggcaggcttaaataaaggactaaatatttaggatttgaaacttaactgtataagtgtgttttccttccctttcctcctaattgtgggattgtcagaactgaacacatatcatttgattagtgcatattttttatagtacctgaaaaccaagattttgaaaaaattttcaagacagagaattttgataaatcctgacattgacctaattgacataggtaaatatgtttgtatatgtgctaataattttctaatttcggaacacgatgatgttatgactattgatttaaaaatttcaaataataatttttgaaattatagatgaatgctttcatttgagtttcattctgtaattcagcagttctgggtgaaatacagatagcaaaacaaatcatgatgctgttacaaatgtattagttatccaataagtgttttaagtcaatttttttaaaatgatatgagtcttacaggtttcttccatctttaaaatgctcaaacatggattcagggactaaaaggatgaactgattagacattttctattaggagtttggtaaaatattgtaaaaatatcttcacctgtgttaggagtattatcagaaagaatggattctttaataaatatgtaaaacacagtagttttggaattgccttccttagtattgtggttttcacctagcttatattccaagatttacagaatagcttttaggataagatgttaggactttttttttttccccatgagaattcctttatttttggaggaaattattatctaattattgatctacttataagtaatcctagaatttttgccaaaagatcctgtcgttgcataatcaaacagttggtattctcgtgccgttgttcaaagtcatgtgtttctttcatttggtgctgaaaatttctgttcaatcattgacaaatatttattgaacacccactctgtgccatgtaaaactatgtcaggtgctggatatgttgatgaatgaaacagactctatccttatacaatttgagtcttgtgggctcagaagtaaattctgtgaaagctggacggatagtcgaattgagtgctcttagttttgccaatatttaacatgttgttcttatcaattttttaaaataaatgttaatgtacaaagttaatctaggttttgatgtatatccagagaatcaatttttcttaaagtatctgcgtagacattcatagcaaagaatttatgacatatcagatagaaatacattaaaatgtagtgttttcccagagattgatctggcttttttttttgatatacataagataccactttataaagaagctccatactatagaacctcccctaacaggcttaaaataccttctttttttttttttttttttggaaaacggagtcttgctttgtcacccaggctggactgcagtggcatgatctcggctctgcaacctccatctcccaggttcaagcgattctcctgcctcagcctcccaagtagctgggattacaggcaggcaccactatgcctggctaattttttgtatttttagtagatatggggattcaccatgttggtcaggctggtctcgaactcctgaccttgtgatctgcctgcctcggcctcccagtattgggattacaggcatgagccaccatgcccggccttaaaatgccttcttaaaggaaaaatgccaactccatccttaatctcaaggaaatctgattgtccaaatagatctgttaatatgtaacatattaataggtaacttgctgtgtaaaattataagccatattttaaaaggttttaaaaatacttattgtgctccatttgtgatataatttctaacatttctgctctgtgatgggggtttatttgtaagaataagaggcaaaggaatgttagcatagcaaaaatgtgtttgaatgagttaaccttttaatcgcaaccctatgtgaataaaattactccactgtta

SEQ ID NO: 333962 - DNA, 3508 bp, Homo sapiens
ctgggcagctgttgtcgcgtggcgggcggccgggcggcggcgctgcggggaccgggtgcgggaggccccgccgcgcggccccggctgggcggtgacggtggcggccggcggcacctggggcaggggcagccgcgcgagctggcgggctgtggcagccgcgcggacggcggcttccgcccctcccgggtggtggtggtggccaaaaccacccggtacgagttcgagcagcagcggtaccgttacgcggagctctcggaggaggacctgaagcagctgcttgcattgaaaggctctagttacagtggacttcttgaacgacatcatattcacaccaaaaatgtagaacatattatagatagtttacggaatgagggaattgaggttcgtctagtaaagaggagagaatatgatgaagagactgttcgatgggcagatgctgtcatagctgcaggaggtgatggcacaatgctgctggcagcgagtaaagtcttggacagacttaaaccagttataggggtaaacactgatccagaacggtctgagggtcatttatgcctgcccgttcgatatacacattcctttccagaagccttacagaagttctatcgtggtgagttcaggtggttgtggaggcagagaatcaggttataccttgaagggactggcataaaccctgtacctgtggaccttcacgagcagcagctaagcttgaatcagcacaatagagcccttaacattgaaagagctcatgatgaaaggtctgaggcttcaggaccccaacttctgccagtgagagcactaaatgaagtcttcattggggagagtctgtcatccagggcttcctactatgagatttcagttgatgatggtccatgggaaaaacagaagagttcagggctcaatttgtgtactggaacaggatcaaaggcctggtcattcaatattaacagggttgcaactcaggctgtagaagatgttttaaatattgtaacaaatgaatataatgaatcactgctctacagtccggaagaaccaaaaatacttttcagtattcgagaaccaatagcaaatagagttttctcaagcagtcgtcagcgttgtttctcctcaaaggtttgtgttcgttctcgttgttgggatgcctgtatggttgtggatggaggaacttcttttgagtttaatgatggtgcaattgcttcgatgatgatcaataaagaagatgagcttcgaactgtgcttcttgaacagtgaaggatttcctcatgacaaattttgattactggcgagaatatttttacttcagaaacagactaccagtcgtaaagtgacattttttggttattgttgagactgcttgcccgtgggctcagaagtgagatttgcattattcttctgttggattctgatagaaaaaaagacattcactgtataagaaaatggatggactgaaccaattagaattgataccagtgaaatttttatattgcttacaattggtaaccaagagtgctgatacctttttaaatttagaggggcaggcttaaataaaggactaaatatttaggatttgaaacttaactgtataagtgtgttttccttccctttcctcctaattgtgggattgtcagaactgaacacatatcatttgattagtgcatattttttatagtacctgaaaaccaagattttgaaaaaattttcaagacagagaattttgataaatcctgacattgacctaattgacataggtaaatatgtttgtatatgtgctaataattttctaatttcggaacacgatgatgttatgactattgatttaaaaatttcaaataataatttttgaaattatagatgaatgctttcatttgagtttcattctgtaattcagcagttctgggtgaaatacagatagcaaaacaaatcatgatgctgttacaaatgtattagttatccaataagtgttttaagtcaatttttttaaaatgatatgagtcttacaggtttcttccatctttaaaatgctcaaacatggattcagggactaaaaggatgaactgattagacattttctattaggagtttggtaaaatattgtaaaaatatcttcacctgtgttaggagtattatcagaaagaatggattctttaataaatatgtaaaacacagtagttttggaattgccttccttagtattgtggttttcacctagcttatattccaagatttacagaatagcttttaggataagatgttaggactttttttttttccccatgagaattcctttatttttggaggaaattattatctaattattgatctacttataagtaatcctagaatttttgccaaaagatcctgtcgttgcataatcaaacagttggtattctcgtgccgttgttcaaagtcatgtgtttctttcatttggtgctgaaaatttctgttcaatcattgacaaatatttattgaacacccactctgtgccatgtaaaactatgtcaggtgctggatatgttgatgaatgaaacagactctatccttatacaatttgagtcttgtgggctcagaagtaaattctgtgaaagctggacggatagtcgaattgagtgctcttagttttgccaatatttaacatgttgttcttatcaattttttaaaataaatgttaatgtacaaagttaatctaggttttgatgtatatccagagaatcaatttttcttaaagtatctgcgtagacattcatagcaaagaatttatgacatatcagatagaaatacattaaaatgtagtgttttcccagagattgatctggcttttttttttgatatacataagataccactttataaagaagctccatactatagaacctcccctaacaggcttaaaataccttctttttttttttttttttttggaaaacggagtcttgctttgtcacccaggctggactgcagtggcatgatctcggctctgcaacctccatctcccaggttcaagcgattctcctgcctcagcctcccaagtagctgggattacaggcaggcaccactatgcctggctaattttttgtatttttagtagatatggggattcaccatgttggtcaggctggtctcgaactcctgaccttgtgatctgcctgcctcggcctcccagtattgggattacaggcatgagccaccatgcccggccttaaaatgccttcttaaaggaaaaatgccaactccatccttaatctcaaggaaatctgattgtccaaatagatctgttaatatgtaacatattaataggtaacttgctgtgtaaaattataagccatattttaaaaggttttaaaaatacttattgtgctccatttgtgatataatttctaacatttctgctctgtgatgggggtttatttgtaagaataagaggcaaaggaatgttagcatagcaaaaatgtgtttgaatgagttaaccttttaatcgcaaccctatgtgaataaaattactccactgtta

SEQ ID NO: 333963 - DNA, 2174 bp, Homo sapiens
  misc_feature (1704)..(1704): n is a, c, g, or t
  misc_feature (1712)..(1712): n is a, c, g, or t
  misc_feature (1726)..(1726): n is a, c, g, or t
  misc_feature (1729)..(1730): n is a, c, g, or t
  misc_feature (1736)..(1736): n is a, c, g, or t
  misc_feature (1740)..(1740): n is a, c, g, or t
  misc_feature (1744)..(1744): n is a, c, g, or t
  misc_feature (1746)..(1746): n is a, c, g, or t
  misc_feature (1779)..(1779): n is a, c, g, or t
  misc_feature (1783)..(1783): n is a, c, g, or t
  misc_feature (1788)..(1788): n is a, c, g, or t
  misc_feature (1802)..(1802): n is a, c, g, or t
  misc_feature (1808)..(1808): n is a, c, g, or t
  misc_feature (1810)..(1810): n is a, c, g, or t
  misc_feature (1838)..(1838): n is a, c, g, or t
  misc_feature (1843)..(1843): n is a, c, g, or t
  misc_feature (1861)..(1861): n is a, c, g, or t
  misc_feature (1874)..(1874): n is a, c, g, or t
  misc_feature (1879)..(1879): n is a, c, g, or t
  misc_feature (1912)..(1912): n is a, c, g, or t
  misc_feature (1914)..(1914): n is a, c, g, or t
  misc_feature (1919)..(1919): n is a, c, g, or t
  misc_feature (1922)..(1922): n is a, c, g, or t
  misc_feature (1946)..(1946): n is a, c, g, or t
  misc_feature (1950)..(1950): n is a, c, g, or t
  misc_feature (1954)..(1954): n is a, c, g, or t
  misc_feature (1965)..(1966): n is a, c, g, or t
  misc_feature (1969)..(1969): n is a, c, g, or t
  misc_feature (1985)..(1985): n is a, c, g, or t
  misc_feature (2001)..(2001): n is a, c, g, or t
  misc_feature (2023)..(2023): n is a, c, g, or t
  misc_feature (2036)..(2036): n is a, c, g, or t
  misc_feature (2049)..(2049): n is a, c, g, or t
ctgggcagctgttgtcgcgtggcgggcggccgggcggcggcgctgcggggaccgggtgcgggaggccccgccgcgcggccccggctgggcggtgacggtggcggccggcggcacctggggcaggggcagccgcgcgagctggcgggctgtggcagccgcgcggacggcggcttccgcccctcccgggtggtggtggtggccaaaaccacccggtacgagttcgagcagcagcggtaccgttacgcggagctctcggaggaggacctgaagcagctgcttgcattgaaaggctctagttacagtggacttcttgaacgacatcatattcacaccaaaaatgtagaacatattatagatagtttacggaatgagggaattgaggttcgtctagtaaagaggagagaatatgatgaagagactgttcgatgggcagatgctgtcatagctgcaggaggtgatggcacaatgctgctggcagcgagtaaagtcttggacagacttaaaccagttataggggtaaacactgatccagaacggtctgagggtcatttatgcctgcccgttcgatatacacattcctttccagaagccttacagaagttctatcgtggtgagttcaggtggttgtggaggcagagaatcaggttataccttgaagggactggcataaaccctgtacctgtggaccttcacgagcagcagctaagcttgaatcagcacaatagagcccttaacattgaaagagctcatgatgaaaggtctgaggcttcaggaccccaacttctgccagtgagagcactaaatgaagtcttcattggggagagtctgtcatccagggcttcctactatgagatttcagttgatgatggtccatgggaaaaacagaagagttcagggctcaatttgtgtactggaacaggatcaaaggcctggtcattcaatattaacagggttgcaactcaggctgtagaagatgttttaaatattgcaaaacgacaaggaaatttgagtcttccattgaacagagaattggtagagaaagtaacaaatgaatataatgaatcactgctctacagtccggaagaaccaaaaatacttttcagtattcgagaaccaatagcaaatagagttttctcaagcagtcgtcagcgttgtttctcctcaaaggtttgtgttcgttctcgttgttgggatgcctgtatggttgtggatggaggaacttcttttgagtttaatgatggtgcaattgcttcgatgatgatcaataaagaagatgagcttcgaactgtgcttcttgaacagtgaaggatttcctcatgacaaattttgattactggcgagaatatttttacttcagaaacagactaccagtcgtaaagtgacattttttggttattgttgagactgcttgcccgtgggctcagaagtgagatttgcattattcttctgttggattctgatagaaaaaaagacattcactgtataagaaaatggatggactgaaccaattagaattgataccagtgaaatttttatattgcttacaattggtaaccaagagtgctgatacctttttaaatttagaggggcaggcttaaataaaggactaaatatttaggatttgaaaaaaaaaaaaaaaaaaaaaaaaaaaaaaaaaaaaaaaaaaaaaaaaaaaaaaaaaaaaaaaaaaaaaaaaaaaaaaancttgtggnccgcttgggccaantcnnttttanattnggcnangtttatgcatggggccgaatttggggctaattnggcnaattngccttatggggggncgtttnanaattaatgggccggggtttaaaaacgtnggaantggaaaaaccttggggtncccaaattaaatngcttngaagaaaatccccttttggcaagttggggaaanancaaanggncccgaaccgatggcctttccaaanagtngccnaccctgaatgnnaangggaaattgaaggcgnaaaaatttggtaaaantccgggtaaaattttggtaaancagttaatttttnaaccaatgggccnaattggggaaaaacccttttaaaatcaaagagaattgccccgaatgggtttgaagggttgtcccatttggaaacaagggttcccctttttaaagacacgtggccttcaacggtaaaaagcggaaa

SEQ ID NO: 333964 - DNA, 275 bp, Homo sapiens
tgtatgtgtagtatatctgtgcttcatacataaaaacagtgtagatttttggcccccaaaaccaatttgtgagcatatgctgaaggaaaagagatggggagtggaggccgagagtgcaggagagaagtgtatagagccctacagtagggttctgaagaggtgggaagagatgagctgcaaagccaggcagagggtccacgagagggcatggcgagccgagatgatgggtgtatgggacaggaagcaaaaaggtaggggatcactgcctggtggtg

SEQ ID NO: 333965 - DNA, 1033 bp, Homo sapiens
tcatgaggaagcgatggtttggggacaggtgattagccagacttcattcttgggcagctagaacctgctgggaggtgaaagagatggcattctaggctagaatgaaaagtgcaggatgagatcacagggcagagacagcaggtagagtatgaatgtgtgcactgggctgtgagctgcttctggcctggatgggtcaagagagcccttaaagaggtggacagggagagttctgggggatatgcatcttcctcctctgggcgttggggattgactcctccttgtctgtgctgtgttcatttgtggtaagttaggaaacatctgcctttagcggaaccagaggtaaaaggcgggagagaaggtgaaagggagaggacaaggttgatgagtttgatagttacctgtgaggcccagttagtcttcctgtccagacatttaggtgggctggggctggggctgggaccaggaccaaggaaggaaaatagagatgctgggaagtagggcctggattatcagggctgagggattgatgattaaagaggggcccggctaggccaaggtgaggaataggaggggaccaggaagagaaatcacttgatgagcagttgtcataggaagtgcagttagtaactgttaagctatccggactcagccaattggttccaaactctactgataggtctactgctccctcttctatcctttagtcattcttacagggttgtttcaaagatcagatgagatagtatataacgtgcttactacattgctgtaggtgctcaagttttaccacccaccccctcagacatttacttaaaatatattctgggggctgggcacggtggctcacacctgtaatcccagcactttgagaggccaaggtgggcggatcacttgaggtcaggtgttcaagaccagcctggccaacatggtgaaaccccgtctgtactaaaaatacaaaaattagccaggcgtggtggcgggtgcctgtaatcccaggtactcaggaggctgaggcagagagaattgcttgaac

SEQ ID NO: 333966 - DNA, 270 bp, Homo sapiens
tgatgatggatgaatggaatgccattagcaagaaaaagggaagcaagggcattgcaaacagtgggaagagtgtgggatcacagtggagcctggttgattttttaaaaaacagacatttcccagttttctgcattccacatacagaaccttctttcctagaagaccaagctcctttctgcctctttcccagacccccatcccatcttgcctttttaattgatattcagtgttgagcaaaactctcctcagggaacttcttcctcaccttcc

SEQ ID NO: 333967 - DNA, 819 bp, Homo sapiens
atatgtctgtctttttctgtacttaatatcttaatagctattttaattttcattttaatatttgctaatccaggccaggtgtgttagttcacacttgtaattccagcactttgggaagctgaggctggcggatcacttgaggtcaggagtttgagaccagcttggccaacgtagtgaaccccgtctctactaaaaacacaaaaattagcttggtgtgatggcagacacctgtaatcccagctactcagaggctgaggtgggataattgcttgaacctgggaggtggaggttgcagtgagccaagatagccccgctgtactccagcctgggtgacagagcaagactccgcctcaaaaaaaaaaaagtgcgaatccaacgtctacgttatttgtttgtttatatttgctattctttcttatttatggtcatattttcttgctgctttgcatgtccattaatttattttatactgcatgtcatggatttggtggttttaactttgttctggcaggcagttaatttgctggaaaatcattttgatcctttcaagttttgattttaaagttagggtgggtctagaggtaggggtctgcagacttacagggccagttagagtaaatagtttaggcttgtgggccatacagcctttgtctaaactgttcgtctctgtttttattgtgcaaaagtagttatagacagcacagaagtgaatgggcgtggctgtgttccaatacaatatgggctcatgagccatggtttgctgactcttggtctagagtatcctttaggcttagagtagtcctgcttgaggtgtttaga

SEQ ID NO: 333968 - DNA, 514 bp, Homo sapiens
tatttgttcagactccagaacaaaatttagtaactattctgtggtattggttttaatcagtaatcctcatttgtgtcctccacctgtaaatataataaatttccctttttccttttatatcaataagttattgctacaatgattaccatccacagcttcgtatctgcagagtaatgatctaagatatttatttctggccagataattctttgcaatctattatgtttggctgcaaatgaagatactgaattatacaaggcagaaccttaagttcgtctggtgctctgtaccaacatggaaatagtgaatatgtaaatgtattaaaatgagatcactctaggaacctgtctgcattcagaaagaattttgactaagcttatatttaattaatcatgtgcatatatacttttcaatatcaagtcttattacttgattcaaaacaagtgaccaattctagtatgaagtttttgtgactacttaataagaagtaattttatggcttttgtcataaagc

SEQ ID NO: 333969 - DNA, 672 bp, Homo sapiens
taaatggaattctcttatttttgcttgatttttttttcaagctttatgttgcataagagggttttttgcattttgcataaattctgtgtgcagtcatggggatctcacatttttaaaccctcccctgcagtttctgtggctcagctcttctggccaattgcctaacctgctggagttctaggggaggagaaaagattgagagaagtggtgtctcctcctggtgcctccctctcgcccctgaaattcagtccagccaattcagtgatggggcttcccagggcagaagagtggaggtaagctcgataaaccacagggcctggctgagtggggaggcagagcactcagcagcagcagagcctggtgggaagatcttccttcccaagggcctgagagccacgctgataacatcttttctacctccacagtcacagagcacaatagggagaaggggtactggttctgaacagaatgggttcccttcatagagccgatgtttcagaaaatactgctttttgttcttaaactctgttttcttactccccacccccagttttttttttaagtctataaaatgcaagataaattttaccattgtttgttgtctgtttttatctgcagcaggctaatttttaaaacatgaaatatagtaacatatgaagagatggatttttc

SEQ ID NO: 333970 - DNA, 4301 bp, Homo sapiens
  misc_feature (2170)..(2170): n is a, c, g, or t
  misc_feature (2245)..(2245): n is a, c, g, or t
cagattgggtttcaaaaattcggatgtaaacattgacatccagtttccagccattatgtctcagccagatgtcctcttacttgttcaagaatgtttaaagaacagtgactcctttattgatgttgatgcagacttccatgctagggtgccagtggtggtgtgcagagaaaagcaaagtggtcttctgtgtaaagtgagcgcaggaaatgaaaatgcttgtctgacaacaaagcatttaactgcccttggaaaactagaaccaaagctggttcctttggtgattgcatttaggtactgggcaaagctttgcagtatagatcgccctgaagaaggaggtctgccaccttatgtgtttgccctgatggccattttctttcttcagcagaggaaagaaccccttttgcctgtatatctaggatcatggattgaaggattctcattaagcaaactagggaatttcaaccttcaagacattgaaaaagatgttgtgatctgggaacatactgacagtgctgcaggggacacaggcataacaaaagaagaggcaccaagagaaacgccgattaaaaggggacaggtgtcattaatattggatgtgaaacaccagccttcagtaccagttgggcagctctgggtggaattgctgcggttctatgctttagaatttaatttggctgatttagtgataagtattcgtgtcaaagaattggtatctcgggaattgaaggattggcccaaaaagcgcattgccattgaagatccctactctgttaaaagaaatgtggcaagaaccctaaatagtcaacctgtgtttgaatatatacttcattgtttaaggacaacatacaagtattttgctcttccacacaaaattacaaaatccagccttctaaagcctctgaatgcaattacatgtatttcagaacattctaaagaagtaataaatcatcatccagatgtacaaacaaaagatgataagctcaaaaactcagttttggcccaaggtcctggtgctaccagttcagctgcaaatacctgtaaggtacagccacttactcttaaagagactgctgaaagttttggaagcccaccaaaagaagaaatgggaaatgaacacatcagtgtccaccctgaaaactcagactgtatccaagcagatgttaactctgatgattacaagggtgataaagtataccatccagaaacaggaaggaaaaacgagaaagagaaagttggaaggaagggcaagcatctgttgactgttgatcagaaacgtggagagcatgttgtctgtggcagcacacgtaataatgagtcagagagcactttggatttagaaggcttccaaaatcccacagctaaagagtgtgagggacttgccactttagataacaaggctgatcttgatggagaaagtacagaaggtactgaggaactagaagactctctaaaccactttacccactcagtacagggccagacatcagaaatgattccctctgatgaagaggaggaggacgacgaagaagaggaggaggaagaagaacctaggctcaccattaaccaaagggaagatgaagatggcatggctaatgaagatgagttagacaacacctacactgggtcaggggatgaggacgccctatctgaagaggatgatgagttaggcgaagctgctaagtatgaagacgtgaaagaatgtggaaaacatgtagaaagagctctcctagtggaacttaataaaataagtctcaaggaagaaaatgtatgtgaagaaaaaaattcacctgtggatcagtctgattttttttatgaattcagtaaacttatcttcaccaaaggcaagtctcctacggtagtgtgcagcttatgcaaacgagagggtcatctaaagaaggactgtcctgaagacttcaaaagaatccagctagaacctctgccaccattaacacccaagtttttaaatatcttagatcaagtctgtatccagtgttataaggatttttctccaacaattatagaggatcaggctcgtgaacatattcggcaaaacctagaaagtttcataagacaggactttccaggaactaaattgagcctgtttggctcctccaaaaatggatttgggttcaaacagagtgaccttgacgtctgtatgacaattaatggncttgaaactgctgagggattggactgtgtcagaactattgaagaattagcaagagtcctcagaaaacattcaggnctgagaaacatcttacctattacaacagcaaaggtgccaattgtgaagttcttccatttgagaagtggtctggaagtagatatcagtttgtataacacattggcccttcataacacaaggcttttatctgcttattccgccattgatcccagagtgaagtatttgtgctataccatgaaagtatttacaaagatatacaaaggtgaaaagaaacctgaaatatttgttgatggctggaatatttatttttttgatcaaatagatgaactgcctacctattggtcagaatgtggaaaaaatacagaatctgttgggcagttatggttgggccttcttcgtttctacacagaggaatttgattttaaagaacatgttattagcatcaggagaaaaagtctgcttacaacttttaagaaacagtggacctcaaaatacattgttattgaagatccctttgatttgaatcataatcttggagctggattatcaaggaaaatgacaaattttataatgaaggcttttatcaatggtagaagagtatttggtattcctgtcaagggatttccaaaggactacccctcaaaaatggaatacttttttgatccagatgtgttaactgaaggagagctggccccaaatgatagatgttgtcgaatttgtggaaaaatcggacacttcatgaaggactgtcctatgaggagaaaagtaagacggcggcgagatcaggaagatgccctgaaccaaagataccctgagaacaaggaaaaaagaagcaaagaggacaaagaaattcacaacaagtacacagaaagggaggtgtcaacaaaagaagataagcccatacagtgcacacctcagaaagccaagccaatgcgggcagctgctgacctggggagggagaagatcctcaggccaccagtagaaaaatggaagagacaggatgacaaagacttaagagaaaaacgttgttttatttgtggaagagaagggcacattaaaaaggaatgcccacagtttaaaggctcttcaggtagcctttccagtaaatatatgactcagggaaaagcctcagcgaagaggacccagcaggaatcatgagggaaggaaaatgcagcactctaaatggccactcaggcgttcctattcactcggaaaattaggttcatttcacaggacacagcagtgtagatcaggcttcaacttaacatttaagggaaatgtcagatttttttttaatttaatgaaattgttaatgaggaaaaatttttaatatagtcttatctaccacacatccccatagatttaaggattttaatagaaagtcatgatgtatgtatttaagccacgttaaaagaaaaaatataactatggaccggtattcagtgaatacagtttcatggtttttaattctttcaaagcacattaaaaatggtgtgctgataaaccccaagtaaattaaccctttttccgtataaatccattttttgttttgaagaggggaaattatatttattgttgtttactgaatcctggtgtgaaagcatatcagatatgtatgaactgctactgctgtacttccgatttacggacatcattttattgctatttgtagacgtgataacatgaacatgagtacctatttatgtgggccttcagtggatgggcagtgccactcaggtctctggggtttccctctctaattttaagtaaattgacatataactactatgcttataaaaatgaagtaaggaaaacaagtagtcctgtttgccactaaaaacattttcaaaggaaaaataaaatgaaagtactttttactttttatgatactcagaaattaggatgaagaacttttaaaattgctgaagatcaaagaggttatctctgccagtcacaagtgtggctggtgtcattctgggtctgactggagccctcctggactgtttctttaatttcaaaagccctgcagacatagtacctggtcagaactatgcctcggtttatttatcattttgaaataaaatcaaaatttcaacctgtaaaaaaaaaaacatta

SEQ ID NO: 333971 - DNA, 3836 bp, Homo sapiens
  misc_feature (1705)..(1705): n is a, c, g, or t
  misc_feature (1780)..(1780): n is a, c, g, or t
taaatggaattctcttatttttgcttgatttttttttcaagctttatgttgcataagagggttttttgcattttgcataaattctgtgtgcagtcatggggatctcacatttttaaaccctcccctgcagtttctgtggctcagctcttctggccaattgcctaacctgctggagttctaggggaggagaaaagattgagagaagtggtgtctcctcctggtgcctccctctcgcccctgaaattcagtccagccaattcagtgatggggcttcccagggcagaagagtggagatccctactctgttaaaagaaatgtggcaagaaccctaaatagtcaacctgtgtttgaatatatacttcattgtttaaggacaacatacaagtattttgctcttccacacaaaattacaaaatccagccttctaaagcctctgaatgcaattacatgtatttcagaacattctaaagaagtaataaatcatcatccagatgtacaaacaaaagatgataagctcaaaaactcagttttggcccaaggtcctggtgctaccagttcagctgcaaatacctgtaaggtacagccacttactcttaaagagactgctgaaagttttggaagcccaccaaaagaagaaatgggaaatgaacacatcagtgtccaccctgaaaactcagactgtatccaagcagatgttaactctgatgattacaagggtgataaagtataccatccagaaacaggaaggaaaaacgagaaagagaaagttggaaggaagggcaagcatctgttgactgttgatcagaaacgtggagagcatgttgtctgtggcagcacacgtaataatgagtcagagagcactttggatttagaaggcttccaaaatcccacagctaaagagtgtgagggacttgccactttagataacaaggctgatcttgatggagaaagtacagaaggtactgaggaactagaagactctctaaaccactttacccactcagtacagggccagacatcagaaatgattccctctgatgaagaggaggaggacgacgaagaagaggaggaggaagaagaacctaggctcaccattaaccaaagggaagatgaagatggcatggctaatgaagatgagttagacaacacctacactgggtcaggggatgaggacgccctatctgaagaggatgatgagttaggcgaagctgctaagtatgaagacgtgaaagaatgtggaaaacatgtagaaagagctctcctagtggaacttaataaaataagtctcaaggaagaaaatgtatgtgaagaaaaaaattcacctgtggatcagtctgattttttttatgaattcagtaaacttatcttcaccaaaggcaagtctcctacggtagtgtgcagcttatgcaaacgagagggtcatctaaagaaggactgtcctgaagacttcaaaagaatccagctagaacctctgccaccattaacacccaagtttttaaatatcttagatcaagtctgtatccagtgttataaggatttttctccaacaattatagaggatcaggctcgtgaacatattcggcaaaacctagaaagtttcataagacaggactttccaggaactaaattgagcctgtttggctcctccaaaaatggatttgggttcaaacagagtgaccttgacgtctgtatgacaattaatggncttgaaactgctgagggattggactgtgtcagaactattgaagaattagcaagagtcctcagaaaacattcaggnctgagaaacatcttacctattacaacagcaaaggtgccaattgtgaagttcttccatttgagaagtggtctggaagtagatatcagtttgtataacacattggcccttcataacacaaggcttttatctgcttattccgccattgatcccagagtgaagtatttgtgctataccatgaaagtatttacaaagatatacaaaggtgaaaagaaacctgaaatatttgttgatggctggaatatttatttttttgatcaaatagatgaactgcctacctattggtcagaatgtggaaaaaatacagaatctgttgggcagttatggttgggccttcttcgtttctacacagaggaatttgattttaaagaacatgttattagcatcaggagaaaaagtctgcttacaacttttaagaaacagtggacctcaaaatacattgttattgaagatccctttgatttgaatcataatcttggagctggattatcaaggaaaatgacaaattttataatgaaggcttttatcaatggtagaagagtatttggtattcctgtcaagggatttccaaaggactacccctcaaaaatggaatacttttttgatccagatgtgttaactgaaggagagctggccccaaatgatagatgttgtcgaatttgtggaaaaatcggacacttcatgaaggactgtcctatgaggagaaaagtaagacggcggcgagatcaggaagatgccctgaaccaaagataccctgagaacaaggaaaaaagaagcaaagaggacaaagaaattcacaacaagtacacagaaagggaggtgtcaacaaaagaagataagcccatacagtgcacacctcagaaagccaagccaatgcgggcagctgctgacctggggagggagaagatcctcaggccaccagtagaaaaatggaagagacaggatgacaaagacttaagagaaaaacgttgttttatttgtggaagagaagggcacattaaaaaggaatgcccacagtttaaaggctcttcaggtagcctttccagtaaatatatgactcagggaaaagcctcagcgaagaggacccagcaggaatcatgagggaaggaaaatgcagcactctaaatggccactcaggcgttcctattcactcggaaaattaggttcatttcacaggacacagcagtgtagatcaggcttcaacttaacatttaagggaaatgtcagatttttttttaatttaatgaaattgttaatgaggaaaaatttttaatatagtcttatctaccacacatccccatagatttaaggattttaatagaaagtcatgatgtatgtatttaagccacgttaaaagaaaaaatataactatggaccggtattcagtgaatacagtttcatggtttttaattctttcaaagcacattaaaaatggtgtgctgataaaccccaagtaaattaaccctttttccgtataaatccattttttgttttgaagaggggaaattatatttattgttgtttactgaatcctggtgtgaaagcatatcagatatgtatgaactgctactgctgtacttccgatttacggacatcattttattgctatttgtagacgtgataacatgaacatgagtacctatttatgtgggccttcagtggatgggcagtgccactcaggtctctggggtttccctctctaattttaagtaaattgacatataactactatgcttataaaaatgaagtaaggaaaacaagtagtcctgtttgccactaaaaacattttcaaaggaaaaataaaatgaaagtactttttactttttatgatactcagaaattaggatgaagaacttttaaaattgctgaagatcaaagaggttatctctgccagtcacaagtgtggctggtgtcattctgggtctgactggagccctcctggactgtttctttaatttcaaaagccctgcagacatagtacctggtcagaactatgcctcggtttatttatcattttgaaataaaatcaaaatttcaacctgtaaaaaaaaaaacatta

SEQ ID NO: 333972 - DNA, 4440 bp, Homo sapiens
  misc_feature (2170)..(2170): n is a, c, g, or t
  misc_feature (2245)..(2245): n is a, c, g, or t
cagattgggtttcaaaaattcggatgtaaacattgacatccagtttccagccattatgtctcagccagatgtcctcttacttgttcaagaatgtttaaagaacagtgactcctttattgatgttgatgcagacttccatgctagggtgccagtggtggtgtgcagagaaaagcaaagtggtcttctgtgtaaagtgagcgcaggaaatgaaaatgcttgtctgacaacaaagcatttaactgcccttggaaaactagaaccaaagctggttcctttggtgattgcatttaggtactgggcaaagctttgcagtatagatcgccctgaagaaggaggtctgccaccttatgtgtttgccctgatggccattttctttcttcagcagaggaaagaaccccttttgcctgtatatctaggatcatggattgaaggattctcattaagcaaactagggaatttcaaccttcaagacattgaaaaagatgttgtgatctgggaacatactgacagtgctgcaggggacacaggcataacaaaagaagaggcaccaagagaaacgccgattaaaaggggacaggtgtcattaatattggatgtgaaacaccagccttcagtaccagttgggcagctctgggtggaattgctgcggttctatgctttagaatttaatttggctgatttagtgataagtattcgtgtcaaagaattggtatctcgggaattgaaggattggcccaaaaagcgcattgccattgaagatccctactctgttaaaagaaatgtggcaagaaccctaaatagtcaacctgtgtttgaatatatacttcattgtttaaggacaacatacaagtattttgctcttccacacaaaattacaaaatccagccttctaaagcctctgaatgcaattacatgtatttcagaacattctaaagaagtaataaatcatcatccagatgtacaaacaaaagatgataagctcaaaaactcagttttggcccaaggtcctggtgctaccagttcagctgcaaatacctgtaaggtacagccacttactcttaaagagactgctgaaagttttggaagcccaccaaaagaagaaatgggaaatgaacacatcagtgtccaccctgaaaactcagactgtatccaagcagatgttaactctgatgattacaagggtgataaagtataccatccagaaacaggaaggaaaaacgagaaagagaaagttggaaggaagggcaagcatctgttgactgttgatcagaaacgtggagagcatgttgtctgtggcagcacacgtaataatgagtcagagagcactttggatttagaaggcttccaaaatcccacagctaaagagtgtgagggacttgccactttagataacaaggctgatcttgatggagaaagtacagaaggtactgaggaactagaagactctctaaaccactttacccactcagtacagggccagacatcagaaatgattccctctgatgaagaggaggaggacgacgaagaagaggaggaggaagaagaacctaggctcaccattaaccaaagggaagatgaagatggcatggctaatgaagatgagttagacaacacctacactgggtcaggggatgaggacgccctatctgaagaggatgatgagttaggcgaagctgctaagtatgaagacgtgaaagaatgtggaaaacatgtagaaagagctctcctagtggaacttaataaaataagtctcaaggaagaaaatgtatgtgaagaaaaaaattcacctgtggatcagtctgattttttttatgaattcagtaaacttatcttcaccaaaggcaagtctcctacggtagtgtgcagcttatgcaaacgagagggtcatctaaagaaggactgtcctgaagacttcaaaagaatccagctagaacctctgccaccattaacacccaagtttttaaatatcttagatcaagtctgtatccagtgttataaggatttttctccaacaattatagaggatcaggctcgtgaacatattcggcaaaacctagaaagtttcataagacaggactttccaggaactaaattgagcctgtttggctcctccaaaaatggatttgggttcaaacagagtgaccttgacgtctgtatgacaattaatggncttgaaactgctgagggattggactgtgtcagaactattgaagaattagcaagagtcctcagaaaacattcaggnctgagaaacatcttacctattacaacagcaaaggtgccaattgtgaagttcttccatttgagaagtggtctggaagtagatatcagtttgtataacacattggcccttcataacacaaggcttttatctgcttattccgccattgatcccagagtgaagtatttgtgctataccatgaaagtatttacaaagatatacaaaggtgaaaagaaacctgaaatatttgttgatggctggaatatttatttttttgatcaaatagatgaactgcctacctattggtcagaatgtggaaaaaatacagaatctgttgggcagttatggttgggccttcttcgtttctacacagaggaatttgattttaaagaacatgttattagcatcaggagaaaaagtctgcttacaacttttaagaaacagtggacctcaaaatacattgttattgaagatccctttgatttgaatcataatcttggagctggattatcaaggaaaatgacaaattttataatgaaggcttttatcaatggtagaagagtatttggtattcctgtcaagggatttccaaaggactacccctcaaaaatggaatacttttttgatccagatgtgttaactgaaggagagctggccccaaatgatagatgttgtcgaatttgtggaaaaatcggacacttcatgaaggactgtcctatgaggagaaaagtaagacggcggcgagatcaggaagatgccctgaaccaaagataccctgagaacaaggaaaaaagaagcaaagaggacaaagaaattcacaacaagtacacagaaagggaggtgtcaacaaaagaagataagcccatacagtgcacacctcagaaagccaagccaatgcgggcagctgctgacctggggagggagaagatcctcaggccaccagtagaaaaatggaagagacaggatgacaaagacttaagagaaaaacgttgttttatttgtggaagagaagggcacattaaaaaggaatgcccacagtttaaaggctcttcaggaatgtctaaatcagattgtatgtttggatcgccctcacctgtcccattgaaaccaactggtttatttgttcaggcagtgcttttacatgaagacaaaaagaaacaaaaaacaacaatatttttgagtccccagtcagggtagcctttccagtaaatatatgactcagggaaaagcctcagcgaagaggacccagcaggaatcatgagggaaggaaaatgcagcactctaaatggccactcaggcgttcctattcactcggaaaattaggttcatttcacaggacacagcagtgtagatcaggcttcaacttaacatttaagggaaatgtcagatttttttttaatttaatgaaattgttaatgaggaaaaatttttaatatagtcttatctaccacacatccccatagatttaaggattttaatagaaagtcatgatgtatgtatttaagccacgttaaaagaaaaaatataactatggaccggtattcagtgaatacagtttcatggtttttaattctttcaaagcacattaaaaatggtgtgctgataaaccccaagtaaattaaccctttttccgtataaatccattttttgttttgaagaggggaaattatatttattgttgtttactgaatcctggtgtgaaagcatatcagatatgtatgaactgctactgctgtacttccgatttacggacatcattttattgctatttgtagacgtgataacatgaacatgagtacctatttatgtgggccttcagtggatgggcagtgccactcaggtctctggggtttccctctctaattttaagtaaattgacatataactactatgcttataaaaatgaagtaaggaaaacaagtagtcctgtttgccactaaaaacattttcaaaggaaaaataaaatgaaagtactttttactttttatgatactcagaaattaggatgaagaacttttaaaattgctgaagatcaaagaggttatctctgccagtcacaagtgtggctggtgtcattctgggtctgactggagccctcctggactgtttctttaatttcaaaagccctgcagacatagtacctggtcagaactatgcctcggtttatttatcattttgaaataaaatcaaaatttcaacctgtaaaaaaaaaaacatta

SEQ ID NO: 333973 - DNA, 4366 bp, Homo sapiens
  misc_feature (2170)..(2170): n is a, c, g, or t
  misc_feature (2245)..(2245): n is a, c, g, or t
cagattgggtttcaaaaattcggatgtaaacattgacatccagtttccagccattatgtctcagccagatgtcctcttacttgttcaagaatgtttaaagaacagtgactcctttattgatgttgatgcagacttccatgctagggtgccagtggtggtgtgcagagaaaagcaaagtggtcttctgtgtaaagtgagcgcaggaaatgaaaatgcttgtctgacaacaaagcatttaactgcccttggaaaactagaaccaaagctggttcctttggtgattgcatttaggtactgggcaaagctttgcagtatagatcgccctgaagaaggaggtctgccaccttatgtgtttgccctgatggccattttctttcttcagcagaggaaagaaccccttttgcctgtatatctaggatcatggattgaaggattctcattaagcaaactagggaatttcaaccttcaagacattgaaaaagatgttgtgatctgggaacatactgacagtgctgcaggggacacaggcataacaaaagaagaggcaccaagagaaacgccgattaaaaggggacaggtgtcattaatattggatgtgaaacaccagccttcagtaccagttgggcagctctgggtggaattgctgcggttctatgctttagaatttaatttggctgatttagtgataagtattcgtgtcaaagaattggtatctcgggaattgaaggattggcccaaaaagcgcattgccattgaagatccctactctgttaaaagaaatgtggcaagaaccctaaatagtcaacctgtgtttgaatatatacttcattgtttaaggacaacatacaagtattttgctcttccacacaaaattacaaaatccagccttctaaagcctctgaatgcaattacatgtatttcagaacattctaaagaagtaataaatcatcatccagatgtacaaacaaaagatgataagctcaaaaactcagttttggcccaaggtcctggtgctaccagttcagctgcaaatacctgtaaggtacagccacttactcttaaagagactgctgaaagttttggaagcccaccaaaagaagaaatgggaaatgaacacatcagtgtccaccctgaaaactcagactgtatccaagcagatgttaactctgatgattacaagggtgataaagtataccatccagaaacaggaaggaaaaacgagaaagagaaagttggaaggaagggcaagcatctgttgactgttgatcagaaacgtggagagcatgttgtctgtggcagcacacgtaataatgagtcagagagcactttggatttagaaggcttccaaaatcccacagctaaagagtgtgagggacttgccactttagataacaaggctgatcttgatggagaaagtacagaaggtactgaggaactagaagactctctaaaccactttacccactcagtacagggccagacatcagaaatgattccctctgatgaagaggaggaggacgacgaagaagaggaggaggaagaagaacctaggctcaccattaaccaaagggaagatgaagatggcatggctaatgaagatgagttagacaacacctacactgggtcaggggatgaggacgccctatctgaagaggatgatgagttaggcgaagctgctaagtatgaagacgtgaaagaatgtggaaaacatgtagaaagagctctcctagtggaacttaataaaataagtctcaaggaagaaaatgtatgtgaagaaaaaaattcacctgtggatcagtctgattttttttatgaattcagtaaacttatcttcaccaaaggcaagtctcctacggtagtgtgcagcttatgcaaacgagagggtcatctaaagaaggactgtcctgaagacttcaaaagaatccagctagaacctctgccaccattaacacccaagtttttaaatatcttagatcaagtctgtatccagtgttataaggatttttctccaacaattatagaggatcaggctcgtgaacatattcggcaaaacctagaaagtttcataagacaggactttccaggaactaaattgagcctgtttggctcctccaaaaatggatttgggttcaaacagagtgaccttgacgtctgtatgacaattaatggncttgaaactgctgagggattggactgtgtcagaactattgaagaattagcaagagtcctcagaaaacattcaggnctgagaaacatcttacctattacaacagcaaaggtgccaattgtgaagttcttccatttgagaagtggtctggaagtagatatcagtttgtataacacattggcccttcataacacaaggcttttatctgcttattccgccattgatcccagagtgaagtatttgtgctataccatgaaagtatttacaaagatatacaaaggtgaaaagaaacctgaaatatttgttgatggctggaatatttatttttttgatcaaatagatgaactgcctacctattggtcagaatgtggaaaaaatacagaatctgttgggcagttatggttgggccttcttcgtttctacacagaggaatttgattttaaagaacatgttattagcatcaggagaaaaagtctgcttacaacttttaagaaacagtggacctcaaaatacattgttattgaagatccctttgatttgaatcataatcttggagctggattatcaaggaaaatgacaaattttataatgaaggcttttatcaatggtagaagagtatttggtattcctgtcaagggatttccaaaggactacccctcaaaaatggaatacttttttgatccagatgtgttaactgaaggagagctggccccaaatgatagatgttgtcgaatttgtggaaaaatcggacacttcatgaaggactgtcctatgaggagaaaagtaagacggcggcgagatcaggaagatgccctgaaccaaagataccctgagaacaaggaaaaaagaagcaaagaggacaaagaaattcacaacaagtacacagaaagggaggtgtcaacaaaagaagataagcccatacagtgcacacctcagaaagccaagccaatgcgggcagctgctgacctggggagggagaagatcctcaggccaccagtagaaaaatggaagagacaggatgacaaagacttaagagaaaaacgttgttttatttgtggaagagaagggcacattaaaaaggaatgcccacagtttaaaggctcttcaggcagtgcttttacatgaagacaaaaagaaacaaaaaacaacaatatttttgagtccccagtcagggtagcctttccagtaaatatatgactcagggaaaagcctcagcgaagaggacccagcaggaatcatgagggaaggaaaatgcagcactctaaatggccactcaggcgttcctattcactcggaaaattaggttcatttcacaggacacagcagtgtagatcaggcttcaacttaacatttaagggaaatgtcagatttttttttaatttaatgaaattgttaatgaggaaaaatttttaatatagtcttatctaccacacatccccatagatttaaggattttaatagaaagtcatgatgtatgtatttaagccacgttaaaagaaaaaatataactatggaccggtattcagtgaatacagtttcatggtttttaattctttcaaagcacattaaaaatggtgtgctgataaaccccaagtaaattaaccctttttccgtataaatccattttttgttttgaagaggggaaattatatttattgttgtttactgaatcctggtgtgaaagcatatcagatatgtatgaactgctactgctgtacttccgatttacggacatcattttattgctatttgtagacgtgataacatgaacatgagtacctatttatgtgggccttcagtggatgggcagtgccactcaggtctctggggtttccctctctaattttaagtaaattgacatataactactatgcttataaaaatgaagtaaggaaaacaagtagtcctgtttgccactaaaaacattttcaaaggaaaaataaaatgaaagtactttttactttttatgatactcagaaattaggatgaagaacttttaaaattgctgaagatcaaagaggttatctctgccagtcacaagtgtggctggtgtcattctgggtctgactggagccctcctggactgtttctttaatttcaaaagccctgcagacatagtacctggtcagaactatgcctcggtttatttatcattttgaaataaaatcaaaatttcaacctgtaaaaaaaaaaacatta

SEQ ID NO: 333974 - DNA, 1649 bp, Homo sapiens
cttggccccccatatattttgagtggaagtttttgtcccaccaccaaaccagtttgaaaacagggctactgctttcaatttaaagtaggaacaaaaagtgctaatttcttttttaggaatgtctaaatcagattgtatgtttggatcgccctcacctgtcccattgaaaccaactggtttatttgttcaggtaaacctagctcaaacggagaaggaggcgtgtctgtcatctgttcactcaggagctgctccctgagtgctctcagctctgcaccatgtccttgcgctgtgctggcagtgtgggccctccttcctctggctgacctgcagcactcctgtctgtcctgcgcgggtgtggtgcgtggtgaggcttactgggcaccggatggcggggccttgtttcagaactcctgcccatggtcttgcttttcagttaacttgcaaaattctgccacccacatgccttatttcagctctccttggatatggtttcggttttaaggctgtttcagatgctcttcctttcgattttgtaaaccagtctatttcattttttaggcagtgcttttacatgaagacaaaaagaaacaaaaaacaacaatatttttgagtccccagtcagggtagcctttccagtaaatatatgactcagggaaaagcctcagcgaagaggacccagcaggaatcatgagggaaggaaaatgcagcactctaaatggccactcaggcgttcctattcactcggaaaattaggttcatttcacaggacacagcagtgtagatcaggcttcaacttaacatttaagggaaatgtcagatttttttttaatttaatgaaattgttaatgaggaaaaatttttaatatagtcttatctaccacacatccccatagatttaaggattttaatagaaagtcatgatgtatgtatttaagccacgttaaaagaaaaaatataactatggaccggtattcagtgaatacagtttcatggtttttaattctttcaaagcacattaaaaatggtgtgctgataaaccccaagtaaattaaccctttttccgtataaatccattttttgttttgaagaggggaaattatatttattgttgtttactgaatcctggtgtgaaagcatatcagatatgtatgaactgctactgctgtacttccgatttacggacatcattttattgctatttgtagacgtgataacatgaacatgagtacctatttatgtgggccttcagtggatgggcagtgccactcaggtctctggggtttccctctctaattttaagtaaattgacatataactactatgcttataaaaatgaagtaaggaaaacaagtagtcctgtttgccactaaaaacattttcaaaggaaaaataaaatgaaagtactttttactttttatgatactcagaaattaggatgaagaacttttaaaattgctgaagatcaaagaggttatctctgccagtcacaagtgtggctggtgtcattctgggtctgactggagccctcctggactgtttctttaatttcaaaagccctgcagacatagtacctggtcagaactatgcctcggtttatttatcattttgaaataaaatcaaaatttcaacctgtaaaaaaaaaaacatta

SEQ ID NO: 333975 - DNA, 3443 bp, Homo sapiens
  misc_feature (2170)..(2170): n is a, c, g, or t
  misc_feature (2245)..(2245): n is a, c, g, or t
cagattgggtttcaaaaattcggatgtaaacattgacatccagtttccagccattatgtctcagccagatgtcctcttacttgttcaagaatgtttaaagaacagtgactcctttattgatgttgatgcagacttccatgctagggtgccagtggtggtgtgcagagaaaagcaaagtggtcttctgtgtaaagtgagcgcaggaaatgaaaatgcttgtctgacaacaaagcatttaactgcccttggaaaactagaaccaaagctggttcctttggtgattgcatttaggtactgggcaaagctttgcagtatagatcgccctgaagaaggaggtctgccaccttatgtgtttgccctgatggccattttctttcttcagcagaggaaagaaccccttttgcctgtatatctaggatcatggattgaaggattctcattaagcaaactagggaatttcaaccttcaagacattgaaaaagatgttgtgatctgggaacatactgacagtgctgcaggggacacaggcataacaaaagaagaggcaccaagagaaacgccgattaaaaggggacaggtgtcattaatattggatgtgaaacaccagccttcagtaccagttgggcagctctgggtggaattgctgcggttctatgctttagaatttaatttggctgatttagtgataagtattcgtgtcaaagaattggtatctcgggaattgaaggattggcccaaaaagcgcattgccattgaagatccctactctgttaaaagaaatgtggcaagaaccctaaatagtcaacctgtgtttgaatatatacttcattgtttaaggacaacatacaagtattttgctcttccacacaaaattacaaaatccagccttctaaagcctctgaatgcaattacatgtatttcagaacattctaaagaagtaataaatcatcatccagatgtacaaacaaaagatgataagctcaaaaactcagttttggcccaaggtcctggtgctaccagttcagctgcaaatacctgtaaggtacagccacttactcttaaagagactgctgaaagttttggaagcccaccaaaagaagaaatgggaaatgaacacatcagtgtccaccctgaaaactcagactgtatccaagcagatgttaactctgatgattacaagggtgataaagtataccatccagaaacaggaaggaaaaacgagaaagagaaagttggaaggaagggcaagcatctgttgactgttgatcagaaacgtggagagcatgttgtctgtggcagcacacgtaataatgagtcagagagcactttggatttagaaggcttccaaaatcccacagctaaagagtgtgagggacttgccactttagataacaaggctgatcttgatggagaaagtacagaaggtactgaggaactagaagactctctaaaccactttacccactcagtacagggccagacatcagaaatgattccctctgatgaagaggaggaggacgacgaagaagaggaggaggaagaagaacctaggctcaccattaaccaaagggaagatgaagatggcatggctaatgaagatgagttagacaacacctacactgggtcaggggatgaggacgccctatctgaagaggatgatgagttaggcgaagctgctaagtatgaagacgtgaaagaatgtggaaaacatgtagaaagagctctcctagtggaacttaataaaataagtctcaaggaagaaaatgtatgtgaagaaaaaaattcacctgtggatcagtctgattttttttatgaattcagtaaacttatcttcaccaaaggcaagtctcctacggtagtgtgcagcttatgcaaacgagagggtcatctaaagaaggactgtcctgaagacttcaaaagaatccagctagaacctctgccaccattaacacccaagtttttaaatatcttagatcaagtctgtatccagtgttataaggatttttctccaacaattatagaggatcaggctcgtgaacatattcggcaaaacctagaaagtttcataagacaggactttccaggaactaaattgagcctgtttggctcctccaaaaatggatttgggttcaaacagagtgaccttgacgtctgtatgacaattaatggncttgaaactgctgagggattggactgtgtcagaactattgaagaattagcaagagtcctcagaaaacattcaggnctgagaaacatcttacctattacaacagcaaaggtgccaattgtgaagttcttccatttgagaagtggtctggaagtagatatcagtttgtataacacattggcccttcataacacaaggcttttatctgcttattccgccattgatcccagagtgaagtatttgtgctataccatgaaagtatttacaaagatatacaaaggtgaaaagaaacctgaaatatttgttgatggctggaatatttatttttttgatcaaatagatgaactgcctacctattggtcagaatgtggaaaaaatacagaatctgttgggcagttatggttgggccttcttcgtttctacacagaggaatttgattttaaagaacatgttattagcatcaggagaaaaagtctgcttacaacttttaagaaacagtggacctcaaaatacattgttattgaagatccctttgatttgaatcataatcttggagctggattatcaaggaaaatgacaaattttataatgaaggcttttatcaatggtagaagagtatttggtattcctgtcaagggatttccaaaggactacccctcaaaaatggaatacttttttgatccagatgtgttaactgaaggagagctggccccaaatgatagatgttgtcgaatttgtggaaaaatcggacacttcatgaaggactgtcctatgaggagaaaagtaagacggcggcgagatcaggaagatgccctgaaccaaagataccctgagaacaaggaaaaaagaagcaaagaggacaaagaaattcacaacaagtacacagaaagggaggtgtcaacaaaagaagataagcccatacagtgcacacctcagaaagccaagccaatgcgggcagctgctgacctggggagggagaagatcctcaggccaccagtagaaaaatggaagagacaggatgacaaagacttaagagaaaaacgttgttttatttgtggaagagaagggcacattaaaaaggaatgcccacagtttaaaggctcttcaggtagcctttccagtaaatatatgactcagggaaaagcctcagcgaagaggacccagcaggaatcatgagggaagatcaaatgaatgaaatgaagcgagaagaatagtttagagaaaagcataattagaaatgaacaaagcctccaagatatatgggatctatgtgtcg

SEQ ID NO: 333976 - DNA, 2227 bp, Homo sapiens
cagattgggtttcaaaaattcggatgtaaacattgacatccagtttccagccattatgtctcagccagatgtcctcttacttgttcaagaatgtttaaagaacagtgactcctttattgatgttgatgcagacttccatgctagggtgccagtggtggtgtgcagagaaaagcaaagtggtcttctgtgtaaagtgagcgcaggaaatgaaaatgcttgtctgacaacaaagcatttaactgcccttggaaaactagaaccaaagctggttcctttggtgattgcatttaggtactgggcaaagctttgcagtatagatcgccctgaagaaggaggtctgccaccttatgtgtttgccctgatggccattttctttcttcagcagaggaaagaaccccttttgcctgtatatctaggatcatggattgaaggattctcattaagcaaactagggaatttcaaccttcaagacattgaaaaagatgttgtgatctgggaacatactgacagtgctgcaggggacacaggcataacaaaagaagaggcaccaagagaaacgccgattaaaaggggacaggtgtcattaatattggatgtgaaacaccagccttcagtaccagttgggcagctctgggtggaattgctgcggttctatgctttagaatttaatttggctgatttagtgataagtattcgtgtcaaagaattggtatctcgggaattgaaggattggcccaaaaagcgcattgccattgaagatccctactctgttaaaagaaatgtggcaagaaccctaaatagtcaacctgtgtttgaatatatacttcattgtttaaggacaacatacaagtattttgctcttccacacaaaattacaaaatccagccttctaaagcctctgaatgcaattacatgtatttcagaacattctaaagaagtaataaatcatcatccagatgtacaaacaaaagatgataagctcaaaaactcagttttggcccaaggtcctggtgctaccagttcagctgcaaatacctgtaaggtacagccacttactcttaaagagactgctgaaagttttggaagcccaccaaaagaagaaatgggaaatgaacacatcagtgtccaccctgaaaactcagactgtatccaagcagatgttaactctgatgattacaagggtgataaagtataccatccagaaacaggaaggaaaaacgagaaagagaaagttggaaggaagggcaagcatctgttgactgttgatcagaaacgtggagagcatgttgtctgtggcagcacacgtaataatgagtcagagagcactttggatttagaaggcttccaaaatcccacagctaaagagtgtgagggacttgccactttagataacaaggctgatcttgatggagaaagtacagaaggtactgaggaactagaagactctctaaaccactttacccactcagtacagggccagacatcagaaatgattccctctgatgaagaggaggaggacgacgaagaagaggaggaggaagaagaacctaggctcaccattaaccaaagggaagatgaagatggcatggctaatgaagatgagttagacaacacctacactgggtcaggggatgaggacgccctatctgaagaggatgatgagttaggcgaagctgctaagtatgaagacgtgaaagaatgtggaaaacatgtagaaagagctctcctagtggaacttaataaaataagtctcaaggaagaaaatgtatgtgaagaaaaaaattcacctgtggatcagtctgattttttttatgaattcagtaaacttatcttcaccaaaggcaaggtaatcagtaccaccactagtcatagaactaggagactttaaggactttgaatgcatttaatttcaatttttatatactaggaattttcctattttggtagtgttgaacaagttggcctttcattctgatatgactgctcggtctgcttttctccttaagactcatgggaattagcagaggaagggaatgctattagtagtgaaaatagccactatgttctcctaatgatactataggatgtccccatctctcagatcatttgagtggatgcatgttatattttcatttcctttggaaagtgaataggtgactgtgtacttttaaaacatgattccagactcctttatttggcaaataaagtgttaagtcttgttttgctt

SEQ ID NO: 333977 - DNA, 2709 bp, Homo sapiens
  misc_feature (2170)..(2170): n is a, c, g, or t
  misc_feature (2245)..(2245): n is a, c, g, or t
cagattgggtttcaaaaattcggatgtaaacattgacatccagtttccagccattatgtctcagccagatgtcctcttacttgttcaagaatgtttaaagaacagtgactcctttattgatgttgatgcagacttccatgctagggtgccagtggtggtgtgcagagaaaagcaaagtggtcttctgtgtaaagtgagcgcaggaaatgaaaatgcttgtctgacaacaaagcatttaactgcccttggaaaactagaaccaaagctggttcctttggtgattgcatttaggtactgggcaaagctttgcagtatagatcgccctgaagaaggaggtctgccaccttatgtgtttgccctgatggccattttctttcttcagcagaggaaagaaccccttttgcctgtatatctaggatcatggattgaaggattctcattaagcaaactagggaatttcaaccttcaagacattgaaaaagatgttgtgatctgggaacatactgacagtgctgcaggggacacaggcataacaaaagaagaggcaccaagagaaacgccgattaaaaggggacaggtgtcattaatattggatgtgaaacaccagccttcagtaccagttgggcagctctgggtggaattgctgcggttctatgctttagaatttaatttggctgatttagtgataagtattcgtgtcaaagaattggtatctcgggaattgaaggattggcccaaaaagcgcattgccattgaagatccctactctgttaaaagaaatgtggcaagaaccctaaatagtcaacctgtgtttgaatatatacttcattgtttaaggacaacatacaagtattttgctcttccacacaaaattacaaaatccagccttctaaagcctctgaatgcaattacatgtatttcagaacattctaaagaagtaataaatcatcatccagatgtacaaacaaaagatgataagctcaaaaactcagttttggcccaaggtcctggtgctaccagttcagctgcaaatacctgtaaggtacagccacttactcttaaagagactgctgaaagttttggaagcccaccaaaagaagaaatgggaaatgaacacatcagtgtccaccctgaaaactcagactgtatccaagcagatgttaactctgatgattacaagggtgataaagtataccatccagaaacaggaaggaaaaacgagaaagagaaagttggaaggaagggcaagcatctgttgactgttgatcagaaacgtggagagcatgttgtctgtggcagcacacgtaataatgagtcagagagcactttggatttagaaggcttccaaaatcccacagctaaagagtgtgagggacttgccactttagataacaaggctgatcttgatggagaaagtacagaaggtactgaggaactagaagactctctaaaccactttacccactcagtacagggccagacatcagaaatgattccctctgatgaagaggaggaggacgacgaagaagaggaggaggaagaagaacctaggctcaccattaaccaaagggaagatgaagatggcatggctaatgaagatgagttagacaacacctacactgggtcaggggatgaggacgccctatctgaagaggatgatgagttaggcgaagctgctaagtatgaagacgtgaaagaatgtggaaaacatgtagaaagagctctcctagtggaacttaataaaataagtctcaaggaagaaaatgtatgtgaagaaaaaaattcacctgtggatcagtctgattttttttatgaattcagtaaacttatcttcaccaaaggcaagtctcctacggtagtgtgcagcttatgcaaacgagagggtcatctaaagaaggactgtcctgaagacttcaaaagaatccagctagaacctctgccaccattaacacccaagtttttaaatatcttagatcaagtctgtatccagtgttataaggatttttctccaacaattatagaggatcaggctcgtgaacatattcggcaaaacctagaaagtttcataagacaggactttccaggaactaaattgagcctgtttggctcctccaaaaatggatttgggttcaaacagagtgaccttgacgtctgtatgacaattaatggncttgaaactgctgagggattggactgtgtcagaactattgaagaattagcaagagtcctcagaaaacattcaggnctgagaaacatcttacctattacaacagcaaaggtgccaattgtgaagttcttccatttgagaagtggtctggaagtagatatcagtttgtataacacattggcccttcataacacaaggcttttatctgcttattccgccattgatcccagagtgaagtatttgtgctataccatgaaagtatttacaaaggtgagtatgctaccatattgtgacttatcaggaaatttcattgcatctttaaacactgttggaaacataaatctattttttaatgaactgtagtcatgtgaaatgcttcatgtagctatatgggagaccctatgaagaaagctaaaattttgttctgaattttatacaatgacctgatcttgcacgtagccagctgtccactgctttgctaggttggattggttttgcctttgacaatgtgatttttatattagttctcaaaatatgcactt

SEQ ID NO: 333978 - DNA, 247 bp, Homo sapiens
gctcggtcccttgaaatgggcacagaaattaggatgaagaacttttaaaattgctgaagatcaaagaggttatctctgccagtcacaagtgtggctggtgtcattctgggtctgactggagccctcctggactgtttctttaatttcaaaagccctgcagacatagtacctggtcagaactatgcctcggtttatttatcattttgaaataaaatcaaaatttcaacctgtaaaaaaaaaaacatta

SEQ ID NO: 333979 - DNA, 580 bp, Homo sapiens
gtatggacacctatcacaccttgatgtttgctctaacatctcaagggaaatctgctttttagagctctttactattttagttatctttatttctttatcaatatatttactcaaaaaagatcttgtttttaagaaagtaaaatcccttccccctcctttaatgttgatcctccatatatcttattcctggctttatttagagtcttatgagagtcatttggtgaacttttctaagattatcagtgaggtgaaagtgtaatcatccctggtacctgcacatgtagcctcagtgaccagaaaagaagctgcaacttgagctttgctacttgatatatgtacttgtgaaatcaaatcacaggggtggcggtagccagagttatctcaggacaccatgctctgtgcacaggtgagccacacacaggcacatgcatagaaaagggaacagaaagaaataggctgcatagttagcagtgggtgaatctgcagaggggaattatggaagatttttttctgtagattttgtcattttgattttctacaagtgagcatgattattcttatgacgaagaaaatatctatt

SEQ ID NO: 333980 - DNA, 273 bp, Homo sapiens
atgttgtcgaatttgtggaaaaatcggacacttcatgaaggactgtcctatgaggagaaagtaagtaaatgttcaaaggggttggttgtgtttttattttcttaatgtcccaatttttaaatgaggtactattataacaaagaaaatacacttgtgtaaaatccagcagttttcagatacatttaagttttttattttattttttaatgaaatgaagtgatttaaaacatgactttaggccgggtgcagtggttcacgcctgtaatcccagca

SEQ ID NO: 333981 - DNA, 195 bp, Homo sapiens
ttgaattgtaagataactgtttaatatctggttagttttgtgttccgatctcacgtgaatagttcaggcttttatatatttatgttcttctaggaatacttttttgatccagatgtgttaactgaaggagagctggccccaaatgatagatgttgtcgaatttgtggaaaaatcggacacttcatgaaggactgt

SEQ ID NO: 333982 - DNA, 962 bp, Homo sapiens
cagattgggtttcaaaaattcggatgtaaacattgacatccagtttccagccattatgtctcagccagatgtcctcttacttgttcaagaatgtttaaagaacagtgactcctttattgatgttgatgcagacttccatgctagggtgccagtggtggtgtgcagagaaaagcaaagtggtcttctgtgtaaagtgagcgcaggaaatgaaaatgcttgtctgacaacaaagcatttaactgcccttggaaaactagaaccaaagctggttcctttggtgattgcatttaggtactgggcaaagctttgcagtatagatcgccctgaagaaggaggtctgccaccttatgtgtttgccctgatggccattttctttcttcagcagaggaaagaaccccttttgcctgtatatctaggatcatgggtataaaacattttttttgcttatatatctgaacagattttattacaggtccacaattaaattttgcataatttcaaaatctagacacctaaccagaactgacatggatttatttattctactcatgtgaatattcatacctttcactgctgaaatactaatgtgtttgatttcagtatgttgccctataacctgcttagggatattattacctttctagactgcaaaatctcttaatttttgaaatatgtatggtcctgagacgaacaagagactgaccctgtaaatttaccatttggtacattctttctttgggtacagttttctaaattgatacttgaatttacatatcacctccagacagacagactgtgggaagcatttggttcactgtaacttactttctgtttctaatctatttctccccataacctgtaaaacaaaaaaatatataaacattgaaattgctacctgtaccacaagatgcagaacctagtagtcatctcttgaataatattttgacattattttaaagatg

SEQ ID NO: 333983 - DNA, 4415 bp, Homo sapiens
  misc_feature (2170)..(2170): n is a, c, g, or t
  misc_feature (2245)..(2245): n is a, c, g, or t
cagattgggtttcaaaaattcggatgtaaacattgacatccagtttccagccattatgtctcagccagatgtcctcttacttgttcaagaatgtttaaagaacagtgactcctttattgatgttgatgcagacttccatgctagggtgccagtggtggtgtgcagagaaaagcaaagtggtcttctgtgtaaagtgagcgcaggaaatgaaaatgcttgtctgacaacaaagcatttaactgcccttggaaaactagaaccaaagctggttcctttggtgattgcatttaggtactgggcaaagctttgcagtatagatcgccctgaagaaggaggtctgccaccttatgtgtttgccctgatggccattttctttcttcagcagaggaaagaaccccttttgcctgtatatctaggatcatggattgaaggattctcattaagcaaactagggaatttcaaccttcaagacattgaaaaagatgttgtgatctgggaacatactgacagtgctgcaggggacacaggcataacaaaagaagaggcaccaagagaaacgccgattaaaaggggacaggtgtcattaatattggatgtgaaacaccagccttcagtaccagttgggcagctctgggtggaattgctgcggttctatgctttagaatttaatttggctgatttagtgataagtattcgtgtcaaagaattggtatctcgggaattgaaggattggcccaaaaagcgcattgccattgaagatccctactctgttaaaagaaatgtggcaagaaccctaaatagtcaacctgtgtttgaatatatacttcattgtttaaggacaacatacaagtattttgctcttccacacaaaattacaaaatccagccttctaaagcctctgaatgcaattacatgtatttcagaacattctaaagaagtaataaatcatcatccagatgtacaaacaaaagatgataagctcaaaaactcagttttggcccaaggtcctggtgctaccagttcagctgcaaatacctgtaaggtacagccacttactcttaaagagactgctgaaagttttggaagcccaccaaaagaagaaatgggaaatgaacacatcagtgtccaccctgaaaactcagactgtatccaagcagatgttaactctgatgattacaagggtgataaagtataccatccagaaacaggaaggaaaaacgagaaagagaaagttggaaggaagggcaagcatctgttgactgttgatcagaaacgtggagagcatgttgtctgtggcagcacacgtaataatgagtcagagagcactttggatttagaaggcttccaaaatcccacagctaaagagtgtgagggacttgccactttagataacaaggctgatcttgatggagaaagtacagaaggtactgaggaactagaagactctctaaaccactttacccactcagtacagggccagacatcagaaatgattccctctgatgaagaggaggaggacgacgaagaagaggaggaggaagaagaacctaggctcaccattaaccaaagggaagatgaagatggcatggctaatgaagatgagttagacaacacctacactgggtcaggggatgaggacgccctatctgaagaggatgatgagttaggcgaagctgctaagtatgaagacgtgaaagaatgtggaaaacatgtagaaagagctctcctagtggaacttaataaaataagtctcaaggaagaaaatgtatgtgaagaaaaaaattcacctgtggatcagtctgattttttttatgaattcagtaaacttatcttcaccaaaggcaagtctcctacggtagtgtgcagcttatgcaaacgagagggtcatctaaagaaggactgtcctgaagacttcaaaagaatccagctagaacctctgccaccattaacacccaagtttttaaatatcttagatcaagtctgtatccagtgttataaggatttttctccaacaattatagaggatcaggctcgtgaacatattcggcaaaacctagaaagtttcataagacaggactttccaggaactaaattgagcctgtttggctcctccaaaaatggatttgggttcaaacagagtgaccttgacgtctgtatgacaattaatggncttgaaactgctgagggattggactgtgtcagaactattgaagaattagcaagagtcctcagaaaacattcaggnctgagaaacatcttacctattacaacagcaaaggtgccaattgtgaagttcttccatttgagaagtggtctggaagtagatatcagtttgtataacacattggcccttcataacacaaggcttttatctgcttattccgccattgatcccagagtgaagtatttgtgctataccatgaaagtatttacaaagatgtgtgatattggtgatgcatctagaggcagcttatcatcgtatgcatatactcttatggtgctatattttctccagcagaggaatccaccagtcattcctgtccttcaagagatatacaaaggtgaaaagaaacctgaaatatttgttgatggctggaatatttatttttttgatcaaatagatgaactgcctacctattggtcagaatgtggaaaaaatacagaatctgttgggcagttatggttgggccttcttcgtttctacacagaggaatttgattttaaagaacatgttattagcatcaggagaaaaagtctgcttacaacttttaagaaacagtggacctcaaaatacattgttattgaagatccctttgatttgaatcataatcttggagctggattatcaaggaaaatgacaaattttataatgaaggcttttatcaatggtagaagagtatttggtattcctgtcaagggatttccaaaggactacccctcaaaaatggaatacttttttgatccagatgtgttaactgaaggagagctggccccaaatgatagatgttgtcgaatttgtggaaaaatcggacacttcatgaaggactgtcctatgaggagaaaagtaagacggcggcgagatcaggaagatgccctgaaccaaagataccctgagaacaaggaaaaaagaagcaaagaggacaaagaaattcacaacaagtacacagaaagggaggtgtcaacaaaagaagataagcccatacagtgcacacctcagaaagccaagccaatgcgggcagctgctgacctggggagggagaagatcctcaggccaccagtagaaaaatggaagagacaggatgacaaagacttaagagaaaaacgttgttttatttgtggaagagaagggcacattaaaaaggaatgcccacagtttaaaggctcttcaggtagcctttccagtaaatatatgactcagggaaaagcctcagcgaagaggacccagcaggaatcatgagggaaggaaaatgcagcactctaaatggccactcaggcgttcctattcactcggaaaattaggttcatttcacaggacacagcagtgtagatcaggcttcaacttaacatttaagggaaatgtcagatttttttttaatttaatgaaattgttaatgaggaaaaatttttaatatagtcttatctaccacacatccccatagatttaaggattttaatagaaagtcatgatgtatgtatttaagccacgttaaaagaaaaaatataactatggaccggtattcagtgaatacagtttcatggtttttaattctttcaaagcacattaaaaatggtgtgctgataaaccccaagtaaattaaccctttttccgtataaatccattttttgttttgaagaggggaaattatatttattgttgtttactgaatcctggtgtgaaagcatatcagatatgtatgaactgctactgctgtacttccgatttacggacatcattttattgctatttgtagacgtgataacatgaacatgagtacctatttatgtgggccttcagtggatgggcagtgccactcaggtctctggggtttccctctctaattttaagtaaattgacatataactactatgcttataaaaatgaagtaaggaaaacaagtagtcctgtttgccactaaaaacattttcaaaggaaaaataaaatgaaagtactttttactttttatgatactcagaaattaggatgaagaacttttaaaattgctgaagatcaaagaggttatctctgccagtcacaagtgtggctggtgtcattctgggtctgactggagccctcctggactgtttctttaatttcaaaagccctgcagacatagtacctggtcagaactatgcctcggtttatttatcattttgaaataaaatcaaaatttcaacctgtaaaaaaaaaaacatta

SEQ ID NO: 333984 - DNA, 4808 bp, Homo sapiens
  misc_feature (2170)..(2170): n is a, c, g, or t
  misc_feature (2245)..(2245): n is a, c, g, or t
cagattgggtttcaaaaattcggatgtaaacattgacatccagtttccagccattatgtctcagccagatgtcctcttacttgttcaagaatgtttaaagaacagtgactcctttattgatgttgatgcagacttccatgctagggtgccagtggtggtgtgcagagaaaagcaaagtggtcttctgtgtaaagtgagcgcaggaaatgaaaatgcttgtctgacaacaaagcatttaactgcccttggaaaactagaaccaaagctggttcctttggtgattgcatttaggtactgggcaaagctttgcagtatagatcgccctgaagaaggaggtctgccaccttatgtgtttgccctgatggccattttctttcttcagcagaggaaagaaccccttttgcctgtatatctaggatcatggattgaaggattctcattaagcaaactagggaatttcaaccttcaagacattgaaaaagatgttgtgatctgggaacatactgacagtgctgcaggggacacaggcataacaaaagaagaggcaccaagagaaacgccgattaaaaggggacaggtgtcattaatattggatgtgaaacaccagccttcagtaccagttgggcagctctgggtggaattgctgcggttctatgctttagaatttaatttggctgatttagtgataagtattcgtgtcaaagaattggtatctcgggaattgaaggattggcccaaaaagcgcattgccattgaagatccctactctgttaaaagaaatgtggcaagaaccctaaatagtcaacctgtgtttgaatatatacttcattgtttaaggacaacatacaagtattttgctcttccacacaaaattacaaaatccagccttctaaagcctctgaatgcaattacatgtatttcagaacattctaaagaagtaataaatcatcatccagatgtacaaacaaaagatgataagctcaaaaactcagttttggcccaaggtcctggtgctaccagttcagctgcaaatacctgtaaggtacagccacttactcttaaagagactgctgaaagttttggaagcccaccaaaagaagaaatgggaaatgaacacatcagtgtccaccctgaaaactcagactgtatccaagcagatgttaactctgatgattacaagggtgataaagtataccatccagaaacaggaaggaaaaacgagaaagagaaagttggaaggaagggcaagcatctgttgactgttgatcagaaacgtggagagcatgttgtctgtggcagcacacgtaataatgagtcagagagcactttggatttagaaggcttccaaaatcccacagctaaagagtgtgagggacttgccactttagataacaaggctgatcttgatggagaaagtacagaaggtactgaggaactagaagactctctaaaccactttacccactcagtacagggccagacatcagaaatgattccctctgatgaagaggaggaggacgacgaagaagaggaggaggaagaagaacctaggctcaccattaaccaaagggaagatgaagatggcatggctaatgaagatgagttagacaacacctacactgggtcaggggatgaggacgccctatctgaagaggatgatgagttaggcgaagctgctaagtatgaagacgtgaaagaatgtggaaaacatgtagaaagagctctcctagtggaacttaataaaataagtctcaaggaagaaaatgtatgtgaagaaaaaaattcacctgtggatcagtctgattttttttatgaattcagtaaacttatcttcaccaaaggcaagtctcctacggtagtgtgcagcttatgcaaacgagagggtcatctaaagaaggactgtcctgaagacttcaaaagaatccagctagaacctctgccaccattaacacccaagtttttaaatatcttagatcaagtctgtatccagtgttataaggatttttctccaacaattatagaggatcaggctcgtgaacatattcggcaaaacctagaaagtttcataagacaggactttccaggaactaaattgagcctgtttggctcctccaaaaatggatttgggttcaaacagagtgaccttgacgtctgtatgacaattaatggncttgaaactgctgagggattggactgtgtcagaactattgaagaattagcaagagtcctcagaaaacattcaggnctgagaaacatcttacctattacaacagcaaaggtgccaattgtgaagttcttccatttgagaagtggtctggaagtagatatcagtttgtataacacattggcccttcataacacaaggcttttatctgcttattccgccattgatcccagagtgaagtatttgtgctataccatgaaagtatttacaaagatatacaaaggtgaaaagaaacctgaaatatttgttgatggctggaatatttatttttttgatcaaatagatgaactgcctacctattggtcagaatgtggaaaaaatacagaatctgttgggcagttatggttgggccttcttcgtttctacacagaggaatttgattttaaagaacatgttattagcatcaggagaaaaagtctgcttacaacttttaagaaacagtggacctcaaaatacattgttattgaagatccctttgatttgaatcataatcttggagctggattatcaaggaaaatgacaaattttataatgaaggcttttatcaatggtagaagagtatttggtattcctgtcaagggatttccaaaggactacccctcaaaaatggaatacttttttgatccagatgtgttaactgaaggagagctggccccaaatgatagatgttgtcgaatttgtggaaaaatcggacacttcatgaaggactgtcctatgaggagaaaagtaagacggcggcgagatcaggaagatgccctgaaccaaagataccctgagaacaaggaaaaaagaagcaaagaggacaaagaaattcacaacaagtacacagaaagggaggtgtcaacaaaagaagataagcccatacagtgcacacctcagaaagccaagccaatgcgggcagctgctgacctggggagggagaagatcctcaggccaccagtagaaaaatggaagagacaggatgacaaagacttaagagaaaaacgttgttttatttgtggaagagaagggcacattaaaaaggaatgcccacagtttaaaggctcttcaggaatgtctaaatcagattgtatgtttggatcgccctcacctgtcccattgaaaccaactggtttatttgttcaggtaaacctagctcaaacggagaaggaggcgtgtctgtcatctgttcactcaggagctgctccctgagtgctctcagctctgcaccatgtccttgcgctgtgctggcagtgtgggccctccttcctctggctgacctgcagcactcctgtctgtcctgcgcgggtgtggtgcgtggtgaggcttactgggcaccggatggcggggccttgtttcagaactcctgcccatggtcttgcttttcagttaacttgcaaaattctgccacccacatgccttatttcagctctccttggatatggtttcggttttaaggctgtttcagatgctcttcctttcgattttgtaaaccagtctatttcattttttaggcagtgcttttacatgaagacaaaaagaaacaaaaaacaacaatatttttgagtccccagtcagggtagcctttccagtaaatatatgactcagggaaaagcctcagcgaagaggacccagcaggaatcatgagggaaggaaaatgcagcactctaaatggccactcaggcgttcctattcactcggaaaattaggttcatttcacaggacacagcagtgtagatcaggcttcaacttaacatttaagggaaatgtcagatttttttttaatttaatgaaattgttaatgaggaaaaatttttaatatagtcttatctaccacacatccccatagatttaaggattttaatagaaagtcatgatgtatgtatttaagccacgttaaaagaaaaaatataactatggaccggtattcagtgaatacagtttcatggtttttaattctttcaaagcacattaaaaatggtgtgctgataaaccccaagtaaattaaccctttttccgtataaatccattttttgttttgaagaggggaaattatatttattgttgtttactgaatcctggtgtgaaagcatatcagatatgtatgaactgctactgctgtacttccgatttacggacatcattttattgctatttgtagacgtgataacatgaacatgagtacctatttatgtgggccttcagtggatgggcagtgccactcaggtctctggggtttccctctctaattttaagtaaattgacatataactactatgcttataaaaatgaagtaaggaaaacaagtagtcctgtttgccactaaaaacattttcaaaggaaaaataaaatgaaagtactttttactttttatgatactcagaaattaggatgaagaacttttaaaattgctgaagatcaaagaggttatctctgccagtcacaagtgtggctggtgtcattctgggtctgactggagccctcctggactgtttctttaatttcaaaagccctgcagacatagtacctggtcagaactatgcctcggtttatttatcattttgaaataaaatcaaaatttcaacctgtaaaaaaaaaaacatta

SEQ ID NO: 333985 - DNA, 4247 bp, Homo sapiens
  misc_feature (2170)..(2170): n is a, c, g, or t
  misc_feature (2245)..(2245): n is a, c, g, or t
cagattgggtttcaaaaattcggatgtaaacattgacatccagtttccagccattatgtctcagccagatgtcctcttacttgttcaagaatgtttaaagaacagtgactcctttattgatgttgatgcagacttccatgctagggtgccagtggtggtgtgcagagaaaagcaaagtggtcttctgtgtaaagtgagcgcaggaaatgaaaatgcttgtctgacaacaaagcatttaactgcccttggaaaactagaaccaaagctggttcctttggtgattgcatttaggtactgggcaaagctttgcagtatagatcgccctgaagaaggaggtctgccaccttatgtgtttgccctgatggccattttctttcttcagcagaggaaagaaccccttttgcctgtatatctaggatcatggattgaaggattctcattaagcaaactagggaatttcaaccttcaagacattgaaaaagatgttgtgatctgggaacatactgacagtgctgcaggggacacaggcataacaaaagaagaggcaccaagagaaacgccgattaaaaggggacaggtgtcattaatattggatgtgaaacaccagccttcagtaccagttgggcagctctgggtggaattgctgcggttctatgctttagaatttaatttggctgatttagtgataagtattcgtgtcaaagaattggtatctcgggaattgaaggattggcccaaaaagcgcattgccattgaagatccctactctgttaaaagaaatgtggcaagaaccctaaatagtcaacctgtgtttgaatatatacttcattgtttaaggacaacatacaagtattttgctcttccacacaaaattacaaaatccagccttctaaagcctctgaatgcaattacatgtatttcagaacattctaaagaagtaataaatcatcatccagatgtacaaacaaaagatgataagctcaaaaactcagttttggcccaaggtcctggtgctaccagttcagctgcaaatacctgtaaggtacagccacttactcttaaagagactgctgaaagttttggaagcccaccaaaagaagaaatgggaaatgaacacatcagtgtccaccctgaaaactcagactgtatccaagcagatgttaactctgatgattacaagggtgataaagtataccatccagaaacaggaaggaaaaacgagaaagagaaagttggaaggaagggcaagcatctgttgactgttgatcagaaacgtggagagcatgttgtctgtggcagcacacgtaataatgagtcagagagcactttggatttagaaggcttccaaaatcccacagctaaagagtgtgagggacttgccactttagataacaaggctgatcttgatggagaaagtacagaaggtactgaggaactagaagactctctaaaccactttacccactcagtacagggccagacatcagaaatgattccctctgatgaagaggaggaggacgacgaagaagaggaggaggaagaagaacctaggctcaccattaaccaaagggaagatgaagatggcatggctaatgaagatgagttagacaacacctacactgggtcaggggatgaggacgccctatctgaagaggatgatgagttaggcgaagctgctaagtatgaagacgtgaaagaatgtggaaaacatgtagaaagagctctcctagtggaacttaataaaataagtctcaaggaagaaaatgtatgtgaagaaaaaaattcacctgtggatcagtctgattttttttatgaattcagtaaacttatcttcaccaaaggcaagtctcctacggtagtgtgcagcttatgcaaacgagagggtcatctaaagaaggactgtcctgaagacttcaaaagaatccagctagaacctctgccaccattaacacccaagtttttaaatatcttagatcaagtctgtatccagtgttataaggatttttctccaacaattatagaggatcaggctcgtgaacatattcggcaaaacctagaaagtttcataagacaggactttccaggaactaaattgagcctgtttggctcctccaaaaatggatttgggttcaaacagagtgaccttgacgtctgtatgacaattaatggncttgaaactgctgagggattggactgtgtcagaactattgaagaattagcaagagtcctcagaaaacattcaggnctgagaaacatcttacctattacaacagcaaaggtgccaattgtgaagttcttccatttgagaagtggtctggaagtagatatcagtttgtataacacattggcccttcataacacaaggcttttatctgcttattccgccattgatcccagagtgaagtatttgtgctataccatgaaagtatttacaaagatatacaaaggtgaaaagaaacctgaaatatttgttgatggctggaatatttatttttttgatcaaatagatgaactgcctacctattggtcagaatgtggaaaaaatacagaatctgttgggcagttatggttgggccttcttcgtttctacacagaggaatttgattttaaagaacatgttattagcatcaggagaaaaagtctgcttacaacttttaagaaacagtggacctcaaaatacattgttattgaagatccctttgatttgaatcataatcttggagctggattatcaaggaaaatgacaaattttataatgaaggcttttatcaatggtagaagagtatttggtattcctgtcaagggatttccaaaggactacccctcaaaaatggaatacttttttgatccagatgtgttaactgaaggagagctggccccaaatgatagatgttgtcgaatttgtggaaaaatcggacacttcatgaaggactgtcctatgaggagaaaagtaagacggcggcgagatcaggaagatgccctgaaccaaagataccctgagaacaaggaaaaaagaagcaaagaggacaaagaaattcacaacaagtacacagaaagggaggtgtcaacaaaagaagataagcccatacagtgcacacctcagaaagccaagccaatgcgggcagctgctgacctggggagggagaagatcctcaggccaccagtagaaaaatggaagagacaggatgacaaagacttaagagaaaaacgttgttttatttgtggaagagaagggcacattaaaaaggaatgcccacagtttaaaggctcttcaggtagcctttccagtaaatatatgactcagggaaaagcctcagcgaagaggacccagcaggaatcatgagggaaggaaaatgcagcactctaaatggccactcaggcgttcctattcactcggaaaattaggttcatttcacaggacacagcagtgtagatcaggcttcaacttaacatttaagggaaatgtcagatttttttttaatttaatgaaattgttaatgaggaaaaatttttaatatagtcttatctaccacacatccccatagatttaaggattttaatagaaagtcatgatgtatgtatttaagccacgttaaaagaaaaaatataactatggaccggtattcagtgaatacagtttcatggtttttaattctttcaaagcacattaattttttgttttgaagaggggaaattatatttattgttgtttactgaatcctggtgtgaaagcatatcagatatgtatgaactgctactgctgtacttccgatttacggacatcattttattgctatttgtagacgtgataacatgaacatgagtacctatttatgtgggccttcagtggatgggcagtgccactcaggtctctggggtttccctctctaattttaagtaaattgacatataactactatgcttataaaaatgaagtaaggaaaacaagtagtcctgtttgccactaaaaacattttcaaaggaaaaataaaatgaaagtactttttactttttatgatactcagaaattaggatgaagaacttttaaaattgctgaagatcaaagaggttatctctgccagtcacaagtgtggctggtgtcattctgggtctgactggagccctcctggactgtttctttaatttcaaaagccctgcagacatagtacctggtcagaactatgcctcggtttatttatcattttgaaataaaatcaaaatttcaacctgtaaaaaaaaaaacatta

SEQ ID NO: 333986 - DNA, 4613 bp, Homo sapiens
  misc_feature (2170)..(2170): n is a, c, g, or t
  misc_feature (2245)..(2245): n is a, c, g, or t
cagattgggtttcaaaaattcggatgtaaacattgacatccagtttccagccattatgtctcagccagatgtcctcttacttgttcaagaatgtttaaagaacagtgactcctttattgatgttgatgcagacttccatgctagggtgccagtggtggtgtgcagagaaaagcaaagtggtcttctgtgtaaagtgagcgcaggaaatgaaaatgcttgtctgacaacaaagcatttaactgcccttggaaaactagaaccaaagctggttcctttggtgattgcatttaggtactgggcaaagctttgcagtatagatcgccctgaagaaggaggtctgccaccttatgtgtttgccctgatggccattttctttcttcagcagaggaaagaaccccttttgcctgtatatctaggatcatggattgaaggattctcattaagcaaactagggaatttcaaccttcaagacattgaaaaagatgttgtgatctgggaacatactgacagtgctgcaggggacacaggcataacaaaagaagaggcaccaagagaaacgccgattaaaaggggacaggtgtcattaatattggatgtgaaacaccagccttcagtaccagttgggcagctctgggtggaattgctgcggttctatgctttagaatttaatttggctgatttagtgataagtattcgtgtcaaagaattggtatctcgggaattgaaggattggcccaaaaagcgcattgccattgaagatccctactctgttaaaagaaatgtggcaagaaccctaaatagtcaacctgtgtttgaatatatacttcattgtttaaggacaacatacaagtattttgctcttccacacaaaattacaaaatccagccttctaaagcctctgaatgcaattacatgtatttcagaacattctaaagaagtaataaatcatcatccagatgtacaaacaaaagatgataagctcaaaaactcagttttggcccaaggtcctggtgctaccagttcagctgcaaatacctgtaaggtacagccacttactcttaaagagactgctgaaagttttggaagcccaccaaaagaagaaatgggaaatgaacacatcagtgtccaccctgaaaactcagactgtatccaagcagatgttaactctgatgattacaagggtgataaagtataccatccagaaacaggaaggaaaaacgagaaagagaaagttggaaggaagggcaagcatctgttgactgttgatcagaaacgtggagagcatgttgtctgtggcagcacacgtaataatgagtcagagagcactttggatttagaaggcttccaaaatcccacagctaaagagtgtgagggacttgccactttagataacaaggctgatcttgatggagaaagtacagaaggtactgaggaactagaagactctctaaaccactttacccactcagtacagggccagacatcagaaatgattccctctgatgaagaggaggaggacgacgaagaagaggaggaggaagaagaacctaggctcaccattaaccaaagggaagatgaagatggcatggctaatgaagatgagttagacaacacctacactgggtcaggggatgaggacgccctatctgaagaggatgatgagttaggcgaagctgctaagtatgaagacgtgaaagaatgtggaaaacatgtagaaagagctctcctagtggaacttaataaaataagtctcaaggaagaaaatgtatgtgaagaaaaaaattcacctgtggatcagtctgattttttttatgaattcagtaaacttatcttcaccaaaggcaagtctcctacggtagtgtgcagcttatgcaaacgagagggtcatctaaagaaggactgtcctgaagacttcaaaagaatccagctagaacctctgccaccattaacacccaagtttttaaatatcttagatcaagtctgtatccagtgttataaggatttttctccaacaattatagaggatcaggctcgtgaacatattcggcaaaacctagaaagtttcataagacaggactttccaggaactaaattgagcctgtttggctcctccaaaaatggatttgggttcaaacagagtgaccttgacgtctgtatgacaattaatggncttgaaactgctgagggattggactgtgtcagaactattgaagaattagcaagagtcctcagaaaacattcaggnctgagaaacatcttacctattacaacagcaaaggtgccaattgtgaagttcttccatttgagaagtggtctggaagtagatatcagtttgtataacacattggcccttcataacacaaggcttttatctgcttattccgccattgatcccagagtgaagtatttgtgctataccatgaaagtatttacaaagatatacaaaggtgaaaagaaacctgaaatatttgttgatggctggaatatttatttttttgatcaaatagatgaactgcctacctattggtcagaatgtggaaaaaatacagaatctgttgggcagttatggttgggccttcttcgtttctacacagaggaatttgattttaaagaacatgttattagcatcaggagaaaaagtctgcttacaacttttaagaaacagtggacctcaaaatacattgttattgaagatccctttgatttgaatcataatcttggagctggattatcaaggaaaatgacaaattttataatgaaggcttttatcaatggtagaagagtatttggtattcctgtcaagggatttccaaaggactacccctcaaaaatggaatacttttttgatccagatgtgttaactgaaggagagctggccccaaatgatagatgttgtcgaatttgtggaaaaatcggacacttcatgaaggactgtcctatgaggagaaaagtaagacggcggcgagatcaggaagatgccctgaaccaaagataccctgagaacaaggaaaaaagaagcaaagaggacaaagaaattcacaacaagtacacagaaagggaggtgtcaacaaaagaagataagcccatacagtgcacacctcagaaagccaagccaatgcgggcagctgctgacctggggagggagaagatcctcaggccaccagtagaaaaatggaagagacaggatgacaaagacttaagagaaaaacgttgttttatttgtggaagagaagggcacattaaaaaggaatgcccacagtttaaaggctcttcaggaatgtctaaatcagattgtatgtttggatcgccctcacctgtcccattgaaaccaactggtttatttgttcaggtaaacctagctcaaacggagaaggaggcgtgtctgtcatctgttcactcaggagctgctccctgagtgctctcagctctgcaccatgtccttgcgctgtgctggcagtgtgggccctccttcctctggctgacctgcagcactcctgtctgtcctgcgcgggtgtggtgcgtggtgaggcttactgggcaccggatggcggggccttgtttcagaactcctgcccatggtcttgcttttcagttaacttgcaaaattctgccacccacatgccttatttcagctctccttggatatggtttcggttttaaggctgtttcagatgctcttcctttcgattttgtaaaccagtctatttcattttttaggcagtgcttttacatgaagacaaaaagaaacaaaaaacaacaatatttttgagtccccagtcaggtatgtgggttttaaaaaaaacaaatgtgtgttattttatttactgcatactttaccacatgccttttgagactttttctccaaatatgtgcttttaacagggattggacatcagaatcacttgggggaactttaaaacatatagttgcccatcctctacctttatttcctaaagctaattcttcagtggttaagcatgggcctgtgtgttttgtaaattccaagtgatgtttataccacccatgagtggcaaccagagtcttcaattatttgttccagtcccgtgctttttgttgctgctgtcttgccagcagtgttttctcctcctggagagtatttgccacacacaaagtaaggaaaaaaactaatctctagcctgaactccactgttacctctcagctacttcatttattcattctttcaacaaatagctatccagcctctcccctccctttccaagttcaggacaccagcctcaacactgaagatacagcagtgaacaagcaaagccccttctctcatttactctgcatccttttcagaagaggtagacaataaagagatacagaaataatatgtcatgtggtggcaaatgctaggaagaaataacaaaacaagaaaagggaaagagaatggttggctaaggaggcagcatctctggtaaagtaacatttaagcaaagaatcaaatgaaacaaaggggccagtcgggggaaattggtgttagactggtaaactcagagatggaaacaggtgttgtcctgcagcatcactgaggcagtgtggcaggagtggaacaggattggaaactcgagagacagaagaaatttga

SEQ ID NO: 333987 - DNA, 1278 bp, Homo sapiens
cagattgggtttcaaaaattcggatgtaaacattgacatccagtttccagccattatgtctcagccagatgtcctcttacttgttcaagaatgtttaaagaacagtgactcctttattgatgttgatgcagacttccatgctagggtgccagtggtggtgtgcagagaaaagcaaagtggtcttctgtgtaaagtgagcgcaggaaatgaaaatgcttgtctgacaacaaagcatttaactgcccttggaaaactagaaccaaagctggttcctttggtgattgcatttaggtactgggcaaagctttgcagtatagatcgccctgaagaaggaggtctgccaccttatgtgtttgccctgatggccattttctttcttcagcagaggaaagaaccccttttgcctgtatatctaggatcatggattgaaggattctcattaagcaaactagggaatttcaaccttcaagacattgaaaaagatgttgtgatctgggaacatactgacagtgctgcaggggacacaggcataacaaaagaagaggcaccaagagaaacgccgattaaaaggggacaggtgtcattaatattggatgtgaaacaccagccttcagtaccagttgggcagctctgggtggaattgctgcggttctatgctttagaatttaatttggctgatttagtgataagtattcgtgtcaaagaattggtatctcgggaattgaaggattggcccaaaaagcgcattgccattgaagatccctactctgttaaaagaaatgtggcaagaaccctaaatagtcaacctgtgtttgaatatatacttcattgtttaaggacaacatacaagtattttgctcttccacacaaaattacaaaatccagccttctaaagcctctgaatgcaattacatgtatttcagaacattctaaagaagtaataaatcatcatccagatgtacaaacaaaagatgataagctcaaaaactcagttttggcccaaggtcctggtgctaccagttcagctgcaaatacctgtaaggtacagccacttactcttaaagagactgctgaaagttttggaagcccaccaaaagaagaaatgggaaatgaacacatcagtgtccaccctgaaaactcagactgtatccaagcagatgttaactctgatgattacaagggtgataaagtataccatccagaaacaggaaggaaaaacgagaaagagaaagtccttgtaaagaaaataaaataaagaagcggaaaggtgagcacttt

SEQ ID NO: 333988 - DNA, 379 bp, Homo sapiens
gtgtcctgtgcctgacggtggttttccccctattctctttcaattacaaagtgactcagcactgggcttcgcttccattgttctctgggacctcttccatttatcagcctctgtgcttatcactgtctgtgagtcactctactgatcatttatctcctttcaaagctggcagagtaatgcttcgacgcaatctatccccattagataagattttctgaaatggattcagaatatattaaagcctcatttatctgttattgatgggttagtcaaggatctcacaaagcttcattttccaaataaccaaaacttatcatttaaagaaatagtggctggccgcagaggctcacgcctgtaatcgcagcactttgggaggccg

SEQ ID NO: 333989 - DNA, 733 bp, Homo sapiens
aggagccttgctcatcatctctttccactgcagaaggttttttccaccccactaaatatttaaaattcatattcagtgacagccctttttttactaagttgaagcgttttggtactttcaaaagggctagtctttttgtaaaacatgcattttatttcatctaaaaacttatcttttagtagtaggaaaataataaatgcttattatacaaatttcaaatggcagtaaagagaacaatgcagaaatacaaagtcatccttaattttactccagagacaaccactgtcgaaagattggaggatattcttccagactttattttccacgcgtttagcaatatacaaggcgtgcatcttaaaaatcctaatacagcaaagttaaaattgcacagtgaattctctgtacttatgcaaaggaataaactgcttttctgataagcataaatgacctaattggtctcattcttggcacattgctaatttttgagacatttagaaaacttttaaatgacttgtcctaaaaatatttggcaggacgtatattagaaaactatggagtaaagtgatcagggtgaggtagaatgattcagttgatgattttcagtttattctagggctgggtccacattaatgagggagaaagatggtactgttaatccaaatgatgtgaaaaaagcttcactatgttttatttaaatgctctgtaaagttttacagaaagggttgttctgaag

SEQ ID NO: 333990 - DNA, 970 bp, Homo sapiens
tttttttttcttgaatgtgcttcgcaagccaggctatcttccaaggaaggcagacagtgggagagcagagggactgactgcaggcaagcacattgaagaaagacactggcgggtttccccaccctcaccccaaagcagaaaactagcagacgtcagctcagccccgtcctgggcacagacactacacaaggagacgctggaagttaagcaatactttaatactgtaatatgtttgttttctttttctttcttttttttctaccaaaaaaaagtaagtaaactaaaacacaaaaacatataaataaaatccatccctcttgtcggggacctgcaggggggcaaccttaatccaaacacctggctatcaaataatcagaatgtattgtctcagacaggatttcagttccgggaggcaggggcatgatgggggagggggccggaggctgagagacaaaagttccagagcctccctcgaaggttctctactactgtattctgtacataatgtaccatcccatgtggaatctgtgagtgtcctcttaagtagcgtgggctagccaatctgccgttcatggtgtattgtaaactccgaattccatatgtaataggatgcaagtctaagcgtttcatgtggacataaatgtatctaaataaaactttccctagcactgtggctgacctcacccttacttttatactttagtatgaaactgatgagaactttggtagtgagtattttttttatatatatacatatatatgtactatctatatatatatctcaagcatctttcaggtctttgtgtgtggctttcttaaagccctgttgtaaaaaattactatgtggatggcagtctctcacatcacagatgtggaaagtataattttatatttgtattttcaaataaataagtttgtgaaaggtttccatcctctactgtggtccagaaatcaatgtgtttgtctgaca

SEQ ID NO: 333991 - DNA, 1060 bp, Homo sapiens
  misc_feature (1005)..(1005): n is a, c, g, or t
  misc_feature (1007)..(1008): n is a, c, g, or t
  misc_feature (1020)..(1020): n is a, c, g, or t
  misc_feature (1024)..(1024): n is a, c, g, or t
  misc_feature (1030)..(1031): n is a, c, g, or t
  misc_feature (1036)..(1036): n is a, c, g, or t
tttttttttcttgaatgtgcttcgcaagccaggctatcttccaaggaaggcagacagtgggagagcagagggactgactgcaggcaagcacattgaagaaagacactggcgggtttccccaccctcaccccaaagcagaaaactagcagacgtcagctcagccccgtcctgggcacagacactacacaaggagacgctggaagttaagcaatactttaatactgtaatatgtttgttttctttttctttcttttttttctaccaaaaaaaagtaagtaaactaaaacacaaaaacatataaataaaatccatccctcttgtcggggacctgcaggggggcaaccttaatccaaacacctggctatcaaataatcagaatgtattgtctcagacaggatttcagttccgggaggcaggggcatgatgggggagggggccggaggctgagagacaaaagttccagagcctccctcgaaggttctctactactgtattctgtacataatgtaccatcccatgtggaatctgtgagtgtcctcttaagtagcgtgggctagccaatctgccgttcatggtgtattgtaaactccgaattccatatgtaataggatgcaagtctaagcgtttcatgtggacataaatgtatctaaataaaactttccctagcactgtggctgacctcacccttacttttatactttagtatgaaactgatgagaactttggtagtgagtattttttttatatatatacatatatatgtactatctatatatatatctcaagcatctttcaggtctttgtgtgtggctttcttaaagccctgttgtaaaaaattactatgtggatggcagtctctcacatcacagatgtggaaagtataattttatatttgtattttcaaataaataagtttgtgaaaggtttccatcctctactgtggtccagaaatcaatgtgtttgtctgacaaaaaaaaaaataaaataaaataaactgttttgacncnnaaaaacacaaanaaanaaacanngaaanaaagcaataaaagcgcgacgacaa

SEQ ID NO: 333992 - DNA, 917 bp, Homo sapiens
tttttttttcttgaatgtgcttcgcaagccaggctatcttccaaggaaggcagacagtgggagagcagagggactgactgcaggcaagcacattgaagaaagacactggcgggtttccccaccctcaccccaaagcagaaaactagcagacgtcagctcagccccgtcctgggcacagacactacacaaggagacgctggaagttaagcaatactttaatactgtaatatgtttgttttctttttctttcttttttttctaccaaaaaaaagtaagtaaactaaaacacaaaaacatataaataaaatccatccctcttgtcggggacctgcaggggggcaaccttaatccaaacacctggctatcaaataatcagaatgtattgtctcagacaggatttcagttccgggaggcaggggcatgatgggggagggggccggaggctgagagacaaaagttccagagcctccctcgaaggttctctactactgtattctgtacataatgtaccatcccatgtggaatctgtgagtgtcctcttaagtagcgtgggctagccaatctgccgttcatggtgtattgtaaactccgaattccatatgtaataggatgcaagtctaagcgtttcatgtggacataaatgtatctaatatgaaactgatgagaactttggtagtgagtattttttttatatatatacatatatatgtactatctatatatatatctcaagcatctttcaggtctttgtgtgtggctttcttaaagccctgttgtaaaaaattactatgtggatggcagtctctcacatcacagatgtggaaagtataattttatatttgtattttcaaataaataagtttgtgaaaggtttccatcctctactgtggtccagaaatcaatgtgtttgtctgaca

SEQ ID NO: 333993 - DNA, 342 bp, Homo sapiens
aaaaaaaaaaataaaataaaataaactgttttgaacagagttgtttggtgttctttcacttgcagaggaggtctggggtctgggagagctgttgttttgcttgggcgggagaggatatcatcaaatcgcacctgccaccctcacccctcagcatgaatgctggccgtgggcctccagcagcgaagaagtccctgccttgtccccagggagcttgtggcaccatttttatgaagtggcaagagagcactaagatggaagagcagacgggagaggggtgtagattaacagcagaaggtacacagaacccatgagtggacagggaataaaccccaaaggtcctgc

SEQ ID NO: 333994 - DNA, 192 bp, Homo sapiens
aattcatagcaggcaattatcaggatataataaaagaggcaaaaagaccacgtagagtgtgtagtgcttgactggttgttgccgttagcggttgtttgatatagaggaaacaagtggagtgttttttctgggataatatgagatactcagcagagaccttatggaaaataaagtctttttagaagagtagtg

SEQ ID NO: 333995 - DNA, 764 bp, Homo sapiens
acatctcatgctcatgaacgggaagaatcaatactgtgaaaatgaccatgctgccccaaagtaatctatacattcagtgcaattcccatcaaaatactatcatcattcttcacagaaccagaaaaacaattctaaaatttatatggaaccccaaaagagcccgcataaccaaagcaataccaagcaaaaagaacaaatctggaggcatcacattacccaacttcaaattatgctacaagttaccaaaacagcctggtactggcatgaaaataggcatgtagaccaatggaacagaatagtgaacccagaaataaagccatatatgtacagccaactgatcttcaacaaagcataaaaaacataaattggggaaaggacatcctattcaataaatggtgctggaaaaaccggcaagccacacgtagaagaatgaaactgtatccccatccctcaccttatacaaaaatcaactcaaaatggatcaaagactaaaatctaagtactgaaaccataaaaattctagaggaagacattgaaaaaactcttctagacattggcttaggcaaagaattcatgactaagatcccaaaagaaaatgcaacaaaaacaaaaataaataaatggaatctaattaaactaaaaaaacttctgcacagcaaaagaaataatcagcagagtaaaaagacaacctacagagtgggagtatatattcacaaactatgcaactgacaaaggactaatatccagaatctacaaggaactca

SEQ ID NO: 333996 - DNA, 6934 bp, Homo sapiens
ttgcaacccatccgttctatctttgtagcctcagctcctaccatagtgcctgtcacggagcagctaatcgacacagtgacgcgtgtaagttatttgaagccacttcctgcgcagtggaacgtccccgccaagtctcccggcactgctgggtgtagtcccaattaaaacactaggtttcaacaacacaaggagggtccgcagggtccccggactacccaccaagggtcggctctgctttgaaacgcagctgcaggaggccgaggagcgccgcgatgccccagttatccaggccattccttccccggccgaagctggccgcctgcatgcacctaaccttgcgctaggcactggctgcggttaatccagcccgcgctcggtcctccgcgatcccagcctcccttgcgccaaggacacgtccggcggcttcgcggggcctgtctacgccaccgcggcgcttttctatgatccgctgccgctttccgagcgagtgtcatggcggccggcgtcgagttggcaggagtaacccacggaactgaggaaagtcattagagctgagaaagaagtggcccaatctggacggtgggaattcgtgggaatgagcagaaggccctccgtaggtgactgtgtcactagaggcgggcccctggtaaaattccaggccaggcctctgcgtttctaggcagaacctggagtcggccttgcctgagaacccagctttgtgttatcgtatcctgtctcgcgaaggcaggcgttcaaggatatttggtcggatcgcccggcggcgctaaacgttttcttttttccgagcggaccgggtcgttctctaaactcgccgcgatgtcgtcctggcttgggggcctcggctccggattgggccagtctctgggtcaagtcgggggcagcctggcttccctcactggccagatatcaaactttacaaaggatatgctgatggagggcacggaggaagtggaagcagaattacctgattctaggacaaaggaaattgaagccattcatgcaatcttgagatcagagaatgaaaggcttaagaaactttgtactgatctagaagagaaacatgaagcatcagagattcaaataaagcagcaatctacaagttaccgaaatcaacttcaacaaaaagaggtagaaatcagccatcttaaagccagacagattgcactccaggatcagttgctgaaactgcagtcagctgctcagtcagtaccttcaggagctggtgtaccagcaaccactgcatcatcttcattcgcttatgggattagtcatcatccttcagctttccatgacgatgacatggactttggtgatataatttcatcccaacaagaaataaaccgactctcaaatgaagtttcaagacttgagtctgaagttggccattggaggcatattgctcagacttccaaagcacaaggaacagataactctgatcaaagtgaaatatgtaaactacaaaatatcattaaggaactaaaacagaaccgaagtcaggaaattgatgaccatcaacatgaaatgtcagtactgcagaatgcacaccaacagaaattgacagaaataagtcgacgacatcgagaagaattaagtgactatgaagaacgaattgaagaacttgaaaatctgttacaacaaggtggctctggagttatagaaactgatctctctaaaatctatgagatgcaaaaaactattcaagttctacaaatagaaaaagtggagtctaccaaaaaaatggaacaacttgaggataaaataaaagatataaataaaaaattatcttctgcagaaaatgacagagatattttgaggagagaacaagaacagctaaatgtggaaaagagacaaataatggaagaatgtgaaaacttgaaattggaatgtagtaaattgcagccttctgctgtgaagcaaagtgatactatgacagaaaaggaaagaattcttgcccagagtgcatcagtggaagaagtgttcagactacaacaagcactgtctgatgccgaaaatgaaataatgagattgagtagtttaaaccaggataacagtcttgctgaagacaatctgaaacttaaaatgcgtatcgaagttttagaaaaagagaagtcattactgagtcaagaaaaggaagaacttcagatgtcacttttaaaattgaacaatgaatatgaagtaattaaaagtacagctacaagagacataagtttggattcagaattacatgacttaagacttaatttggaggcaaaggaacaagaactcaatcagagtattagtgaaaaggaaacactgatagctgagatagaagaattggacagacagaatcaagaagctacaaagcacatgattttgataaaagatcagctatcaaaacaacaaaatgaaggagatagcatcatcagtaaactgaaacaagatctaaatgatgaaaaaaagagagttcatcaacttgaagatgataaaatggacattactaaagagttagatgtacagaaagaaaagctaattcaaagtgaagtggccctaaatgatttacatttaaccaagcagaaacttgaggacaaagtagaaaatttagtagatcagctaaataaatcacaagaaagtaatgtaagcatccagaaggagaatttagaacttaaggagcatattagacaaaatgaggaggagctttctagaataaggaatgagttaatgcagtctctaaatcaagactctaatagtaattttaaggataccttacttaaagaaagagaagctgaagttagaaacttaaagcaaaatctttcagaattagaacagctcaatgaaaatttaaagaaagttgcttttgatgtcaaaatggaaaatgaaaagttagttttagcatgtgaagatgtgaggcatcagttagaagaatgtcttgctggtaacaatcagctttctctggaaaaaaacactattgtggagactctaaaaatggaaaaaggagagatagaggcagaattgtgttgggctaaaaagaggctgttggaagaagcaaacaagtatgagaaaaccattgaagaactgtcaaatgcacgtaatttgaatacctctgccttacagctggaacatgagcatttaattaaactcaatcaaaagaaagacatggaaatagcagaactcaaaaagaatattgaacaaatggatactgaccataaagaaactaaggacgttttgtcatctagtttagaagagcagaagcagttgacacaacttataaacaagaaagaaatttttattgaaaagcttaaagaaagaagttcaaagctgcaggaggaattggataaatattctcaggccttaagaaaaaatgaaattttaagacagaccatagaggaaaaagaccgaagtcttggatccatgaaagaggaaaataatcatctgcaagaagaattggaacgactcagggaagagcagagtcgaaccgcacctgtggctgaccctaaaacccttgatagtgttactgaactagcatctgaggtatctcaactgaacacgatcaaggaacatcttgaagaggaaattaaacatcatcaaaagataattgaagatcaaaaccagagtaagatgcaactacttcagtctttacaagagcaaaagaaggaaatggatgagtttagataccagcatgagcaaatgaacgccacacacacccagctctttttagagaaggatgaggaaattaagagtttgcaaaaaacaattgaacaaatcaaaacccagttgcatgaagaaagacaggacattcaaacagataactctgatatttttcaagaaacaaaagttcagagccttaatatagaaaatggaagtgaaaagcatgatttatctaaagctgaaacggaaagattagtgaaaggaataaaagagcgagaactggagattaaacttctaaatgaaaagaatatatctttaactaaacagattgatcagttgtccaaagatgaagttggtaaactaactcagattattcagcagaaagatttggagatacaagctcttcatgctagaatttcttcaacttcccatactcaagatgttgtttaccttcaacagcaactgcaggcttatgctatggaaagagaaaaggtatttgctgttttgaatgagaagactagggaaaatagccatctaaaaacagaatatcacaaaatgatggatattgttgctgccaaggaagcagctcttatcaaactgcaagatgaaaataaaaaattgtccactagatttgaaagtagtggccaagatatgtttagagaaactattcagaatttatcacgtatcattcgagaaaaagacatcgaaatagatgcactaagtcagaaatgtcagactttattggcagttttacaaacatccagcactggtaatgaggctggaggtgttaatagtaatcaatttgaggagcttctacaggaacgtgacaagttaaaacagcaagtaaagaaaatggaagagtggaagcagcaggtgatgaccacagtacaaaatatgcaacacgagtcagcccagcttcaggaagagcttcaccaacttcaagcacaggttttggttgacagtgataataattctaaattacaagtggactatactggcctgatccaaagttatgagcagaatgaaaccaaactcaaaaattttgggcaggaattagcacaagttcagcacagcattgggcagctttgcaataccaaggatcttcttttaggaaaacttgatattatttcaccccagctgtcttctgcatcattgcttactccccagtctgcagagtgtcttagagcaagtaagtctgaagtattgagtgaatcttctgaattgcttcagcaagagttagaagagctaagaaaatcactacaggaaaaagatgcaacaattagaactctccaggaaaataaccacagattgtctgattcgattgctgccacctcagagctagaaagaaaagaacacgaacaaaccgattcagaaatcaagcagctaaaggagaaacaagatgttttgcaaaagttacttaaggaaaaagacctcttaatcaaagccaaaagtgatcaactactttcttccaatgaaaatttcactaacaaagtaaatgaaaacgaacttttgaggcaggcagtaacaaacctgaaggagagaatattaattctagagatggacattggcaaactaaaaggagaaaatgaaaaaatagtggaaacatacaggggaaaggaaacagaatatcaagcgttacaagagactaacatgaagttttctatgatgctgcgagaaaaagagtttgagtgccactcaatgaaggagaaggctcttgcttttgaacagctattgaaagagaaagaacagggcaagactggagagttaaatcagcttttaaatgcagttaaatcaatgcaggagaagacagttgtgtttcaacaggagagagaccaagtcatgttggccctgaaacaaaaacaaatggaaaatactgccctacagaatgaggttcaacgtttacgtgacaaagaatttcgttcaaaccaagagctagagagattgcgtaatcatcttttagaatcagaagattcttatacccgtgaagctttggctgcagaagatagagaggctaaactaagaaagaaagtcacagtattggaggaaaagctagtttcatcctctaatgcaatggaaaatgcaagccatcaagccagtgtgcaggtagagtcattgcaagaacagttgaatgtagtttccaagcaaagggatgaaactgcgctgcagctttctgtctctcaggaacaagtaaagcagtatgctctgtcactggccaacctgcagatggtactagagcatttccaacaagaggaaaaagctatgtattctgctgaactcgaaaagcaaaaacagcttatagctgaatggaagaaaaacgcagaaaatctggaaggaaaagtgatatcattacaggaatgtttggatgaagcaaatgctgcattggattcagcatcaagacttacagaacagttagatgtaaaagaagaacaaattgaagaacttaaaagacaaaatgagctccgacaagaaatgctggatgatgtacaaaagaaattgatgagcttagcaaacagctcagaaggaaaagtagacaaagtcctaatgagaaacctcttcattggtcatttccacacaccgaaaaatcagcgtcatgaagtgttacggttaatggggagcatcctgggcgtcagaagggaggagatggagcagttgtttcatgacgatcagggcagtgttaccaggtggatgactgggtggcttggaggaggatcaaaaagtgttcccaacacacctttgagaccaaatcagcaatctgtggttaatagttctttttcagaactttttgttaaatttctagaaacagaatctcatccatccattccaccaccaaagctttctgttcatgatatgaaacctctggattcaccaggaagaagaaaaagagatacaaatgcaccagaaagttttaaagatacagcagaatccaggtctggtagaagaacagatgtaaatccgtttttggctcctcgctcggcagctgtacctcttattaacccagctggacttggacctggtgggcccgggcatcttcttctgaaacccatctcagatgttttgcccacatttacacctttgccagcgttacctgacaacagtgctggggttgtgctgaaagaccttttaaagcaatagatgattctcaagccagagacaatctagcactttaaagaaaccatgaacactatatgtatgtactttatcacaaagtggcctttggggagaaagtcatgtatttgttcgcaattatgctttctctgaatttaataaaaatattcctaatgcttttaga

SEQ ID NO: 333997 - DNA, 7535 bp, Homo sapiens
ttgcaacccatccgttctatctttgtagcctcagctcctaccatagtgcctgtcacggagcagctaatcgacacagtgacgcgtgtaagttatttgaagccacttcctgcgcagtggaacgtccccgccaagtctcccggcactgctgggtgtagtcccaattaaaacactaggtttcaacaacacaaggagggtccgcagggtccccggactacccaccaagggtcggctctgctttgaaacgcagctgcaggaggccgaggagcgccgcgatgccccagttatccaggccattccttccccggccgaagctggccgcctgcatgcacctaaccttgcgctaggcactggctgcggttaatccagcccgcgctcggtcctccgcgatcccagcctcccttgcgccaaggacacgtccggcggcttcgcggggcctgtctacgccaccgcggcgcttttctatgatccgctgccgctttccgagcgagtgtcatggcggccggcgtcgagttggcaggagtaacccacggaactgaggaaagtcattagagctgagaaagaagtggcccaatctggacggtgggaattcgtgggaatgagcagaaggccctccgtaggtgactgtgtcactagaggcgggcccctggtaaaattccaggccaggcctctgcgtttctaggcagaacctggagtcggccttgcctgagaacccagctttgtgttatcgtatcctgtctcgcgaaggcaggcgttcaaggatatttggtcggatcgcccggcggcgctaaacgttttcttttttccgagcggaccgggtcgttctctaaactcgccgcgatgtcgtcctggcttgggggcctcggctccggattgggccagtctctgggtcaagtcgggggcagcctggcttccctcactggccagatatcaaactttacaaaggatatgctgatggagggcacggaggaagtggaagcagaattacctgattctaggacaaaggaaattgaagccattcatgcaatcttgagatcagagaatgaaaggcttaagaaactttgtactgatctagaagagaaacatgaagcatcagagattcaaataaagcagcaatctacaagttaccgaaatcaacttcaacaaaaagaggtagaaatcagccatcttaaagccagacagattgcactccaggatcagttgctgaaactgcagtcagctgctcagtcagtaccttcaggagctggtgtaccagcaaccactgcatcatcttcattcgcttatgggattagtcatcatccttcagctttccatgacgatgacatggactttggtgatataatttcatcccaacaagaaataaaccgactctcaaatgaagtttcaagacttgagtctgaagttggccattggaggcatattgctcagacttccaaagcacaaggaacagataactctgatcaaagtgaaatatgtaaactacaaaatatcattaaggaactaaaacagaaccgaagtcaggaaattgatgaccatcaacatgaaatgtcagtactgcagaatgcacaccaacagaaattgacagaaataagtcgacgacatcgagaagaattaagtgactatgaagaacgaattgaagaacttgaaaatctgttacaacaaggtggctctggagttatagaaactgatctctctaaaatctatgagatgcaaaaaactattcaagttctacaaatagaaaaagtggagtctaccaaaaaaatggaacaacttgaggataaaataaaagatataaataaaaaattatcttctgcagaaaatgacagagatattttgaggagagaacaagaacagctaaatgtggaaaagagacaaataatggaagaatgtgaaaacttgaaattggaatgtagtaaattgcagccttctgctgtgaagcaaagtgatactatgacagaaaaggaaagaattcttgcccagagtgcatcagtggaagaagtgttcagactacaacaagcactgtctgatgccgaaaatgaaataatgagattgagtagtttaaaccaggataacagtcttgctgaagacaatctgaaacttaaaatgcgtatcgaagttttagaaaaagagaagtcattactgagtcaagaaaaggaagaacttcagatgtcacttttaaaattgaacaatgaatatgaagtaattaaaagtacagctacaagagacataagtttggattcagaattacatgacttaagacttaatttggaggcaaaggaacaagaactcaatcagagtattagtgaaaaggaaacactgatagctgagatagaagaattggacagacagaatcaagaagctacaaagcacatgattttgataaaagatcagctatcaaaacaacaaaatgaaggagatagcatcatcagtaaactgaaacaagatctaaatgatgaaaaaaagagagttcatcaacttgaagatgataaaatggacattactaaagagttagatgtacagaaagaaaagctaattcaaagtgaagtggccctaaatgatttacatttaaccaagcagaaacttgaggacaaagtagaaaatttagtagatcagctaaataaatcacaagaaagtaatgtaagcatccagaaggagaatttagaacttaaggagcatattagacaaaatgaggaggagctttctagaataaggaatgagttaatgcagtctctaaatcaagactctaatagtaattttaaggataccttacttaaagaaagagaagctgaagttagaaacttaaagcaaaatctttcagaattagaacagctcaatgaaaatttaaagaaagttgcttttgatgtcaaaatggaaaatgaaaagttagttttagcatgtgaagatgtgaggcatcagttagaagaatgtcttgctggtaacaatcagctttctctggaaaaaaacactattgtggagactctaaaaatggaaaaaggagagatagaggcagaattgtgttgggctaaaaagaggctgttggaagaagcaaacaagtatgagaaaaccattgaagaactgtcaaatgcacgtaatttgaatacctctgccttacagctggaacatgagcatttaattaaactcaatcaaaagaaagacatggaaatagcagaactcaaaaagaatattgaacaaatggatactgaccataaagaaactaaggacgttttgtcatctagtttagaagagcagaagcagttgacacaacttataaacaagaaagaaatttttattgaaaagcttaaagaaagaagttcaaagctgcaggaggaattggataaatattctcaggccttaagaaaaaatgaaattttaagacagaccatagaggaaaaagaccgaagtcttggatccatgaaagaggaaaataatcatctgcaagaagaattggaacgactcagggaagagcagagtcgaaccgcacctgtggctgaccctaaaacccttgatagtgttactgaactagcatctgaggtatctcaactgaacacgatcaaggaacatcttgaagaggaaattaaacatcatcaaaagataattgaagatcaaaaccagagtaagatgcaactacttcagtctttacaagagcaaaagaaggaaatggatgagtttagataccagcatgagcaaatgaacgccacacacacccagctctttttagagaaggatgaggaaattaagagtttgcaaaaaacaattgaacaaatcaaaacccagttgcatgaagaaagacaggacattcaaacagataactctgatatttttcaagaaacaaaagttcagagccttaatatagaaaatggaagtgaaaagcatgatttatctaaagctgaaacggaaagattagtgaaaggaataaaagagcgagaactggagattaaacttctaaatgaaaagaatatatctttaactaaacagattgatcagttgtccaaagatgaagttggtaaactaactcagattattcagcagaaagatttggagatacaagctcttcatgctagaatttcttcaacttcccatactcaagatgttgtttaccttcaacagcaactgcaggcttatgctatggaaagagaaaaggtatttgctgttttgaatgagaagactagggaaaatagccatctaaaaacagaatatcacaaaatgatggatattgttgctgccaaggaagcagctcttatcaaactgcaagatgaaaataaaaaattgtccactagatttgaaagtagtggccaagatatgtttagagaaactattcagaatttatcacgtatcattcgagaaaaagacatcgaaatagatgcactaagtcagaaatgtcagactttattggcagttttacaaacatccagcactggtaatgaggctggaggtgttaatagtaatcaatttgaggagcttctacaggaacgtgacaagttaaaacagcaagtaaagaaaatggaagagtggaagcagcaggtgatgaccacagtacaaaatatgcaacacgagtcagcccagcttcaggaagagcttcaccaacttcaagcacaggttttggttgacagtgataataattctaaattacaagtggactatactggcctgatccaaagttatgagcagaatgaaaccaaactcaaaaattttgggcaggaattagcacaagttcagcacagcattgggcagctttgcaataccaaggatcttcttttaggaaaacttgatattatttcaccccagctgtcttctgcatcattgcttactccccagtctgcagagtgtcttagagcaagtaagtctgaagtattgagtgaatcttctgaattgcttcagcaagagttagaagagctaagaaaatcactacaggaaaaagatgcaacaattagaactctccaggaaaataaccacagattgtctgattcgattgctgccacctcagagctagaaagaaaagaacacgaacaaaccgattcagaaatcaagcagctaaaggagaaacaagatgttttgcaaaagttacttaaggaaaaagacctcttaatcaaagccaaaagtgatcaactactttcttccaatgaaaatttcactaacaaagtaaatgaaaacgaacttttgaggcaggcagtaacaaacctgaaggagagaatattaattctagagatggacattggcaaactaaaaggagaaaatgaaaaaatagtggaaacatacaggggaaaggaaacagaatatcaagcgttacaagagactaacatgaagttttctatgatgctgcgagaaaaagagtttgagtgccactcaatgaaggagaaggctcttgcttttgaacagctattgaaagagaaagaacagggcaagactggagagttaaatcagcttttaaatgcagttaaatcaatgcaggagaagacagttgtgtttcaacaggagagagaccaagtcatgttggccctgaaacaaaaacaaatggaaaatactgccctacagaatgaggttcaacgtttacgtgacaaagaatttcgttcaaaccaagagctagagagattgcgtaatcatcttttagaatcagaagattcttatacccgtgaagctttggctgcagaagatagagaggctaaactaagaaagaaagtcacagtattggaggaaaagctagtttcatcctctaatgcaatggaaaatgcaagccatcaagccagtgtgcaggtagagtcattgcaagaacagttgaatgtagtttccaagcaaagggatgaaactgcgctgcagctttctgtctctcaggaacaagtaaagcagtatgctctgtcactggccaacctgcagatggtactagagcatttccaacaagaggaaaaagctatgtattctgctgaactcgaaaagcaaaaacagcttatagctgaatggaagaaaaacgcagaaaatctggaaggaaaagtgatatcattacaggaatgtttggatgaagcaaatgctgcattggattcagcatcaagacttacagaacagttagatgtaaaagaagaacaaattgaagaacttaaaagacaaaatgagctccgacaagaaatgctggatgatgtacaaaagaaattgatgagcttagcaaacagctcagaaggaaaagtagacaaagtcctaatgagaaacctcttcattggtcatttccacacaccgaaaaatcagcgtcatgaagtgttacggttaatggggagcatcctgggcgtcagaagggaggagatggagcagttgtttcatgacgatcagggcagtgttaccaggtggatgactgggtggcttggaggaggatcaaaaagtgttcccaacacacctttgagaccaaatcagcaatctgtggttaatagttctttttcagaactttttgttaaatttctagaaacagaatctcatccatccattccaccaccaaagctttctgttcatgatatgaaacctctggattcaccaggaagaagaaaaagagatacaaatgcaccagaaagttttaaagatacagcagaatccaggtctggtagaagaacagatgtaaatccgtttttggctcctcgctcggcagctgtacctcttattaacccagctggacttggacctggtgggcccgggcatcttcttctgaaacccatctcagatgttttgcccacatttacacctttgccagcgttacctgacaacagtgctggggttgtgctgaaagaccttttaaagcaatagatgattctcaagccagagacaatctagcactttaaagaaaccatgaacactatatgtatgtactttatcacaaagtggcctttggggagaaagtcatgtatttgttcgcaattatgctttctctgaatttaataaaaatattcctaatgcttttagaaactgcaggtgtcaggagcaagtgtttgctatataatctgctttattccttctgatttgacctaatttaagctaggaacatttaatttatcttttaccttaatttacaaaaatacagacagacaaaaatactagtagctatatggcagctttttatttccttttgtgatttccaagctcatttaagctagagattgtggtttatcaagagagtgttttttttttttaaacgaagaataaaaaaatactagtagtggcttctctgcatagtgcagaaagttgatttgaagcatatattgatcatctttagaggactttgtggagacaggccaacaagattgttgctggaaggtcataggttccctgatggatcacctgaggtcaggagttcaagaccagcctggccaacatggtgaaaccccatctctactaaaaatacaaaaattagctgggcatggtggcaggcgcctataatcccagctactcaggaggctgaggcaggagaattgcttgaccccgggaagtggaggttgcagttagcaaccactccactgcactccagcctgagcgacagagcgagactctgtctcaaaaaaaaaaaa

SEQ ID NO: 333998 - DNA, 9304 bp, Homo sapiens
ttgcaacccatccgttctatctttgtagcctcagctcctaccatagtgcctgtcacggagcagctaatcgacacagtgacgcgtgtaagttatttgaagccacttcctgcgcagtggaacgtccccgccaagtctcccggcactgctgggtgtagtcccaattaaaacactaggtttcaacaacacaaggagggtccgcagggtccccggactacccaccaagggtcggctctgctttgaaacgcagctgcaggaggccgaggagcgccgcgatgccccagttatccaggccattccttccccggccgaagctggccgcctgcatgcacctaaccttgcgctaggcactggctgcggttaatccagcccgcgctcggtcctccgcgatcccagcctcccttgcgccaaggacacgtccggcggcttcgcggggcctgtctacgccaccgcggcgcttttctatgatccgctgccgctttccgagcgagtgtcatggcggccggcgtcgagttggcaggagtaacccacggaactgaggaaagtcattagagctgagaaagaagtggcccaatctggacggtgggaattcgtgggaatgagcagaaggccctccgtaggtgactgtgtcactagaggcgggcccctggtaaaattccaggccaggcctctgcgtttctaggcagaacctggagtcggccttgcctgagaacccagctttgtgttatcgtatcctgtctcgcgaaggcaggcgttcaaggatatttggtcggatcgcccggcggcgctaaacgttttcttttttccgagcggaccgggtcgttctctaaactcgccgcgatgtcgtcctggcttgggggcctcggctccggattgggccagtctctgggtcaagtcgggggcagcctggcttccctcactggccagatatcaaactttacaaaggatatgctgatggagggcacggaggaagtggaagcagaattacctgattctaggacaaaggaaattgaagccattcatgcaatcttgagatcagagaatgaaaggcttaagaaactttgtactgatctagaagagaaacatgaagcatcagagattcaaataaagcagcaatctacaagttaccgaaatcaacttcaacaaaaagaggtagaaatcagccatcttaaagccagacagattgcactccaggatcagttgctgaaactgcagtcagctgctcagtcagtaccttcaggagctggtgtaccagcaaccactgcatcatcttcattcgcttatgggattagtcatcatccttcagctttccatgacgatgacatggactttggtgatataatttcatcccaacaagaaataaaccgactctcaaatgaagtttcaagacttgagtctgaagttggccattggaggcatattgctcagacttccaaagcacaaggaacagataactctgatcaaagtgaaatatgtaaactacaaaatatcattaaggaactaaaacagaaccgaagtcaggaaattgatgaccatcaacatgaaatgtcagtactgcagaatgcacaccaacagaaattgacagaaataagtcgacgacatcgagaagaattaagtgactatgaagaacgaattgaagaacttgaaaatctgttacaacaaggtggctctggagttatagaaactgatctctctaaaatctatgagatgcaaaaaactattcaagttctacaaatagaaaaagtggagtctaccaaaaaaatggaacaacttgaggataaaataaaagatataaataaaaaattatcttctgcagaaaatgacagagatattttgaggagagaacaagaacagctaaatgtggaaaagagacaaataatggaagaatgtgaaaacttgaaattggaatgtagtaaattgcagccttctgctgtgaagcaaagtgatactatgacagaaaaggaaagaattcttgcccagagtgcatcagtggaagaagtgttcagactacaacaagcactgtctgatgccgaaaatgaaataatgagattgagtagtttaaaccaggataacagtcttgctgaagacaatctgaaacttaaaatgcgtatcgaagttttagaaaaagagaagtcattactgagtcaagaaaaggaagaacttcagatgtcacttttaaaattgaacaatgaatatgaagtaattaaaagtacagctacaagagacataagtttggattcagaattacatgacttaagacttaatttggaggcaaaggaacaagaactcaatcagagtattagtgaaaaggaaacactgatagctgagatagaagaattggacagacagaatcaagaagctacaaagcacatgattttgataaaagatcagctatcaaaacaacaaaatgaaggagatagcatcatcagtaaactgaaacaagatctaaatgatgaaaaaaagagagttcatcaacttgaagatgataaaatggacattactaaagagttagatgtacagaaagaaaagctaattcaaagtgaagtggccctaaatgatttacatttaaccaagcagaaacttgaggacaaagtagaaaatttagtagatcagctaaataaatcacaagaaagtaatgtaagcatccagaaggagaatttagaacttaaggagcatattagacaaaatgaggaggagctttctagaataaggaatgagttaatgcagtctctaaatcaagactctaatagtaattttaaggataccttacttaaagaaagagaagctgaagttagaaacttaaagcaaaatctttcagaattagaacagctcaatgaaaatttaaagaaagttgcttttgatgtcaaaatggaaaatgaaaagttagttttagcatgtgaagatgtgaggcatcagttagaagaatgtcttgctggtaacaatcagctttctctggaaaaaaacactattgtggagactctaaaaatggaaaaaggagagatagaggcagaattgtgttgggctaaaaagaggctgttggaagaagcaaacaagtatgagaaaaccattgaagaactgtcaaatgcacgtaatttgaatacctctgccttacagctggaacatgagcatttaattaaactcaatcaaaagaaagacatggaaatagcagaactcaaaaagaatattgaacaaatggatactgaccataaagaaactaaggacgttttgtcatctagtttagaagagcagaagcagttgacacaacttataaacaagaaagaaatttttattgaaaagcttaaagaaagaagttcaaagctgcaggaggaattggataaatattctcaggccttaagaaaaaatgaaattttaagacagaccatagaggaaaaagaccgaagtcttggatccatgaaagaggaaaataatcatctgcaagaagaattggaacgactcagggaagagcagagtcgaaccgcacctgtggctgaccctaaaacccttgatagtgttactgaactagcatctgaggtatctcaactgaacacgatcaaggaacatcttgaagaggaaattaaacatcatcaaaagataattgaagatcaaaaccagagtaagatgcaactacttcagtctttacaagagcaaaagaaggaaatggatgagtttagataccagcatgagcaaatgaacgccacacacacccagctctttttagagaaggatgaggaaattaagagtttgcaaaaaacaattgaacaaatcaaaacccagttgcatgaagaaagacaggacattcaaacagataactctgatatttttcaagaaacaaaagttcagagccttaatatagaaaatggaagtgaaaagcatgatttatctaaagctgaaacggaaagattagtgaaaggaataaaagagcgagaactggagattaaacttctaaatgaaaagaatatatctttaactaaacagattgatcagttgtccaaagatgaagttggtaaactaactcagattattcagcagaaagatttggagatacaagctcttcatgctagaatttcttcaacttcccatactcaagatgttgtttaccttcaacagcaactgcaggcttatgctatggaaagagaaaaggtatttgctgttttgaatgagaagactagggaaaatagccatctaaaaacagaatatcacaaaatgatggatattgttgctgccaaggaagcagctcttatcaaactgcaagatgaaaataaaaaattgtccactagatttgaaagtagtggccaagatatgtttagagaaactattcagaatttatcacgtatcattcgagaaaaagacatcgaaatagatgcactaagtcagaaatgtcagactttattggcagttttacaaacatccagcactggtaatgaggctggaggtgttaatagtaatcaatttgaggagcttctacaggaacgtgacaagttaaaacagcaagtaaagaaaatggaagagtggaagcagcaggtgatgaccacagtacaaaatatgcaacacgagtcagcccagcttcaggaagagcttcaccaacttcaagcacaggttttggttgacagtgataataattctaaattacaagtggactatactggcctgatccaaagttatgagcagaatgaaaccaaactcaaaaattttgggcaggaattagcacaagttcagcacagcattgggcagctttgcaataccaaggatcttcttttaggaaaacttgatattatttcaccccagctgtcttctgcatcattgcttactccccagtctgcagagtgtcttagagcaagtaagtctgaagtattgagtgaatcttctgaattgcttcagcaagagttagaagagctaagaaaatcactacaggaaaaagatgcaacaattagaactctccaggaaaataaccacagattgtctgattcgattgctgccacctcagagctagaaagaaaagaacacgaacaaaccgattcagaaatcaagcagctaaaggagaaacaagatgttttgcaaaagttacttaaggaaaaagacctcttaatcaaagccaaaagtgatcaactactttcttccaatgaaaatttcactaacaaagtaaatgaaaacgaacttttgaggcaggcagtaacaaacctgaaggagagaatattaattctagagatggacattggcaaactaaaaggagaaaatgaaaaaatagtggaaacatacaggggaaaggaaacagaatatcaagcgttacaagagactaacatgaagttttctatgatgctgcgagaaaaagagtttgagtgccactcaatgaaggagaaggctcttgcttttgaacagctattgaaagagaaagaacagggcaagactggagagttaaatcagcttttaaatgcagttaaatcaatgcaggagaagacagttgtgtttcaacaggagagagaccaagtcatgttggccctgaaacaaaaacaaatggaaaatactgccctacagaatgaggttcaacgtttacgtgacaaagaatttcgttcaaaccaagagctagagagattgcgtaatcatcttttagaatcagaagattcttatacccgtgaagctttggctgcagaagatagagaggctaaactaagaaagaaagtcacagtattggaggaaaagctagtttcatcctctaatgcaatggaaaatgcaagccatcaagccagtgtgcaggtagagtcattgcaagaacagttgaatgtagtttccaagcaaagggatgaaactgcgctgcagctttctgtctctcaggaacaagtaaagcagtatgctctgtcactggccaacctgcagatggtactagagcatttccaacaagaggaaaaagctatgtattctgctgaactcgaaaagcaaaaacagcttatagctgaatggaagaaaaacgcagaaaatctggaaggaaaagtgatatcattacaggaatgtttggatgaagcaaatgctgcattggattcagcatcaagacttacagaacagttagatgtaaaagaagaacaaattgaagaacttaaaagacaaaatgagctccgacaagaaatgctggatgatgtacaaaagaaattgatgagcttagcaaacagctcagaaggaaaagtagacaaagtcctaatgagaaacctcttcattggtcatttccacacaccgaaaaatcagcgtcatgaagtgttacggttaatggggagcatcctgggcgtcagaagggaggagatggagcagttgtttcatgacgatcagggcagtgttaccaggtggatgactgggtggcttggaggaggatcaaaaagtgttcccaacacacctttgagaccaaatcagcaatctgtggttaatagttctttttcagaactttttgttaaatttctagaaacagaatctcatccatccattccaccaccaaagctttctgttcatgatatgaaacctctggattcaccaggaagaagaaaaagagatacaaatgcaccagaaagttttaaagatacagcagaatccaggtctggtagaagaacagatgtaaatccgtttttggctcctcgctcggcagctgtacctcttattaacccagctggacttggacctggtgggcccgggcatcttcttctgaaacccatctcagatgttttgcccacatttacacctttgccagcgttacctgacaacagtgctggggttgtgctgaaagaccttttaaagcaatagatgattctcaagccagagacaatctagcactttaaagaaaccatgaacactatatgtatgtactttatcacaaagtggcctttggggagaaagtcatgtatttgttcgcaattatgctttctctgaatttaataaaaatattcctaatgcttttagaaactgcaggtgtcaggagcaagtgtttgctatataatctgctttattccttctgatttgacctaatttaagctaggaacatttaatttatcttttaccttaatttacaaaaatacagacagacaaaaatactagtagctatatggcagctttttatttccttttgtgatttccaagctcatttaagctagagattgtggtttatcaagagagtgttttttttttttaaacgaagaataaaaaaatactagtagtggcttctctgcatagtgcagaaagttgatttgaagcatatattgatcatctttagaggactttgtggagacaggccaacaagattgttgctggaaggtcataggttccctgaggtgaagtatgtatttggtcctgtgcaatattatcatgtgtgtagattctttttttgtttgttttaaatagagatggggtctcactatgttgccaggctggcctcaaactcctgggctcaagtgatcctcccacctcagcctcccaaagtgctgggattaaggcatgagcacactgcgcctggccctgtgtgtaaattcatgtgactaccaccacaggcaagacacggaagacttccattacaagcatccccctgtgttgccctctcataatcattgccacctctctccctggccctctccttaatccctgacaaccacttactgttctccatctcagtcattttgttattttgagaatgttatataaatggaatcaatatataccctcttgagactggctttttttcactcagcataattcccttgagatccatccaaggctttggatgtatcactagtttgttcctttttattgttgagcatatagtgcagatatatcacttagttttaacagctaaggtatctatttaaagatatcatcttaaaactaaatgttacacaaattcatgcaactttcatataagcattaaaccatacagctgcatctacgtaagtataattagcaaaatcactgaacatgccacttcctgcctccgtctgcggtgttgacatatgaggtacagcaatccgagagtcaactgttatcacggtggccactgagggcagtgaaatcactttgatagcaccagtacccagatgtttgaaacttaagaaagtatttctttaatttttcataaacccatcataaaaaaaaaaatcccgacttgaaacttaactgtatctggatgttcatatttttattagttgttgaagttgtacatttaaaaagatatttcttgcaaattttgtaaatttctatatgcttttaaaatagaaacatttgtataacaaggaaggatgaaaataaaacaaattcaaatatgtgaatagtcctggctgaggccagaactaaatttggttatttgcaagttttactgtgattaactgtactttctaatgtatttggaagactggaagtcttaattccatgttgatgggtgaaacttgtttttctgaaaaatgaagtaactgaaaatgctgcttcagaatgtcttgtatctccttagataactaatttatattgccattctttatttactatactttaaaggaagttgtcatgcaagttctatattagaactgtcaaactgcctcttggtttttgcctattattatttctctgtgagttgttactccttggtttttatatgctcctaacaaagatactttcactgactatcctacattatttgctgcttgccattgaaatttcatttcagtgtggagaaatgaaatactagtttctaagttaaaaaagacacatggtcctttatttttaagaaatagaatatgtaaaaagttttctcttttaatttgaaaaagagatgcatggttggtatttaagtagtatgtcatcatatttgaaatgccttttgtgacatttttgagtatttccttctctgaccaaaacaacttgtccgcctctcatcccatggtttaacgtaagtttaaaagctgttgtgggtggattgcatagctaaacatcacagagcatgatattaaatggctgctatttaaataaatatgtgaccttgtcctaaagctataatactggccgggcacagtggctcacgcctgtaatcccagaactttgggagggtgaggtgggtggatcacctgaggtcaggagttcaagaccagcctggccaacatggtgaaaccccatctctactaaaaatacaaaaattagctgggcatggtggcaggcgcctataatcccagctactcaggaggctgaggcaggagaattgcttgaccccgggaagtggaggttgcagttagcaaccactccactgcactccagcctgagcgacagagcgagactctgtctcaaaaaaaaaaaa

SEQ ID NO: 333999 - DNA, 1406 bp, Homo sapiens
ttgcaacccatccgttctatctttgtagcctcagctcctaccatagtgcctgtcacggagcagctaatcgacacagtgacgcgtgtaagttatttgaagccacttcctgcgcagtggaacgtccccgccaagtctcccggcactgctgggtgtagtcccaattaaaacactaggtttcaacaacacaaggagggtccgcagggtccccggactacccaccaagggtcggctctgctttgaaacgcagctgcaggaggccgaggagcgccgcgatgccccagttatccaggccattccttccccggccgaagctggccgcctgcatgcacctaaccttgcgctaggcactggctgcggttaatccagcccgcgctcggtcctccgcgatcccagcctcccttgcgccaaggacacgtccggcggcttcgcggggcctgtctacgccaccgcggcgcttttctatgatccgctgccgctttccgagcgagtgtcatggcggccggcgtcgagttggcaggagtaacccacggaactgaggaaagtcattagagctgagaaagaagtggcccaatctggacggtgggaattcgtgggaatgagcagaaggccctccgtaggtgactgtgtcactagaggcgggcccctggtaaaattccaggccaggcctctgcgtttctaggcagaacctggagtcggccttgcctgagaacccagctttgtgttatcgtatcctgtctcgcgaaggcaggcgttcaaggatatttggtcggatcgcccggcggcgctaaacgttttcttttttccgagcggaccgggtcgttctctaaactcgccgcgatgtcgtcctggcttgggggcctcggctccggattgggccagtctctgggtcaagtcgggggcagcctggcttccctcactggccagatatcaaactttacaaaggatatgctgatggagggcacggaggaagtggaagcagaattacctgattctaggacaaaggaaattgaagccattcatgcaatcttgagatcagagttgcctttgtgtacacacctgctttcagccttctacatatgaacatatcaagtaaatgttggtgtacaaatatacatgatgaaagaatactgtcacatggccaggcatggtggctcacgcctgtaatcccagcactttgggaggccgaggtgggtggatcacctgagttcgagaccagcctgaccaacatggagaaaccctgtctctactaaaaatacaaaattcgctgggcgtggtggcacatgcctgtaatcccagctacttgggaggctgaggcaggagaatcacttgaacctgggaggtagaggttgcggtgagccaagatcccaccattgcactccagcctgggcaacaagagcgagactctc

SEQ ID NO: 334000 - DNA, 382 bp, Homo sapiens
ggtggtatcataagaggggagagtcagaatcacctggggaagagttttttccaaatcacaatgatcctccaaaacctagctcaggaactccatttttcagaaaactctgcctgatgatcacctcccccatgccttccaaggggtctaggcctgagacttacagcatctaaggatgactctattagtttggatactagttcaggtgctttaacaaattagtaagagtggcttacactgagcacagtgactcatgcctacaatcccagcactttgggaggctggggtgagtggattacttgagcccaggagttcaagaccagcctgggcaacatagtgagaccccatctctacaaaaaataaaagaaaaattagccaggctttg

SEQ ID NO: 334001 - DNA, 191 bp, Homo sapiens
caatagcactaaaagggtgtgtacaaaatgcagtggctgactaaccatctcctccattgctccgcctaagagacacccacttttagctgttttctttaggaacttgttaatattaggtttctaaaaacatgtaaccatgtgaatgagcttagacttactggattcctatcataataggcggggccttagtt

SEQ ID NO: 334002 - DNA, 154 bp, Homo sapiens
atgacattggagtggggtttagtgatcattgtgaagtgcttggactctgtcttaagagcagtggcctagtttccccaaaacacaacttatattattcatatttttaataagtagagcattggaaatggtgctttattatggatttactctgcat

SEQ ID NO: 334003 - DNA, 1019 bp, Homo sapiens
tattttctctaattgaatgttctctttatttaagcattgtagagactgaggttcaaaggttattttctcaaagttacagcagcctctgaggtggtggagggtggcagcaggacagtgagctgacggccaacccctgtgcccaagtgtgctgctccgctcaactccatgtgcaccagggaacagccattctctgcaggctgatttgatctggaaccacaattgagtctagttctggaatctcagacacatggagaattacaccttgtctccagttgctacaagtcaagtccacctgcatgcagacagctacaattgtcttgtaaaattagaaaacagaacagggacaacagtattatctatattgactatagattaattattcatttgcattctttgtcttttgtacttataaatatgaaatttgtatataaacgtgtgttttacaacataagatacagatctatatatatgtacctttgaaagattattctctctgctctttggcctaaatttccaaatggaatcatcctgtgtacagtaacctgtgtctgaaaatttctgtccacttagagtaatgaaggcatggggtcataatgagagcaacaaaaaagttacactttatactgtgaaagaccgtcaccttattgttcatttacttaagtttttcattttgtttttatattttgaaatgttgaataaaaaactcaaggcaaaaaaaaaaaaacaaaaaaaaaaaaaaaaaaaaaaaaaaaaaaaaacaaaaaaaaaaaaaaaaaaaaacaaaaaaaaaaaaaaaaaaaaaaaaaaaaaaaaaaaaaaaaaaaaaaaaaaaaagcaaaaaaacaaaagaaaaaagaaagaaagtcggggcggcggcggagcaacaacaacaaaaaagaaaaccagaggagcgggcacggaggacggcacaagcatcgcgacacagacgaaggggaagaagggatggcgcaatagataagaaggggaggcaaggaggagccagagagagaaacgagaga

SEQ ID NO: 334004 - DNA, 275 bp, Homo sapiens
ctcggcttcccagagtgctgggattacaggcgtgagccaccgtatttgagcaggaatataaaaatgtgaatttaaacaacttcattgtggtggtggtagtggtcattgtctttgttttgtttgttttaattggcatagtcaagtcttcagctgagcaactggtcttaggtatggctggcccaagtgacaactcaggccaagatagaagtgagaagttggaacagggttgtttactgtggaggatgagtcagagctgagccctttaagagaggatg

SEQ ID NO: 334005 - DNA, 496 bp, Homo sapiens
gatgacaagaaaaaacaacatgtacatgttcagtacagacaatatgttttggaatattttccaccctaggttggtgaaatccatggatgtggaacccacagatacagagggccaactgtatgtggcatcggaactaaagttttaaagtcctttctgggcattgttgagcatagcagtgttgaagttgtgcagtttagtcactgtagccttcactctgcatcgatgaatgagagaggggagatggagaagatcacctcttctcacagcacacaaattttatgtttgtctcattgcagtgtagaaggtattctgttcctcctggggcttctgagctgtgggtcaggaaacagctctaacgaagatatttattgggtgtttactctgccccattccttaagctcccttctcccctccattcaaagtgcctatacccacaggcatgcagtccctggccatcctcagagggtctgagtcagggattgcttctccgtttctc

SEQ ID NO: 334006 - DNA, 450 bp, Homo sapiens
gtgcaaaatctgctttggtcaaaagacagcaagatgggggatgagaagcttcgactcatgctagaatggtgttttccatagcatgccccttggaaccctaattccctgaaatatctgggctggggtggagctgcggaggttgagaagctcttcaaacagtggcgcagtcaaggtcaaatccatctggaaggtgctacatattcccctttccctcattgagacacaaaacacacaacaggacacttgagtctctggcagatccggaaacctgaaagctgttttgctcctacgagccttgggtccccaaaacaacatttagccacagatttgccaaatgttttgagaatgttttcctaaaaatttgccaaatttttgagaaaattcagtgagcctgacaaattaataatactaatactagtaataatagttgctaagtcttttttttttttt

SEQ ID NO: 334007 - DNA, 120 bp, Homo sapiens
cattacggtgggccttataaaaggggtgatttggacacagacacacgcgtgtgaagatggaaggagagatgggagcaatgcctctccaagccaaggatggtcaagagcagctggcagccc

SEQ ID NO: 334008 - DNA, 449 bp, Homo sapiens
cttgccccgccacggtgacttaacgcctgtagtcccagcactctgggaggcggaggtgggaggatagcttgaggccaggaattcgaggctgtgagctgtgattgcactactgcattccagcctggttgacagagagagaccctgtctcaaaagaaaaggaatccttgtcacttttatgtaaagatgtttaaaacacaaagtatctcaatgcaaagaaataatacatgtttgatataagcctgggcaacatggcgaaacctcgtctctaccaaaaatacaaaacttatccggggatggtggtgcatgcctgtgcttccatctatctattccgggagctgaccaagaagatcccttgagtctgggaggtcgaggctgcagtgagctgtgatcgcgccactgcactccagcctgggcaatacagcaaggtcctgtctccagaaaaaaaaaaa

SEQ ID NO: 334009 - DNA, 120 bp, Homo sapiens
cctcagtcttaacctttcctcaaagtagccaaggacagtgtatcagatcaaacactcctcacttaacaatatacacatataattagtatctgtgtggctgcatctgggtggctcccctgg

SEQ ID NO: 334010 - DNA, 225 bp, Homo sapiens
gttcccggaacccaaactcaattgagcaggattatgtaccatcaaaatcagtgggaattcccagcacactacagaaggtaacttctccttcaacagggttgttcgaaagcctgcaaggatgagctttttattggaggactcttccctgggtaactgaagtggaaatacagtaagaataaatgccttgatttggctgaaaagggttcaaaaacataaagaattggg

SEQ ID NO: 334011 - DNA, 321 bp, Homo sapiens
caatatttctcccaaatctgatttataattttctttaaggagtcttcgtagtaatcccatctggccccatttttcaacagtacttttgaaccaagcttctactattattattttcatgttgatttattaaagttttttaaaaaattgtattatgtctgttctttttttcccaagtagatatcagtgtgatggaaacactatcttctatatcttttgactggagtcttttatacttctgagtacatgatagatgttaaatatatactctgttaatacatattagcaagtttaaaatggtggctgtttgtttaagtcacataa

SEQ ID NO: 334012 - DNA, 300 bp, Homo sapiens
aggacctgcctccctctgcggcagcatcttcctccacatcacatcacataccctgcttgctgggcctggccaaggcctcttctacccagtcctctccttcagctagatgccacggtaggaaagcatccagagtgtcgcctgataacatctgaacgatgtcctaaaactggcaaatccccaaaggccaacaagactcgtctctaggttctggggacaggccagttgatgggaaagatggatttggaggcagagtctcctggcatccctgatgctctgctccatggaagtcactccccagaa

SEQ ID NO: 334013 - DNA, 173 bp, Homo sapiens
aaaggacagggtgggggctggagtgggggccaagacggcaagccaaacaggagatgagggggagccgggagatgaagtatcagggacaccactaagggaagtcagcaaggtgctggaagggcaagaggtctcactgtgcctgggggaagggggtccctgggcatcagtccccc

SEQ ID NO: 334014 - DNA, 430 bp, Homo sapiens
tgatacacctgtatgcttaaaggctaatgagacccacttttttgtctgcccagaagataagtagtatagtcaggtctcatacttttatgctgattgttttcatgcttttcaagtttttattaatgcctgtggctgtactccttatgagtgtaggagagatttactgtgtaagagagatttactgtggtgaacccagctttttttatacctagaatactttggagacttgtaagcctaccattatctactaaagaatactaattggggccagaggtccgtaaagaatggggattacgtacagatgaaaattaggtattttcagctctagttgagggtacagggataggggacaatgcaactaggctgtggttggggcatccattccttgcagtgatggtactcagcccttgtccctgagcttgctgcttcc

SEQ ID NO: 334015 - DNA, 814 bp, Homo sapiens
ttatcgaagatgactgcaagtctggcctctctcaacccaaggagccaaggaggggaaggccggcctgagcagcaacgtagacaagagctcaggagggcagggacagagccctggcttcagcaagagcgtggggaacagagggcaagggggtccatgcagcccaggatggcagggtgctcatacacacagccttggtcctgtcccctctcccattgccgcttttgagctcaccttgtttaaggccaaagcacacaccatcctcccacagagccactaatgcaattaacaaaacacattcataaatcttgcatggcgtccggagctgtctcctctccctaagcacaaaggccagctccagagatgctgtgcagagagctgtctgacctctccagcgtcagggccccctgaaaagtgcagcataacccttagtaggacagaaagaccattgtcttctgccaaccattacaaagtggagtggggctggggttaggaaacacagacaaatcagaagaggctgagaaggcggagatgaaagtgcataggtgtttgcagggagctggggaatagttcgtgccttccaagctcaacaagagagcattcagcagagaccagagaatcaccacttttggagggtgattttaccttgtgagaacagagcacagggtgtgtgggacccagggcatcttcggcaatgcgggcgtgacttggcgggatgtcggtgtttgtgtttgcatgtgtgtgtgcgtgcgtgcatgctcagtctggaaaactggtgactcactaaaacaccgagctttctgatctgaagagctta

SEQ ID NO: 334016 - DNA, 6416 bp, Homo sapiens
  misc_feature (113)..(113): n is a, c, g, or t
  misc_feature (117)..(117): n is a, c, g, or t
  misc_feature (122)..(122): n is a, c, g, or t
  misc_feature (129)..(129): n is a, c, g, or t
  misc_feature (136)..(136): n is a, c, g, or t
  misc_feature (145)..(145): n is a, c, g, or t
  misc_feature (149)..(149): n is a, c, g, or t
  misc_feature (1034)..(1034): n is a, c, g, or t
  misc_feature (1271)..(1271): n is a, c, g, or t
  misc_feature (2761)..(2761): n is a, c, g, or t
ctttgagacagttttgctccgtcccccaggctggagtgcagtgatgctgtcatagctcactgcagccttgaactgctggtctcaagcaatcctcccgccccagcctccagagnagcncgganttcaggngtgcacngccttgccnggcnaatttttttttttttttgagacagagtcttgctcagttgtccaggctggattcaagaccagcctggccaagatggtgacacctcgtctctactaaaaatacaaaaattatctgggcgtggtggtgggcgcccataatcccagctactcaggaggttgaggcaggagaattgcttgaacctgggaggcggaggttgcaatgagcctagatcacgccaccacactccagcctgggcgacagagtgagactccgtctaaaaaaaaaagaaaaatatactatctaatacatatagcatacaaaatatatgttcatggactgttgatgttatctgtaaggcttcccatcaacaataagctattagtggttaagcttttggggagtcaaaaattatatgcagattttctactgcatggcggggcagcattcctaatccctgtggtattcaagggttaactgtatttcttggtgaccttggacaaattgttgaacttctctgtaccgtggtgtccgaagtaaagtagtccattcaggcacagtgctaggacaccacctggcctatagcatgtgctcggtcaaagttaactctactgtaattcctgcttgggttgttctggggatacctaatttctccccaccagccacttccccaagaatagtgagtgtgagggtccttacagacagggagatgagagcgtcactcctctttatgaccgtcaaagctctgcaggtgctcgcccttcgggtctctccagcctcacctggtacccctctcccccttgcttgctttctgcagccatggtggccttttattcctcagacccgttttctttcctgtcccaggaagggcctttgcaggtgctcttcccacagcctgaaagttcctcgngtagctggctcttcctcaccctccaggcctccaggcctcagttcaaatgcctctccctgggagaggctggtcctgaccaccaccgcctcctgcctaaacacagcagattctctctcccctctagaatccaaacaccaggggagcaagagtagagttggtttcattcaccccgggctctccaagcatagcaaacgctctggaagcacgtgatgagtggctgggtgacgaagagctacnacccgagacatggtacccacatgggtacccaccctatgggtagacacgagcctggtgtcaggaggaactgggtttgaatccttcaacaactgtgtggcctttcctctctctgagcgtcgatgtccttattcgtagagtggatgatcataccttccttgcagagccattgcacagatagtgacataggcacacacaatacagtcctggctcacgctcaggagacagtggctgtcaagtcaggagcccgtcctgcagcagcctagccatctggaaggatcactcctcgacatgccgtcaatgcctggcacttggtaagaatgagtttctcacatttctctgaagggatggggtggggggcaggtagagaagaaggctctgggcacctagggtgggaaggaagaagagagagactggccctgagggtagccagtgcctctttgttcattttctcaccagaataacaggggaaatataccatttagaaagaggcagtgaggattaaatgagctagcatatccagcacatagaaggccctctccccatcctcgtccctgaaagcaaactcctcgatttctcagttttgctctggttcccaggctgtgcatggaggcaaacacagggcccttcactcaggccaagctcaggagagcccaggctgcaccgagtccacactctcggctcatttccctcagtccaccaagaggatgacaccaaggccccctcctgtacccctgcctctgccccagcaagtcctactgagatcctgcctgttatgaaatggggctgtcccattgggtgcagggcagatggcaccatgcctctaggagcctcagcatgtgtttccaaggagacagccgtgtgtgtgtgtgtacacaccaacttgtaccatccagttcttcaaaggaaggtggaaagaagggaatgagggtcaggttgcaaatgggatgtaggtggaagacgcacgacgccaggccatgctgctgtttgcctttcacagaaaaaaccagcacagcatctcacggtttgcagacactttcacatgggataactcacttaatcttggcaacaagctcatggcacagatattcttttccgctttttaaagtctggagatggagagagaggggggcaagtcccagccagtgggttgtagaattaggatttgtggcctgactctgatcataagccccctgctctcttcccagggccacactgccttgcctagaaaggattctagatcaggagtgcccctacgtggggatgccgcctgcccagcccaaagcaaaggccttgttcagcctttgaggtgtatgttccggcttcacaactccctgaaacggaggcctgagtgaccggagatggcaagaaaatgggaggaggtgtctctaagcatggccagggccccatgggagagggaagtatagggtataaaatgctaatcatatgatttagagacacagtgtctttccagaagctggaagagaaagacnttaagagctggagtgagcagtctggaacagaatcaactcttggaaaagtatccttgggagacaggttgggagtgaagacaggaagagtggttttcaggatttagggcccagggacatagaggggaaactgagtcagggcttggctacagacccacccttttgctggaaatggatttctctgccaaaagagaaattgtttgaactcatggcctagagtgaaggccaccaagaagccattgtcgttggaagccaagggagtctgggagctggtcagctctggtggagaaagtctgtttatccagggacaggaaagaggcaaggtctacacgggctgggctgggaggcccaggggcagcacgagggagagggaccccaagtctgggtttcaaggggcatcaatgaactagaaaacggaatgaggctgggtgcagtggctcacgcctgtaatcccagcactttgggaggctgaggcagctggatcactggaggtcaggagtttgagaccagcctggccaacatggtgaaacctgtctctactaaaaatacaaaaattagccgggcgtggtggcgggtgcctgtaatcctagctactcaggagactgaggcaggagaattgcttgaacacgggaggtggaggttacagtgagctgacgttgcaccactgcactccagcctgggcaacagagtgagacactggctcaaaaaaaaaaaaaaaaatgccaggcgcagtggtttacacctgtaatcccagcacttcgggaggctgaggcgggcggatcatgaggtcaagagataaagaccatcttggccaacatggtgaaaccccatctgtactaaaaatacaaaaattagcctggcgtggtggcgggcgcctgtagtcccagctactcgggtagctgaggcaggagaattgcttgaacccaggaggcagaggttgcagtgagccgagatagcaccactgcactccagcctggcgatagagcaagactcttatctcaaaaaaaaaaaagggggaaagagaaaataaaagaaagtggagtgagaggctgcacggagcggagagcatggggagagcacacctggagtttctcacactccgcagactttcctgtacacttccctcccactggaggtgagatacgctctgcacatgacctaaatgtgtgccgaagcacagccattgggcaggagaaagaagagaaaatggggagtttgtaaacagtcatccaaagagataactgcccccttccactggacgggagcagcaggaagtccaccaaagcaagggcacgcggacctgagggcatccctgttttctggagcacctggcctctgttgtctttctccaattcacacccagagtcagagcagtggcagatggaagagaagccacttcaacaactacttaagtacatggtccctgatggcaagtaattctgtaatcattctgtgtggtggctataccctcttttcaacaaggtctattgcttttcaggtagacgtttctgtttataaatggtctggagattcgggcagctttgggaaactgattgcagattagggggcagtaatgtgctgcagtcattgtgagtcctgtggctcttcagccctcttcccctcattttatctagcagttggctgctggcatctgtcggtcctgtgggacctcatgcttctcactctcagtgagatgccacatgaagtgacaggaggtgacccaagactggcccacaccccttggacctgcccagccatgctggactaactaattctcggccacagcttgccagtgctcggcaaagctctgcctgaaaccttgggcggtcccctatgtgccaggccctgactttgctcatccacagtgagggagggggacttttcggctattgcagggccccacagaccagctgggagccagagaccggcagctgctgccacacttcaaaggccttgttatcctcatctgaggagcagtgccccgagtcgcccctgagaatcctccctgccccactggcagcctcgcccttcatgtgtgtgctggggggcatcctgggacaccttgggggagccaggagggactgtaccacccttcctgggttcctggaccaaggaggggaccctctaccttagcttttggaaatgtgttcagctctgcccacccacacaggccactcagagatgccaaaaaagtcagctgtggcttgtttgtgggtgtggactccaaatgggggcagatccctccggctgagttgcagagggcttcgctgaggaggtgggcttctcatggtgagcaactggtgtccccagtgctaggaggccacaggagcgccttctgtgacactcttctcagagggtggcctggactgtcccaccatttgacagcatggagtgtggtcggaggggcctgagcccagagctgcgtgcgagagctccggagcccctgccctaagctcccagtacgtccttccccgttcgggcaatgtctccctggggctagaacctgctgaccctcctttcctggcttagcccaagcaaacccacacccagttccagaggggtgaagggaggccgggggctgtgggatctgtctcctggctctggtttgggagtgggctgagagcgtcctgtggaaggaaggagtcctgcggggacaaccagggccacctggtgatgctaggtagcaggtgctggcacagcaggatgagagggaggcctgagaaaggtcccctgagaggacaccccaggtgctcaagtcagactcaggcagcaaaagccagctgggcccctctaaaggcaaggaggagttggagccctggggacctgggggtgacctctgacttctgggaacagaagagatttggagagagatttatcagtattctccgccaaactaatctggccatggggttcccaggcaggacttgggagacacctggtgctggccaccaggtctgcccctcagtccacgccctcctctctcctccctcgcgcgttttgcctgtggtatcctaggaacgcagggcttcgagccttgtggtcctgttacataacagtttccatcccatccatgagttcagccctccggcaagcgggagctgcagcaggcgcaccaaggaaagcctctgcttcagacccaggctcctgctgcccaaatccacagtccctgccgctcctctgccacccccagcgtacagggggagggagcttcaaaagcagtcagcatccagccagattctttcaataggaccccctgtcctgtcctggtcccacatgagcacagcacctgtcagtggccacacactggccatggcttccccaaatccagcaggcctaggagagagtcccagagccggtgtgacacatgcctcctcgaacccctctccgcactctgcaccctgagaccaagggcgcaccactgctgagaccctccctggcttggagatgcctgtcctgccactgtgcctgtggctgccccctcgccccctcgagtacctgggcagccaatcaatgcaggtcacctgtgctcctacctgttctcttctctggccaaggcagagagtgctccagcagggacttgaggacctcaggcatgtccatggcaggggccactgagaaccagtcgcagctcacacagcccagcaggaggtgcttgctc

SEQ ID NO: 334017 - DNA, 121 bp, Homo sapiens
tcatgataagggaattcccaataaatacatcgtagaatcagaagattgattttaaacagtgcagacacttgatctgggtagctaaaggcaagaaaaatcccccgcctacccccgccaaaaa

SEQ ID NO: 334018 - DNA, 417 bp, Homo sapiens
tttgtctaacagaattgtaaaacaattactttgtgcgtgcatccaggagcccctcggcattgtgactattttaaattcaaactcaagagtggaatggaggcatgtaaatctctactaacaaatcctcggggatgaaatatttactttctcttctacttcagatctataaaaacagctgacttacaatgatttaatcagaataaatctagccctgatattagactcgtttgtatctatgacatggaattcttacctttggcctcccagagaacttaaaactatttcctgtgactaaatattcaattcaaattcacaaaatgaaaaaaaaaaaagttaaaatgagacgaacctgcacaaaagtagttgattcattcttcccaaaagagcacccattacaataaaaaataaataaataaa

SEQ ID NO: 334019 - DNA, 262 bp, Homo sapiens
agcgaaactccgtctcaaaaaaaaaaaatatatatatacatagtatagctacgtaacagtatatgtatatatttgtcaccacacatatacaacagcaaaagcactggagtctctgatttttagttcaactggcaagtttaatgtacaaagtaggtcataccattaattagcctgtgcttctaaaacattatagatttaggagaaaatgtaactgccaattttcaagcaaattacaaaattatttttccacatggattttttt

SEQ ID NO: 334020 - DNA, 463 bp, Homo sapiens
ggcttggcgacttccccctttcaatggcctagatgcagagagagatcagatacaattttgggatggggaaattttcagttcttccactgtagctggctccatttgtgtgctgtggaaatacaatattttataaagctgtgtgagaatttttgtttgcatttgggcctatatataataatagaattaattaaaactattttaaaagacccaggaaaggtctttaatactttaaagtattttccatctttttttttttctaccccacatgagaacttactaaaatcaacgctaagctttctttttggataaacaatgtaactccacttagtagatagtatgtccttttttcctttttctagtcacacctttataatgtgtatttattatttacaaaagtaaaccattaatattttagatataatgtatgtgttcattttgatagtcctgaattttgactttatta

SEQ ID NO: 334021 - DNA, 452 bp, Homo sapiens
ggcagacacagcctaaccaaggcacacatctgaagtcagtgcccagtatgattggcacagtcaaggttgcccgagagatatccttgaaaaatccctcagaagatcacatgggggatcaacataacatctcacagcaagtccaacagaacgatttcttcccctctagcactggaatggaattcttgtttctttgagttccaaattaggagtcagtttctttttctttttaaacactgaaactcacactcaacgcagtgagaggttcattagggagtggaacatgatggagacaggtgaaagccattctcagttggggcacagggagagcagcgccagctgcacaggcagctgaagccatccccgccaagcatggatggaggtcaccacactcctggaaacggcacgcccgcccacgggaaatgcagacaacagcaacaaggaaacaaaaaggc

SEQ ID NO: 334022 - DNA, 554 bp, Homo sapiens
tatcctaaacaagcaggcacaaagagaagcaggtatccccatgagagattttcagtttctgtaaacaaagtgactgcctgtctgaaaggaataatatcattgcttggggagcacattcccttcccatttgagcaagtaatcaatgctgaagtcttttttgagtacctactatgtgcttgatgccattctggtgctgagaaagggaatggataagtgaatgtggcaaacagaaaaaggacaaaatagcctctactattcagagtctagttgagaagtcagcgtaacagcgaaaaagtgagccagtgactggccacgctgctgggcacagaaacgggcagtcagtagggactgggctttttggaaggctgagaaagattctgctggactctgcagatccctggcaggatgaactgatagaacacttgccccccaggccgctgatgtgggatggcagaagatggctggacaggctcacttgagctgttaaatgcctgcggcccaacacgagctggggcctaggagtcacaccccagaatttcactgtcgtgtttcca

SEQ ID NO: 334023 - DNA, 273 bp, Homo sapiens
ttatccccaacacgccacatgtcatcaccatacttttctctgttgaatatgtttttctttcttctgccttaggatggtcgtctgcgaatgaatgaccagctgattgcagttaatggggaatctcttttgggaaagtccaaccacgaagctatggaaacacttaggcggtcaatgtccatggagggaaacatccgagggatgatccagttggtgattctgaggaggccagagagaccaatggaggatcctgcagagtgttgggcgataacatca

SEQ ID NO: 334024 - DNA, 341 bp, Homo sapiens
gaccagtggggagtagaacataaaagcagacataccttcatgcccagagaggtgaagcaacttgctataattcataaggatgatttgtagaagaacaggactttggccagatgccctgactcccagagtactggcctttctttctgcttttgacctccaaacaactctccttttcaccattgctaacatgtttagcgcatttccaattacgtagcactgctctagagtttatatcagtcattaaacacccacacctgcatgcagaactatggcaaagaagcacacttttgaaattccttattttaggcatgtcttgctggtagccttaattatgagagaaa

SEQ ID NO: 334025 - DNA, 251 bp, Homo sapiens
ccatctcccatataccatatagtgataggattatccctatttatactttattagaggcattaaaaattgctaaatgcaatagtcatttgttgagctagtcctgtgtgtaggttctctattaagcactttatgtataaggatttaatgagatgaatgcaacgtaggtaagttatttgttcaaagtaacaaagctttttaagtggcagatcttggattcatatccagttctgtggaacgcctacctttggtgg

SEQ ID NO: 334026 - DNA, 376 bp, Homo sapiens
tggagaactcaaggatatgactggagaccccagttcacctctttgtgtagatggtgcagaccccagcccaaggaggcctaaccagaggggtttccatggagccaacatctccagcggagatgcagaaagcaacagtccaaagaaagggtgttgcatatatgggaagagggcaagaaagtggctaatgcctttgctctcccatctctccagctgccaccaagctatgaggaagccataaggtcactgcctccaccaccggccagctgtggctctactcagtcatcccaggaagcagccacctgccctgctcaggggaacaccacagtgtaggagggagcaaccacctctgtcctgcccttcccctttctccaggaga

SEQ ID NO: 334027 - DNA, 533 bp, Homo sapiens
gaacagaaataggagaattactgacttaagtaaacattaagaaaagaatcaaaaggatcattttagaaaatggcagatgggaaagccagtttgcaaaacattaaggagtgactggctgccggggaattggtgaggttaaaaaccaacagcgcttttgtgagatcttagggtgaaactgagagagaaatggaaaagcagcatgacccatcttatttggttatcaattcaacactttcatgtacatgaagcaatttatttagccaaaacattaaataaatcatctgggggagctttataatttaaattatatctgcatttaacacattacggatgaaaaaaagtctgtgtttctttccaaatctgaatgagatatactgtccccttccagactttatactgaaggactaagaaaccagtctcatggtgggtgcccaaaatgacattacatgaagaggctgaagcatgtgaagtagtgagagaaacttgattcttcttggtatttctacatagccccccaaaagcctgcaacttca

SEQ ID NO: 334028 - DNA, 365 bp, Homo sapiens
agataatgttacaaactttttcatttcttacttttgaataatctttagagttcaaagtatgcatgcacgtgaaagttcttgaaacaacccttccttcgtgttggtgttattatcattaccactgtatatatggagaacctgaggttcagagaggtttagtggcttaccccaggtgtcagagagtgagccacatttgtgtgtgcctgttgggtttcacccactgggtaagccctgaaaatagggagacggataaaatgtggccactagcacaaatgcctcaatccttctcgaacctgagtctccctcttctataattttaagttctttttctgcttgttctgggaaggccgtggcaagccatgaac

SEQ ID NO: 334029 - DNA, 296 bp, Homo sapiens
gcccagatcaaatcccatctccccaaaagagccatcccagcatgaagtgacctctgcttctctgagcttctctaaacttttctaacaccattcatttgaatattaattacaacttcgtgacattttaaatgttgatatgtgctattctgtaaatcttaacacttttcatgtgattatttggcaaacaagcaaatggatggttccttatagctttattatatttgcaaactcctctagtgcaaggatcaaaccttatatttcctggcacccccagagtacttgaccaagtgccttcc

SEQ ID NO: 334030 - DNA, 285 bp, Homo sapiens
cggtctgacttgcggggatgagaagatgactatgaccgaagtaaattgagctgggtaaaaagtaaaaattgagatggataagatttcaccaaaagcagggaagggcattctgaacagagggaatgagacagacaaaagcactgtgataagacaatgtttagggaatcttcaaataatcatatgtggatggactacaaaatggagctttttaattaggaccatgacatgattaaatctgtgtcatagaatgttaactctagtgtcatttagaaatttgtactggaa

SEQ ID NO: 334031 - DNA, 196 bp, Homo sapiens
gcagcggtcccaagtgaggctcataagtgctccagcaggcagaggaagggtggtctggagcagcttggaggaggatctaagagtctctggattggtgaaatcataggtcctcctcaggcgaagccttcactttagagtgtctgattgggatggagaaggggaagtacgtgtattaagggaagttgtcaagatcagg

SEQ ID NO: 334032 - DNA, 376 bp, Homo sapiens
gcctcaacttggcttattctgccattaatacttgcaattgcattatgaaattcttttagtgtgtttttcacctctatcagatcagtttggtcatttcttataatgaccacttcatctatcagctcctgcatcattttattgtactccttagattaggtttcatctttctcctgaaccttgatgatcttcatttgtatctctattctgaattatatttctgtgatttcaccccagttggaggacccctgctgggaactagcgtggtcatttggaagaaagaagacaggctggcattttgggttgccaaagttcatgcactggttctttcttctctgtgtgggctgatgttctttaactgtggtgtaactcgagtaca

SEQ ID NO: 334033 - DNA, 773 bp, Homo sapiens
catgtgagtgtgtggtgcgtgtgggaatgtgtgcaagtgggcgcctgtgcgagtgtgtggtgcgcgtgtgggaatgtgtgcaagtgggcacctgcccatgggagtgtgtggtgcgcgtgtgggaatgtgtgcaagtgggagcctgcgcatgtgagtgtgaggacacctcgtgctcaggtgtcaccaaccccatttaaaaaggaaataactatgatgacaaccagtctctagtgtacgatctgatcgagataccacttcctcatctagcaagtgagcttggctcaggtcttttaaagcacaggtaggccctgaagaaattcagcttcagtcgaacctctgtgcctgcaggtgatgaagacttggggctcattccaatgccaagagcccatgagactcctcctgccagatacctgagtcagagctgagagagcggggcaagagaaccagaaaaattagagagagacaaccttttccctccaggagctcatgctccagccaggagctgaagcagtgggaacgtggcatttaggaacaaactcagaagacgggtgcatggctgttttgatgccccagcaggagcatgacagggctggacgtctatcccattacaaagtacagtgggtcggttcctctgggccaggagctggattctcttcccatctcagtgacagtttgatgtctgtgccctgcagagttgcagattatctgaagctcatggctgtgcctccaggctccctggctggcaggaatgagagcaccaagccaccagagca

SEQ ID NO: 334034 - DNA, 578 bp, Homo sapiens
gggaggcagtagagagaaatgaggtcagaagggaagtggaaaggtaggatcaccaggggtcacgaaggtgatcagatgtcctttggcctcccccccagtgatgggtgccagggagcttggagctgaagtgatgtggtctgacttcacatttttacaggggcactccagctgccaggctggaaatagactgtagggaatgtgcacagaagcggaggcttgggtaggtgtcttcagagtaactctggtaagaggtggtggggcaggcctggtcaaaggtggcaacttttgtgagagtcgagagacctttccacgggtattagagaggctggcgactctaaattttgttagtgatctgtgtcttaaagtcactttcctgaggaagcgtggggtgtgagcacatgaaaggacctactgaagatgcagcaaaatccactaccaggcagggactccaatacgcgtacacgcccagcatgcagagtgggcgctcaggagaaggtgaagaaggagagtttggaagtgacaatttagagcaaagatgacaactgttcaccaccaaggagctgaggtacatgagggag

SEQ ID NO: 334035 - DNA, 636 bp, Homo sapiens
tccgtctgcttcctaaagttcccctgcatgctcaggggggtctgtacggcttttacacccctgaaggacagggagacccccactttaccccatcatcttttttcctaagcatctgaggtcagaattgggggaggacagttgaatgagcatggcaaaagcgactggcccacaccgttaagcaaggcgcgtttcattttgagtggctagtggctactcatggctcaaccaaatttgtaatgacatcagtttaggcattggtctacagcctcattcctgacgctgtttattcagctttgggactccttgaaatagcagctgtacccacaggaccttttacctggtgttgcatggctcacagttcacaccatcatgatgacattccttcatgcttccgctcagaggagagggagtgacaacctagccagcagtgggctcagcctcactgcttacctcagcctgcagactgtcaccagcagctaggactgcttggggtccctgctcctcctgcttgcccaccacttgggtgagcacactcactgctattaatagatcccaggagtcttctcatatcccttaagccaatctgcatgggcccctcctctttcttttccagaaagccatctattagtcccctat

SEQ ID NO: 334036 - DNA, 2727 bp, Homo sapiens
agctggagaacttccggtgcgtttccgctgtaccggaacgtggggcgaggcgctgttcatcaaagaaaaagggttcttttggtcacccaccactggccccatggctgccgtgcagatggatcctgagctagccaagcgcctcttctttgaaggggccactgtggtcatcctgaacatgcccaagggaacagagtttgggattgactataactcctgggaggtcgggcccaagttccggggcgtgaagatgatccctccaggcatccacttcctccactacagctctgtggacaaggctaatccgaaggaagtaggccctcgtatgggtttcttccttagcctgcaccagcgggggctgacagtgctgcgctggagcacactcagggaagaggtagacctgtccccagccccagagtctgaggtggaggccatgagggccaacctccaggagctggaccagttcctggggccttacccatatgccaccctgaagaagtggatctcactcaccaacttcatcagcgaagccacagtggagaagctacagcccgagaatcgacagatctgtgccttttccgatgtgctacctgtgctctccatgaagcacaccaaggaccgcgtggggcagaatctaccccgctgtggcattgagtgcaaaagctaccaagagggcctggcccggctaccagagatgaagcccagagccgggacagagatccgcttctcagagctgcccacgcagatgttcccagagggtgccacgccagctgagataaccaagcacagcatggacctgagctatgccctggagactgtgctcaacaagcagttccccagcagcccccaggatgtgcttggtgaactccagtttgcttttgtgtgcttcctgctggggaatgtgtacgaggcatttgagcattggaagcggctcctgaacctcctgtgccggtcagaagcagccatgatgaagcaccacaccctctacatcaacctcatctccatcctgtaccaccagcttggtgagatccccgctgacttcttcgtagacattgtctcccaagacaacttcctcaccagcaccttacaggttttcttttcctctgcctgcagcattgccgtggatgccaccctgagaaagaaagctgaaaagttccaagctcacctgaccaagaagttccggtgggactttgctgcggaacctgaggactgtgccccggtggtggtggagctccctgagggcatcgagatgggctaactcggggagcgctctcagctgcgaggggccccttcccacagggctgcagtcctggcctctccatttacttcttcccatcctgggacctgccagggcagcaatctctccaggtcctgcaaagatggagccagaattccctttttcactgataaatatatttcttcattgccaaagaggctgtacccatcctgaaggcacatttgtgggttccccatcagccaggccttggtgctaacctggctgaatttcacacaggctcttacacacacacgctcctaggagacatctgcctacacggcaaccatatttcctctgaatgagaaggaattgaaccaaaagtccaagaaagaactgattgcttgttccataggagcttaggaaacaagaaaccctggattgcccagggggtctgagaagttggttggtgactttttttgcggttaaatgaagggtgatggggagatcagcccgaattgccgcctgcctcttgctaaataggagcagaggacttggcctgcagctccttgggagcccttgattgggaagagagtttcaagggaggcagctggattcaatctagcaggtggtcagcttcagctttctccatcgaaatcccattctcctgtccagaggcccagtgggtcatctcccaaggtgggtgtggaccctggcctcagaggccttgctggtgctgtcacctcccacctgttccattccgaggcctcacccagaagtgggaccctccccttcctcaccagagccaccgtgactgtttctgatgacctggagagtcaacaacaaccagaaaggtttctgcccagagcaggcttcttaaggcctttacgaagttttgtgccttccaagtgctgaagaagacctggtcagcctaaatcttcccagtcccgctgtggagctgtcagtcaccggagtaatgagctcctggttcctcgggagtccttcgtgctgtgtggcagggttcctctctagacaagtacacaggccctgccaccctgacatcaaactgttgtactatgatcacagtccctgtgccatccttttccaagactggggctcacaccatgtttttgaatgagaatccctgctggttgagacttttgcttccacttgtttccttggagatgtttttccaagagcataatgtacattaaagtcttcgagttgagacaaaaaaaaaaaaaaaaaaaaaaaaaaaaaaaaaaaaaaaaaaacccccgcgtttttgtttgttgttttctgttctgctcttcgttggggggtcccctctttttctgaccccgcctcgtcgggcggcactctcttttattgcaacgggtcttctcttcccccacaaagagaggggggcgtagcctcccaccggcgggagaggtgtttctcccacaccctcttatgtttcgcgccccccaagaccacggggggggctccccggggagcgacacttctggcccccccat

SEQ ID NO: 334037 - DNA, 2506 bp, Homo sapiens
agctggagaacttccggtgcgtttccgctgtaccggaacgtggggcgaggcgctgttcatcaaagaaaaagggttcttttggtcacccaccactggccccatggctgccgtgcagatggatcctgagctagccaagcgcctcttctttgaaggggccactgtggtcatcctgaacatgcccaagggaacagagtttgggattgactataactcctgggaggtcgggcccaagttccggggcgtgaagatgatccctccaggcatccacttcctccactacagctctgtggacaaggctaatccgaaggaagtaggccctcgtatgggtttcttccttagcctgcaccagcgggggctgacagtgctgcgctggagcacactcagggaagaggtagacctgtccccagccccagagtctgaggtggaggccatgagggccaacctccaggagctggaccagttcctggggccttacccatatgccaccctgaagaagtggatctcactcaccaacttcatcagcgaagccacagtggagaagctacagcccgagaatcgacagatctgtgccttttccgatgtgctacctgtgctctccatgaagcacaccaaggaccgcgtggggcagaatctaccccgctgtggcattgagtgcaaaagctaccaagagggcctggcccggctaccagagatgaagcccagagccgggacagagatccgcttctcagagctgcccacgcagatgttcccagagggtgccacgccagctgagataaccaagcacagcatggacctgagctatgccctggagactgtgctcaacaagcagttccccagcagcccccaggatgtgcttggtgaactccagtttgcttttgtgtgcttcctgctggggaatgtgtacgaggcatttgagcattggaagcggctcctgaacctcctgtgccggtcagaagcagccatgatgaagcaccacaccctctacatcaacctcatctccatcctgtaccaccagcttggtgagatccccgctgacttcttcgtagacattgtctcccaagacaacttcctcaccagcaccttacaggttttcttttcctctgcctgcagcattgccgtggatgccaccctgagaaagaaagctgaaaagttccaagctcacctgaccaagaagttccggtgggactttgctgcggaacctgaggactgtgccccggtggtggtggagctccctgagggcatcgagatgggctaactcggggagcgctctcagctgcgaggggccccttcccacagggctgcagtcctggcctctccatttacttcttcccatcctgggacctgccagggcagcaatctctccaggtcctgcaaagatggagccagaattccctttttcactgataaatatatttcttcattgccaaagaggctgtacccatcctgaaggcacatttgtgggttccccatcagccaggccttggtgctaacctggctgaatttcacacaggctcttacacacacacgctcctaggagacatctgcctacacggcaaccatatttcctctgaatgagaaggaattgaaccaaaagtccaagaaagaactgattgcttgttccataggagcttaggaaacaagaaaccctggattgcccagggggtctgagaagttggttggtgactttttttgcggttaaatgaagggtgatggggagatcagcccgaattgccgcctgcctcttgctaaataggagcagaggacttggcctgcagctccttgggagcccttgattgggaagagagtttcaagggaggcagctggattcaatctagcaggtggtcagcttcagctttctccatcgaaatcccattctcctgtccagaggcccagtgggtcatctcccaaggtgggtgtggaccctggcctcagaggccttgctggtgctgtcacctcccacctgttccattccgaggcctcacccagaagtgggaccctccccttcctcaccagagccaccgtgactgtttctgatgacctggagagtcaacaacaaccagaaaggtttctgcccagagcaggcttcttaaggcctttacgaagttttgtgccttccaagtgctgaagaagacctggtcagcctaaatcttcccagtcccgctgtggagctgtcagtcaccggagtaatgagctcctggttcctcgggagtccttcgtgctgtgtggcagggttcctctctagacaagtacacaggccctgccaccctgacatcaaactgttgtactatgatcacagtccctgtgccatccttttccaagactggggctcacaccatgtttttgaatgagaatccctgctggttgagacttttgccttcgggtacgtcgtctgcttaatttgatgtctatgagcaacccaatctttcctcggatgtcactgttaaattttggtccggagtaaggattgtatcttcactggttcctgtctctgtttccgtaaatcggg

SEQ ID NO: 334038 - DNA, 2380 bp, Homo sapiens
agctggagaacttccggtgcgtttccgctgtaccggaacgtggggcgaggcgctgttcatcaaagaaaaagggttcttttggtcacccaccactggccccatggctgccgtgcagatggatcctgagctagccaagcgcctcttctttgaaggggccactgtggtcatcctgaacatgcccaagggaacagagtttgggattgactataactcctgggaggtcgggcccaagttccggggcgtgaagatgatccctccaggcatccacttcctccactacagctctgtggacaaggctaatccgaaggaagtaggccctcgtatgggtttcttccttagcctgcaccagcgggggctgacagtgctgcgctggagcacactcagggaagaggtagacctgtccccagccccagagtctgaggtggaggccatgagggccaacctccaggagctggaccagttcctggggccttacccatatgccaccctgaagaagtggatctcactcaccaacttcatcagcgaagccacagtggagaagctacagcccgagaatcgacagatctgtgccttttccgatgtgctacctgtgctctccatgaagcacaccaaggaccgcgtggggcagaatctaccccgctgtggcattgagtgcaaaagctaccaagagggcctggcccggctaccagagatgaagcccagagccgggacagagatccgcttctcagagctgcccacgcagatgttcccagagggtgccacgccagctgagataaccaagcacagcatggacctgagctatgccctggagactgtgctcaacaagcagttccccagcagcccccaggatgtgcttggtgaactccagtttgcttttgtgtgcttcctgctggggaatgtgtacgaggcatttgagcattggaagcggctcctgaacctcctgtgccggtcagaagcagccatgatgaagcaccacaccctctacatcaacctcatctccatcctgtaccaccagcttggtgagatccccgctgacttcttcgtagacattgtctcccaagacaacttcctcaccagcaccttacaggttttcttttcctctgcctgcagcattgccgtggatgccaccctgagaactgaggactgtgccccggtggtggtggagctccctgagggcatcgagatgggctaactcggggagcgctctcagctgcgaggggccccttcccacagggctgcagtcctggcctctccatttacttcttcccatcctgggacctgccagggcagcaatctctccaggtcctgcaaagatggagccagaattccctttttcactgataaatatatttcttcattgccaaagaggctgtacccatcctgaaggcacatttgtgggttccccatcagccaggccttggtgctaacctggctgaatttcacacaggctcttacacacacacgctcctaggagacatctgcctacacggcaaccatatttcctctgaatgagaaggaattgaaccaaaagtccaagaaagaactgattgcttgttccataggagcttaggaaacaagaaaccctggattgcccagggggtctgagaagttggttggtgactttttttgcggttaaatgaagggtgatggggagatcagcccgaattgccgcctgcctcttgctaaataggagcagaggacttggcctgcagctccttgggagcccttgattgggaagagagtttcaagggaggcagctggattcaatctagcaggtggtcagcttcagctttctccatcgaaatcccattctcctgtccagaggcccagtgggtcatctcccaaggtgggtgtggaccctggcctcagaggccttgctggtgctgtcacctcccacctgttccattccgaggcctcacccagaagtgggaccctccccttcctcaccagagccaccgtgactgtttctgatgacctggagagtcaacaacaaccagaaaggtttctgcccagagcaggcttcttaaggcctttacgaagttttgtgccttccaagtgctgaagaagacctggtcagcctaaatcttcccagtcccgctgtggagctgtcagtcaccggagtaatgagctcctggttcctcgggagtccttcgtgctgtgtggcagggttcctctctagacaagtacacaggccctgccaccctgacatcaaactgttgtactatgatcacagtccctgtgccatccttttccaagactggggctcacaccatgtttttgaatgagaatccctgctggttgagacttttgcttccacttgtttccttggagatgtttttccaagagcataatgtacattaaagtcttcgagttgagacaa

SEQ ID NO: 334039 - DNA, 2286 bp, Homo sapiens
agctggagaacttccggtgcgtttccgctgtaccggaacgtggggcgaggcgctgttcatcaaagaaaaagggttcttttggtcacccaccactggccccatggctgccgtgcagatggatcctgagctagccaagcgcctcttctttgaaggggccactgtggtcatcctgaacatgcccaagggaacagagtttgggattgactataactcctgggaggtcgggcccaagttccggggcgtgaagatgatccctccaggcatccacttcctccactacagctctgtggacaaggctaatccgaaggaagtaggccctcgtatgggtttcttccttagcctgcaccagcgggggctgacagtgctgcgctggagcacactcagggaagaggtagacctgtccccagccccagagtctgaggtggaggccatgagggccaacctccaggagctggaccagttcctggggccttacccatatgccaccctgaagaagtggatctcactcaccaacttcatcagcgaagccacagtggagaagctacagcccgagaatcgacagatctgtgccttttccgatgtgctacctgtgctctccatgaagcacaccaaggaccgcgtggggcagaatctaccccgctgtggcattgagtgcaaaagctaccaagagggcctggcccggctaccagagatgaagcccagagccgggacagagatccgcttctcagagctgcccacgcagatgttcccagagggtgccacgccagctgagataaccaagcacagcatggacctgagctatgccctggagactgtgctcaacaagcagttccccagcagcccccaggatgtgcttggtgaactccagtttgcttttgtgtgcttcctgctggggaatgtgtacgaggcatttgagcattggaagcggctcctgaacctcctgtgccggtcagaagcagccatgatgaagcaccacaccagaaagctgaaaagttccaagctcacctgaccaagaagttccggtgggactttgctgcggaacctgaggactgtgccccggtggtggtggagctccctgagggcatcgagatgggctaactcggggagcgctctcagctgcgaggggccccttcccacagggctgcagtcctggcctctccatttacttcttcccatcctgggacctgccagggcagcaatctctccaggtcctgcaaagatggagccagaattccctttttcactgataaatatatttcttcattgccaaagaggctgtacccatcctgaaggcacatttgtgggttccccatcagccaggccttggtgctaacctggctgaatttcacacaggctcttacacacacacgctcctaggagacatctgcctacacggcaaccatatttcctctgaatgagaaggaattgaaccaaaagtccaagaaagaactgattgcttgttccataggagcttaggaaacaagaaaccctggattgcccagggggtctgagaagttggttggtgactttttttgcggttaaatgaagggtgatggggagatcagcccgaattgccgcctgcctcttgctaaataggagcagaggacttggcctgcagctccttgggagcccttgattgggaagagagtttcaagggaggcagctggattcaatctagcaggtggtcagcttcagctttctccatcgaaatcccattctcctgtccagaggcccagtgggtcatctcccaaggtgggtgtggaccctggcctcagaggccttgctggtgctgtcacctcccacctgttccattccgaggcctcacccagaagtgggaccctccccttcctcaccagagccaccgtgactgtttctgatgacctggagagtcaacaacaaccagaaaggtttctgcccagagcaggcttcttaaggcctttacgaagttttgtgccttccaagtgctgaagaagacctggtcagcctaaatcttcccagtcccgctgtggagctgtcagtcaccggagtaatgagctcctggttcctcgggagtccttcgtgctgtgtggcagggttcctctctagacaagtacacaggccctgccaccctgacatcaaactgttgtactatgatcacagtccctgtgccatccttttccaagactggggctcacaccatgtttttgaatgagaatccctgctggttgagacttttgcttccacttgtttccttggagatgtttttccaagagcataatgtacattaaagtcttcgagttgagacaa

SEQ ID NO: 334040 - DNA, 2807 bp, Homo sapiens
agctggagaacttccggtgcgtttccgctgtaccggaacgtggggcgaggcggtgagtgtggcctcctggcctctttttcctttcctgattccttgtgtatgtgtggctgggccgcccctcttctcggctcagagtcacggagtgccttgaactaggcccacctcgccggggcggctggttctctgtttgtgggacgctggtgtctctggaggcccttcctgagaagccgtcgccagagttacgtcgcggttttcttaactttagagcctgggggccggagaccctgattgcactcgacctggctctgccctactctctgcgtgacttccaggatacagcaggactcaagtctcgtggcgatgacagccttcaatcaaacatccaaaactgcagttgtgatcattgagacggaaagctgttcatcaaagaaaaagggttcttttggtcacccaccactggccccatggctgccgtgcagatggatcctgagctagccaagcgcctcttctttgaaggggccactgtggtcatcctgaacatgcccaagggaacagagtttgggattgactataactcctgggaggtcgggcccaagttccggggcgtgaagatgatccctccaggcatccacttcctccactacagctctgtggacaaggctaatccgaaggaagtaggccctcgtatgggtttcttccttagcctgcaccagcgggggctgacagtgctgcgctggagcacactcagggaagaggtagacctgtccccagccccagagtctgaggtggaggccatgagggccaacctccaggagctggaccagttcctggggccttacccatatgccaccctgaagaagtggatctcactcaccaacttcatcagcgaagccacagtggagaagctacagcccgagaatcgacagatctgtgccttttccgatgtgctacctgtgctctccatgaagcacaccaaggaccgcgtggggcagaatctaccccgctgtggcattgagtgcaaaagctaccaagagggcctggcccggctaccagagatgaagcccagagccgggacagagatccgcttctcagagctgcccacgcagatgttcccagagggtgccacgccagctgagataaccaagcacagcatggacctgagctatgccctggagactgtgctcaacaagcagttccccagcagcccccaggatgtgcttggtgaactccagtttgcttttgtgtgcttcctgctggggaatgtgtacgaggcatttgagcattggaagcggctcctgaacctcctgtgccggtcagaagcagccatgatgaagcaccacaccctctacatcaacctcatctccatcctgtaccaccagcttggtgagatccccgctgacttcttcgtagacattgtctcccaagacaacttcctcaccagcaccttacaggttttcttttcctctgcctgcagcattgccgtggatgccaccctgagaaagaaagctgaaaagttccaagctcacctgaccaagaagttccggtgggactttgctgcggaacctgaggactgtgccccggtggtggtggagctccctgagggcatcgagatgggctaactcggggagcgctctcagctgcgaggggccccttcccacagggctgcagtcctggcctctccatttacttcttcccatcctgggacctgccagggcagcaatctctccaggtcctgcaaagatggagccagaattccctttttcactgataaatatatttcttcattgccaaagaggctgtacccatcctgaaggcacatttgtgggttccccatcagccaggccttggtgctaacctggctgaatttcacacaggctcttacacacacacgctcctaggagacatctgcctacacggcaaccatatttcctctgaatgagaaggaattgaaccaaaagtccaagaaagaactgattgcttgttccataggagcttaggaaacaagaaaccctggattgcccagggggtctgagaagttggttggtgactttttttgcggttaaatgaagggtgatggggagatcagcccgaattgccgcctgcctcttgctaaataggagcagaggacttggcctgcagctccttgggagcccttgattgggaagagagtttcaagggaggcagctggattcaatctagcaggtggtcagcttcagctttctccatcgaaatcccattctcctgtccagaggcccagtgggtcatctcccaaggtgggtgtggaccctggcctcagaggccttgctggtgctgtcacctcccacctgttccattccgaggcctcacccagaagtgggaccctccccttcctcaccagagccaccgtgactgtttctgatgacctggagagtcaacaacaaccagaaaggtttctgcccagagcaggcttcttaaggcctttacgaagttttgtgccttccaagtgctgaagaagacctggtcagcctaaatcttcccagtcccgctgtggagctgtcagtcaccggagtaatgagctcctggttcctcgggagtccttcgtgctgtgtggcagggttcctctctagacaagtacacaggccctgccaccctgacatcaaactgttgtactatgatcacagtccctgtgccatccttttccaagactggggctcacaccatgtttttgaatgagaatccctgctggttgagacttttgcttccacttgtttccttggagatgtttttccaagagcataatgtacattaaagtcttcgagttgagacaa

SEQ ID NO: 334041 - DNA, 1716 bp, Homo sapiens
agggttacatggtatagtgcagtatttcctgaccctggagcagaccatccacattagaatcacctggggagcttgttagagctacagatacgaaggccccatcatctctcctccaccagaacctctgagggtgaactccagtttgcttttgtgtgcttcctgctggggaatgtgtacgaggcatttgagcattggaagcggctcctgaacctcctgtgccggtcagaagcagccatgatgaagcaccacaccctctacatcaacctcatctccatcctgtaccaccagcttggtgagatccccgctgacttcttcgtagacattgtctcccaagacaacttcctcaccagcaccttacaggttttcttttcctctgcctgcagcattgccgtggatgccaccctgagaaagaaagctgaaaagttccaagctcacctgaccaagaagttccggtgggactttgctgcggaacctgaggactgtgccccggtggtggtggagctccctgagggcatcgagatgggctaactcggggagcgctctcagctgcgaggggccccttcccacagggctgcagtcctggcctctccatttacttcttcccatcctgggacctgccagggcagcaatctctccaggtcctgcaaagatggagccagaattccctttttcactgataaatatatttcttcattgccaaagaggctgtacccatcctgaaggcacatttgtgggttccccatcagccaggccttggtgctaacctggctgaatttcacacaggctcttacacacacacgctcctaggagacatctgcctacacggcaaccatatttcctctgaatgagaaggaattgaaccaaaagtccaagaaagaactgattgcttgttccataggagcttaggaaacaagaaaccctggattgcccagggggtctgagaagttggttggtgactttttttgcggttaaatgaagggtgatggggagatcagcccgaattgccgcctgcctcttgctaaataggagcagaggacttggcctgcagctccttgggagcccttgattgggaagagagtttcaagggaggcagctggattcaatctagcaggtggtcagcttcagctttctccatcgaaatcccattctcctgtccagaggcccagtgggtcatctcccaaggtgggtgtggaccctggcctcagaggccttgctggtgctgtcacctcccacctgttccattccgaggcctcacccagaagtgggaccctccccttcctcaccagagccaccgtgactgtttctgatgacctggagagtcaacaacaaccagaaaggtttctgcccagagcaggcttcttaaggcctttacgaagttttgtgccttccaagtgctgaagaagacctggtcagcctaaatcttcccagtcccgctgtggagctgtcagtcaccggagtaatgagctcctggttcctcgggagtccttcgtgctgtgtggcagggttcctctctagacaagtacacaggccctgccaccctgacatcaaactgttgtactatgatcacagtccctgtgccatccttttccaagactggggctcacaccatgtttttgaatgagaatccctgctggttgagacttttgcttccacttgtttccttggagatgtttttccaagagcataatgtacattaaagtcttcgagttgagacaa

SEQ ID NO: 334042 - DNA, 1088 bp, Homo sapiens
agctggagaacttccggtgcgtttccgctgtaccggaacgtggggcgaggcgctgttcatcaaagaaaaagggttcttttggtcacccaccactggccccatggctgccgtgcagatggatcctgagctagccaagcgcctcttctttgaaggggccactgtggtcatcctgaacatgcccaagggaacagagtttgggattgactataactcctgggaggtcgggcccaagttccggggcgtgaagatgatccctccaggcatccacttcctccactacagctctgtggacaaggctaatccgaaggaagtaggccctcgtatgggtttcttccttagcctgcaccagcgggggctgacagtgctgcgctggagcacactcagggaagaggtagacctgtccccagccccagagtctgaggtggaggccatgagggccaacctccaggagctggaccagttcctggggccttacccatatgccaccctgaagaagtggatctcactcaccaacttcatcagcgaagccacagtggagaagctacagcccgagaatcgacagatctgtgccttttccgatgtgctacctgtgctctccatgaagcacaccaaggaccgcgtggggcagaatctaccccgctgtggcattgagtgcaaaagctaccaagagggcctggcccggctaccagagatgaagcccagagccgggacagagatccgcttctcagagctgcccacgcagatgttcccagagggtgccacgccagctgagataaccaagcacagcatggacctgagctatgccctggagactgtgctcaacaagcagttccccagcagcccccaggatgtgcttggtgagaaggaacaaggctctttgggagtgggccaaggggaggatattagcagaggtgttttggaatagggagtacatcttgtgttagtccagcagcaactaaacctggctaggaggctgaagatacaggtgtgtctttacccttagccctggagatttcgatttgagagatctggagtggggcttccgcagtttctatctgtctaataaacaaacatcctaggtgaacctg

SEQ ID NO: 334043 - DNA, 2443 bp, Homo sapiens
agctggagaacttccggtgcgtttccgctgtaccggaacgtggggcgaggcgctgttcatcaaagaaaaagggttcttttggtcacccaccactggccccatggctgccgtgcagatggatcctgagctagccaagcgcctcttctttgaaggggccactgtggtcatcctgaacatgcccaagggaacagagtttgggattgactataactcctgggaggtcgggcccaagttccggggcgtgaagatgatccctccaggcatccacttcctccactacagctctgtggacaaggctaatccgaaggaagtaggccctcgtatgggtttcttccttagcctgcaccagcgggggctgacagtgctgcgctggagcacactcagggaagaggtagacctgtccccagccccagagtctgaggtggaggccatgagggccaacctccaggagctggaccagttcctggggccttacccatatgccaccctgaagaagtggatctcactcaccaacttcatcagcgaagccacagtggagaagctacagcccgagaatcgacagatctgtgccttttccgatgtgctacctgtgctctccatgaagcacaccaaggaccgcgtggggcagaatctaccccgctgtggcattgagtgcaaaagctaccaagagggcctggcccggctaccagagatgaagcccagagccgggacagagatccgcttctcagagctgcccacgcagatgttcccagagggtgccacgccagctgagataaccaagcacagcatggacctgagctatgccctggagactgtgctcaacaagcagttccccagcagcccccaggatgtgcttggtgaactccagtttgcttttgtgtgcttcctgctggggaatgtgtacgaggcatttgagcattggaagcggctcctgaacctcctgtgccggtcagaagcagccatgatgaagcaccacaccctctacatcaacctcatctccatcctgtaccaccagcttggtgagatccccgctgacttcttcgtagacattgtctcccaagacaacttcctcaccagcaccttacaggttttcttttcctctgcctgcagcattgccgtggatgccaccctgagaaagaaagctgaaaagttccaagctcacctgaccaagaagttccggtgggactttgctgcggaacctgaggactgtgccccggtggtggtggagctccctgagggcatcgagatgggctaactcggggagcgctctcagctgcgaggggccccttcccacagggctgcagtcctggcctctccatttacttcttcccatcctgggacctgccagggcagcaatctctccaggtcctgcaaagatggagccagaattccctttttcactgataaatatatttcttcattgccaaagaggctgtacccatcctgaaggcacatttgtgggttccccatcagccaggccttggtgctaacctggctgaatttcacacaggctcttacacacacacgctcctaggagacatctgcctacacggcaaccatatttcctctgaatgagaaggaattgaaccaaaagtccaagaaagaactgattgcttgttccataggagcttaggaaacaagaaaccctggattgcccagggggtctgagaagttggttggtgactttttttgcggttaaatgaagggtgatggggagatcagcccgaattgccgcctgcctcttgctaaataggagcagaggacttggcctgcagctccttgggagcccttgattgggaagagagtttcaagggaggcagctggattcaatctagcaggtggtcagcttcagctttctccatcgaaatcccattctcctgtccagaggcccagtgggtcatctcccaaggtgggtgtggaccctggcctcagaggccttgctggtgctgtcacctcccacctgttccattccgaggcctcacccagaagtgggaccctccccttcctcaccagagccaccgtgactgtttctgatgacctggagagtcaacaacaaccagaaaggtttctgcccagagcaggcttcttaaggcctttacgaagttttgtgccttccaagtgctgaagaagacctggtcagcctaaatcttcccagtcccgctgtggagctgtcagtcaccggagtaatgagctcctggttcctcgggagtccttcgtgctgtgtggcagggttcctctctagacaagtacacaggccctgccaccctgacatcaaactgttgtactatgatcacagtccctgtgccatccttttccaagactggggctcacaccatgtttttgaatgagaatccctgctggttgagacttttgcttccacttgtttccttggagatgtttttccaagagcataatgtacattaaagtcttcgagttgagacaa

SEQ ID NO: 334044 - DNA, 2398 bp, Homo sapiens
agctggagaacttccggtgcgtttccgctgtaccggaacgtggggcgaggcgctgttcatcaaagaaaaagggttcttttggtcacccaccactggccccatggctgccgtgcagatggatcctgagctagccaagcgcctcttctttgaaggggccactgtggtcatcctgaacatgcccaagggaacagagtttgggattgactataactcctgggaggtcgggcccaagttccggggcgtgaagatgatccctccaggcatccacttcctccactacagctctgtggacaaggctaatccgaaggaagtaggccctcgtatgggtttcttccttagcctgcaccagcgggggctgacagtgctgcgctggagcacactcagggaagaggtagacctgtccccagccccagagtctgaggtggaggccatgagggccaacctccaggagctggaccagttcctggggccttacccatatgccaccctgaagaagtggatctcactcaccaacttcatcagcgaagccacagtggagaagctacagcccgagaatcgacagatctgtgccttttccgatgtgctacctgtgctctccatgaagcacaccaaggaccgcgtggggcagaatctaccccgctgtggcattgagtgcaaaagctaccaagagggcctggcccggctaccagagatgaagcccagagccgggacagagatccgcttctcagagctgcccacgcagatgttcccagagggtgccacgccagctgagataaccaagcacagcatggacctgagctatgccctggagactgtgctcaacaagcagttccccagcagcccccaggatgtgcttggtgaactccagtttgcttttgtgtgcttcctgctggggaatgtgtacgaggcatttgagcattggaagcggctcctgaacctcctgtgccggtcagaagcagccatgatgaagcaccacaccctctacatcaacctcatctccatcctgtaccaccagcttggtgagatccccgctgacttcttcgtagacattgtctcccaagacaacttcctcaccagcaccttacaggttttcttttcctctgcctgcagcattgccgtggatgccaccctgagaaagaaagctgaaaagttccaagctcacctgaccaagaagttccggtgggactttgctgcggaacctgaggactgtgccccggtggtggtggagctccctgagggcatcgagatgggctaactcggggagcgctctccatttacttcttcccatcctgggacctgccagggcagcaatctctccaggtcctgcaaagatggagccagaattccctttttcactgataaatatatttcttcattgccaaagaggctgtacccatcctgaaggcacatttgtgggttccccatcagccaggccttggtgctaacctggctgaatttcacacaggctcttacacacacacgctcctaggagacatctgcctacacggcaaccatatttcctctgaatgagaaggaattgaaccaaaagtccaagaaagaactgattgcttgttccataggagcttaggaaacaagaaaccctggattgcccagggggtctgagaagttggttggtgactttttttgcggttaaatgaagggtgatggggagatcagcccgaattgccgcctgcctcttgctaaataggagcagaggacttggcctgcagctccttgggagcccttgattgggaagagagtttcaagggaggcagctggattcaatctagcaggtggtcagcttcagctttctccatcgaaatcccattctcctgtccagaggcccagtgggtcatctcccaaggtgggtgtggaccctggcctcagaggccttgctggtgctgtcacctcccacctgttccattccgaggcctcacccagaagtgggaccctccccttcctcaccagagccaccgtgactgtttctgatgacctggagagtcaacaacaaccagaaaggtttctgcccagagcaggcttcttaaggcctttacgaagttttgtgccttccaagtgctgaagaagacctggtcagcctaaatcttcccagtcccgctgtggagctgtcagtcaccggagtaatgagctcctggttcctcgggagtccttcgtgctgtgtggcagggttcctctctagacaagtacacaggccctgccaccctgacatcaaactgttgtactatgatcacagtccctgtgccatccttttccaagactggggctcacaccatgtttttgaatgagaatccctgctggttgagacttttgcttccacttgtttccttggagatgtttttccaagagcataatgtacattaaagtcttcgagttgagacaa

SEQ ID NO: 334045 - DNA, 2722 bp, Homo sapiens
agctggagaacttccggtgcgtttccgctgtaccggaacgtggggcgaggcggtgagtgtggcctcctggcctctttttcctttcctgattccttgtgtatgtgtggctgggccgcccctcttctcggctcagagtcacggagtgccttgaactaggcccacctcgccggggcggctggttctctgtttgtgggacgctggtgtctctggaggcccttcctgagaagccgtcgccagagttacgtcgcggttttcttaactttagagcctgggggccggagaccctgattgcactcgacctggctctgccctactctctgcgtgacttccactgttcatcaaagaaaaagggttcttttggtcacccaccactggccccatggctgccgtgcagatggatcctgagctagccaagcgcctcttctttgaaggggccactgtggtcatcctgaacatgcccaagggaacagagtttgggattgactataactcctgggaggtcgggcccaagttccggggcgtgaagatgatccctccaggcatccacttcctccactacagctctgtggacaaggctaatccgaaggaagtaggccctcgtatgggtttcttccttagcctgcaccagcgggggctgacagtgctgcgctggagcacactcagggaagaggtagacctgtccccagccccagagtctgaggtggaggccatgagggccaacctccaggagctggaccagttcctggggccttacccatatgccaccctgaagaagtggatctcactcaccaacttcatcagcgaagccacagtggagaagctacagcccgagaatcgacagatctgtgccttttccgatgtgctacctgtgctctccatgaagcacaccaaggaccgcgtggggcagaatctaccccgctgtggcattgagtgcaaaagctaccaagagggcctggcccggctaccagagatgaagcccagagccgggacagagatccgcttctcagagctgcccacgcagatgttcccagagggtgccacgccagctgagataaccaagcacagcatggacctgagctatgccctggagactgtgctcaacaagcagttccccagcagcccccaggatgtgcttggtgaactccagtttgcttttgtgtgcttcctgctggggaatgtgtacgaggcatttgagcattggaagcggctcctgaacctcctgtgccggtcagaagcagccatgatgaagcaccacaccctctacatcaacctcatctccatcctgtaccaccagcttggtgagatccccgctgacttcttcgtagacattgtctcccaagacaacttcctcaccagcaccttacaggttttcttttcctctgcctgcagcattgccgtggatgccaccctgagaaagaaagctgaaaagttccaagctcacctgaccaagaagttccggtgggactttgctgcggaacctgaggactgtgccccggtggtggtggagctccctgagggcatcgagatgggctaactcggggagcgctctcagctgcgaggggccccttcccacagggctgcagtcctggcctctccatttacttcttcccatcctgggacctgccagggcagcaatctctccaggtcctgcaaagatggagccagaattccctttttcactgataaatatatttcttcattgccaaagaggctgtacccatcctgaaggcacatttgtgggttccccatcagccaggccttggtgctaacctggctgaatttcacacaggctcttacacacacacgctcctaggagacatctgcctacacggcaaccatatttcctctgaatgagaaggaattgaaccaaaagtccaagaaagaactgattgcttgttccataggagcttaggaaacaagaaaccctggattgcccagggggtctgagaagttggttggtgactttttttgcggttaaatgaagggtgatggggagatcagcccgaattgccgcctgcctcttgctaaataggagcagaggacttggcctgcagctccttgggagcccttgattgggaagagagtttcaagggaggcagctggattcaatctagcaggtggtcagcttcagctttctccatcgaaatcccattctcctgtccagaggcccagtgggtcatctcccaaggtgggtgtggaccctggcctcagaggccttgctggtgctgtcacctcccacctgttccattccgaggcctcacccagaagtgggaccctccccttcctcaccagagccaccgtgactgtttctgatgacctggagagtcaacaacaaccagaaaggtttctgcccagagcaggcttcttaaggcctttacgaagttttgtgccttccaagtgctgaagaagacctggtcagcctaaatcttcccagtcccgctgtggagctgtcagtcaccggagtaatgagctcctggttcctcgggagtccttcgtgctgtgtggcagggttcctctctagacaagtacacaggccctgccaccctgacatcaaactgttgtactatgatcacagtccctgtgccatccttttccaagactggggctcacaccatgtttttgaatgagaatccctgctggttgagacttttgcttccacttgtttccttggagatgtttttccaagagcataatgtacattaaagtcttcgagttgagacaa

SEQ ID NO: 334046 - DNA, 2878 bp, Homo sapiens
agctggagaacttccggtgcgtttccgctgtaccggaacgtggggcgaggcggtgagtgtggcctcctggcctctttttcctttcctgattccttgtgtatgtgtggctgggccgcccctcttctcggctcagagtcacggagtgccttgaactaggcccacctcgccggggcggctggttctctgtttgtgggacgctggtgtctctggaggcccttcctgagaagccgtcgccagagttacgtcgcggttttcttaactttagagcctgggggccggagaccctgattgcactcgacctggctctgccctactctctgcgtgacttccaggatacagcaggactcaagtctcgtggcgatgacagccttcaatcaaacatccaaaactgcagttgtgatcattgagacggaaaggtacaaggcaccccagattatatcacaggagacctgacctagccccagggcaaggaacctttactgaggagctgttcatcaaagaaaaagggttcttttggtcacccaccactggccccatggctgccgtgcagatggatcctgagctagccaagcgcctcttctttgaaggggccactgtggtcatcctgaacatgcccaagggaacagagtttgggattgactataactcctgggaggtcgggcccaagttccggggcgtgaagatgatccctccaggcatccacttcctccactacagctctgtggacaaggctaatccgaaggaagtaggccctcgtatgggtttcttccttagcctgcaccagcgggggctgacagtgctgcgctggagcacactcagggaagaggtagacctgtccccagccccagagtctgaggtggaggccatgagggccaacctccaggagctggaccagttcctggggccttacccatatgccaccctgaagaagtggatctcactcaccaacttcatcagcgaagccacagtggagaagctacagcccgagaatcgacagatctgtgccttttccgatgtgctacctgtgctctccatgaagcacaccaaggaccgcgtggggcagaatctaccccgctgtggcattgagtgcaaaagctaccaagagggcctggcccggctaccagagatgaagcccagagccgggacagagatccgcttctcagagctgcccacgcagatgttcccagagggtgccacgccagctgagataaccaagcacagcatggacctgagctatgccctggagactgtgctcaacaagcagttccccagcagcccccaggatgtgcttggtgaactccagtttgcttttgtgtgcttcctgctggggaatgtgtacgaggcatttgagcattggaagcggctcctgaacctcctgtgccggtcagaagcagccatgatgaagcaccacaccctctacatcaacctcatctccatcctgtaccaccagcttggtgagatccccgctgacttcttcgtagacattgtctcccaagacaacttcctcaccagcaccttacaggttttcttttcctctgcctgcagcattgccgtggatgccaccctgagaaagaaagctgaaaagttccaagctcacctgaccaagaagttccggtgggactttgctgcggaacctgaggactgtgccccggtggtggtggagctccctgagggcatcgagatgggctaactcggggagcgctctcagctgcgaggggccccttcccacagggctgcagtcctggcctctccatttacttcttcccatcctgggacctgccagggcagcaatctctccaggtcctgcaaagatggagccagaattccctttttcactgataaatatatttcttcattgccaaagaggctgtacccatcctgaaggcacatttgtgggttccccatcagccaggccttggtgctaacctggctgaatttcacacaggctcttacacacacacgctcctaggagacatctgcctacacggcaaccatatttcctctgaatgagaaggaattgaaccaaaagtccaagaaagaactgattgcttgttccataggagcttaggaaacaagaaaccctggattgcccagggggtctgagaagttggttggtgactttttttgcggttaaatgaagggtgatggggagatcagcccgaattgccgcctgcctcttgctaaataggagcagaggacttggcctgcagctccttgggagcccttgattgggaagagagtttcaagggaggcagctggattcaatctagcaggtggtcagcttcagctttctccatcgaaatcccattctcctgtccagaggcccagtgggtcatctcccaaggtgggtgtggaccctggcctcagaggccttgctggtgctgtcacctcccacctgttccattccgaggcctcacccagaagtgggaccctccccttcctcaccagagccaccgtgactgtttctgatgacctggagagtcaacaacaaccagaaaggtttctgcccagagcaggcttcttaaggcctttacgaagttttgtgccttccaagtgctgaagaagacctggtcagcctaaatcttcccagtcccgctgtggagctgtcagtcaccggagtaatgagctcctggttcctcgggagtccttcgtgctgtgtggcagggttcctctctagacaagtacacaggccctgccaccctgacatcaaactgttgtactatgatcacagtccctgtgccatccttttccaagactggggctcacaccatgtttttgaatgagaatccctgctggttgagacttttgcttccacttgtttccttggagatgtttttccaagagcataatgtacattaaagtcttcgagttgagacaa

SEQ ID NO: 334047 - DNA, 2389 bp, Homo sapiens
agctggagaacttccggtgcgtttccgctgtaccggaacgtggggcgaggcgctgttcatcaaagaaaaagggttcttttggtcacccaccactggccccatggctgccgtgcagatggatcctgagctagccaagcgcctcttctttgaaggggccactgtggtcatcctgaacatgcccaagggaacagagtttgggattgactataactcctgggaggtcgggcccaagttccggggcgtgaagatgatccctccaggcatccacttcctccactacagctctgtggacaaggctaatccgaaggaagtaggccctcgtatgggtttcttccttagcctgcaccagcgggggctgacagtgctgcgctggagcacactcagggaagaggtagacctgtccccagccccagagtctgaggtggaggccatgagggccaacctccaggagctggaccagttcctggggccttacccatatgccaccctgaagaagtggatctcactcaccaacttcatcagcgaagccacagtggagaagctacagcccgagaatcgacagatctgtgccttttccgatgtgctacctgtgctctccatgaagcacaccaaggaccgcgtggggcagaatctaccccgctgtggcattgagtgcaaaaagatccgcttctcagagctgcccacgcagatgttcccagagggtgccacgccagctgagataaccaagcacagcatggacctgagctatgccctggagactgtgctcaacaagcagttccccagcagcccccaggatgtgcttggtgaactccagtttgcttttgtgtgcttcctgctggggaatgtgtacgaggcatttgagcattggaagcggctcctgaacctcctgtgccggtcagaagcagccatgatgaagcaccacaccctctacatcaacctcatctccatcctgtaccaccagcttggtgagatccccgctgacttcttcgtagacattgtctcccaagacaacttcctcaccagcaccttacaggttttcttttcctctgcctgcagcattgccgtggatgccaccctgagaaagaaagctgaaaagttccaagctcacctgaccaagaagttccggtgggactttgctgcggaacctgaggactgtgccccggtggtggtggagctccctgagggcatcgagatgggctaactcggggagcgctctcagctgcgaggggccccttcccacagggctgcagtcctggcctctccatttacttcttcccatcctgggacctgccagggcagcaatctctccaggtcctgcaaagatggagccagaattccctttttcactgataaatatatttcttcattgccaaagaggctgtacccatcctgaaggcacatttgtgggttccccatcagccaggccttggtgctaacctggctgaatttcacacaggctcttacacacacacgctcctaggagacatctgcctacacggcaaccatatttcctctgaatgagaaggaattgaaccaaaagtccaagaaagaactgattgcttgttccataggagcttaggaaacaagaaaccctggattgcccagggggtctgagaagttggttggtgactttttttgcggttaaatgaagggtgatggggagatcagcccgaattgccgcctgcctcttgctaaataggagcagaggacttggcctgcagctccttgggagcccttgattgggaagagagtttcaagggaggcagctggattcaatctagcaggtggtcagcttcagctttctccatcgaaatcccattctcctgtccagaggcccagtgggtcatctcccaaggtgggtgtggaccctggcctcagaggccttgctggtgctgtcacctcccacctgttccattccgaggcctcacccagaagtgggaccctccccttcctcaccagagccaccgtgactgtttctgatgacctggagagtcaacaacaaccagaaaggtttctgcccagagcaggcttcttaaggcctttacgaagttttgtgccttccaagtgctgaagaagacctggtcagcctaaatcttcccagtcccgctgtggagctgtcagtcaccggagtaatgagctcctggttcctcgggagtccttcgtgctgtgtggcagggttcctctctagacaagtacacaggccctgccaccctgacatcaaactgttgtactatgatcacagtccctgtgccatccttttccaagactggggctcacaccatgtttttgaatgagaatccctgctggttgagacttttgcttccacttgtttccttggagatgtttttccaagagcataatgtacattaaagtcttcgagttgagacaa

SEQ ID NO: 334048 - DNA, 355 bp, Homo sapiens
atgcatggctctcttggaatccagaatttcaagagaattttccaagagccacggaatccaaaattcctagccaaagtgattactgttaaaaattaaccacaaagttttgtcaccaatgtgggcatctaacattttataggttaaaagtagcaccatatatcaaacttctaagctgctgaggtcttcttgatggggagggggaagaatacagcctttagtggaaaagaggctgtttccttggatagggtctctcaaactgcacttgctgctctgattccactcagatcatacttagcactcattcaatgaatattcattgaacccaggacctgattgagaggtggatcagttagac

SEQ ID NO: 334049 - DNA, 1869 bp, Homo sapiens
atgaacgactttgacgagtgcggccagagcgcagccagcatgtacctgccgggctgcgcctactatgtggccccgtctgacttcgctagcaagccttcgttcctttcccaaccgtcgtcctgccagatgactttcccctactcttccaacctggctccgcacgtccagcccgtgcgcgaagtggccttccgcgactacggcctggagcgcgccaagtggccgtaccgcggcggcggcggcggcggcagcgcggggggcggcagcagcgggggcggccccggcgggggcggcggcggcgcggggggctacgctccctactacgcggcggcggcggcggcggctgcggcggccgcggcggccgaggaggcggccatgcaacgcgagcttctcccgcccgcgggccgccggccggacgtgctcttcaaggcgcctgagccggtgtgcgctgcgccggggccgccgcacggccccgcgggcgccgcctccaacttctacagcgcggtgggccgcaatggcatcttgccacagggcttcgaccagttctacgaggcagcgcccgggcccccgttcgccgggccgcagcccccgccgccacccgcgccgccacagcccgagggcgcagccgacaagggcgaccccaggaccggggctggtggcggcgggggcagtccctgcaccaaggcgacccctggctcggagcccaagggggcagcagaaggcagcggtggcgacggcgagggccccccgggagaggcgggggccgagaagagcagcagcgcagttgccccccagcggtcccggaaaaagcgctgtccctataccaagtaccagatccgcgaactggaacgcgagtttttctttaacgtgtacataaacaaagagaaaagacttcaactctctcggatgctcaacctcactgaccggcaagtcaaaatctggttccagaatcgcaggatgaaagaaaagaaactgaacagagaccgtctgcagtatttcactggaaaccccttattttgagagctccaggaagcgccctcaccccagccccactcacccaccctccttcccaccagcctgctctccgcaggcccactgtccttgggtttaatgacgtctcttctctgtggaacttcacgattccttcccacggtcaactcgggacctcccagcgaccactgcagcctgcggacgaggccgggacttggccgagcggatcctaataaggggaaaatggtaaatgcaaacgtcccgttacaattttaccgccagtgtgctgtcgttccccctccccctctccgagtcctcgtggggacacggcggggtctgtaggaagttgggccgggttgggggttgctagaaggcgctggtgttttgctctgagttttaagagatcccttccttcctcttcggtgaatgcaggttatttaaactttgggaaatgtacttttagtctgtcatatcaaggcatgagtcactgtctttttttgtgtgaataaatggtttctagtaaaatggaggttacagcttcaatacactgtatgaattctcctctttgaggtttagtgcctccttaggatattttagtggccagaacccatgcaactgaaaatcgaatgaaatactttttagtcccactaaaatagtagtcgtaccctcccaccacctctaggttacactggttttaaaaatcatgttagtgatgaatttctgaattgacgatgtgaccaagcaatgctggcgctgccttctccaggcagtaaggctggggcagcaggaacctaagaagaaaactcccacccccaccactagtctagtgaacttgggatttctgaaaagacagcaaccatttttaaaaactggttagaaaat

SEQ ID NO: 334050 - DNA, 1144 bp, Homo sapiens
gaaggctctgtagggaaggaactggctctgggtgttttccctgcatttctcttctttcgtttcttaaaagagcataaataattaaagtttggcagggaggaaaagctttcttgcagaactgtagtggcaataaatgaaatgactcagaatcccttccccagtcagcttttacgagagctgccagacagtgtctgttcacgttctccagataccaggggcgccctgacaaagttaaggtcaagttagtgtcttatcttgggtgactcaaaatcaccgcatcgcgtcctggcgctgtgcggaaagctctttctcgcggagcggctggctgcgccccgaaggcctggtgcgctccctgcgtttcgggtggggccgcgcaggcaaggacaaggccacagagtcggggtcttcacgttgccccccagcggtcccggaaaaagcgctgtccctataccaagtaccagatccgcgaactggaacgcgagtttttctttaacgtgtacataaacaaagagaaaagacttcaactctctcggatgctcaacctcactgaccggcaagtcaaaatctggttccagaatcgcaggatgaaagaaaagaaactgaacagagaccgtctgcagtatttcactggaaaccccttattttgagagctccaggaagcgccctcaccccagccccactcacccaccctccttcccaccagcctgctctccgcaggcccactgtccttgggtttaatgacgtctcttctctgtggaacttcacgattccttcccacggtcaactcgggacctcccagcgaccactgcagcctgcggacgaggccgggacttggccgagcggatcctaataaggggaaaatggtaaatgcaaacgtcccgttacaattttaccgccagtgtgctgtcgttccccctccccctctccgagtcctcgtggggacacggcggggtctgtaggaagttgggccgggttgggggttgctagaaggcgctggtgttttgctctgagttttaagagatcccttccttcctcttcggtgaatgcaggttatttaaactttgggaaatgtacttttagtctgtcatatcaaggcatgagtcactgtctttttttgtgtgaataaatggtttctagtaaaatg

SEQ ID NO: 334051 - DNA, 1514 bp, Homo sapiens
atgaacgactttgacgagtgcggccagagcgcagccagcatgtacctgccgggctgcgcctactatgtggccccgtctgacttcgctagcaagccttcgttcctttcccaaccgtcgtcctgccagatgactttcccctactcttccaacctggctccgcacgtccagcccgtgcgcgaagtggccttccgcgactacggcctggagcgcgccaagtggccgtaccgcggcggcggcggcggcggcagcgcggggggcggcagcagcgggggcggccccggcgggggcggcggcggcgcggggggctacgctccctactacgcggcggcggcggcggcggctgcggcggccgcggcggccgaggaggcggccatgcaacgcgagcttctcccgcccgcgggccgccggccggacgtgctcttcaaggcgcctgagccggtgtgcgctgcgccggggccgccgcacggccccgcgggcgccgcctccaacttctacagcgcggtgggccgcaatggcatcttgccacagggcttcgaccagttctacgaggcagcgcccgggcccccgttcgccgggccgcagcccccgccgccacccgcgccgccacagcccgagggcgcagccgacaagggcgaccccaggaccggggctggtggcggcgggggcagtccctgcaccaaggcgacccctggctcggagcccaagggggcagcagaaggcagcggtggcgacggcgagggccccccgggagaggcgggggccgagaagagcagcagcgcagttgccccccagcggtcccggaaaaagcgctgtccctataccaagtaccagatccgcgaactggaacgcgagtttttctttaacgtgtacataaacaaagagaaaagacttcaactctctcggatgctcaacctcactgaccggcaagtcaaaatctggttccagaatcgcaggatgaaagaaaagaaactgaacagagaccgtctgcagtatttcactggaaaccccttattttgagagctccaggaagcgccctcaccccagccccactcacccaccctccttcccaccagcctgctctccgcaggcccactgtccttgggtttaatgacgtctcttctctgtggaacttcacgattccttcccacggtcaactcgggacctcccagcgaccactgcagcctgcggacgaggccgggacttggccgagcggatcctaataaggggaaaatggtaaatgcaaacgtcccgttacaattttaccgccagtgtgctgtcgttccccctccccctctccgagtcctcgtggggacacggcggggtctgtaggaagttgggccgggttgggggttgctagaaggcgctggtgttttgctctgagttttaagagatcccttccttcctcttcggtgaatgcaggttatttaaactttgggaaatgtacttttagtctgtcatatcaaggcatgagtcactgtctttttttgtgtgaataaatggtttctagtaaaatg

SEQ ID NO: 334052 - DNA, 1427 bp, Homo sapiens
atgaacgactttgacgagtgcggccagagcgcagccagcatgtacctgccgggctgcgcctactatgtggccccgtctgacttcgctagcaagccttcgttcctttcccaaccgtcgtcctgccagatgactttcccctactcttccaacctggctccgcacgtccagcccgtgcgcgaagtggccttccgcgactacggcctggagcgcgccaagtggccgtaccgcggcggcggcggcggcggcagcgcggggggcggcagcagcgggggcggccccggcgggggcggcggcggcgcggggggctacgctccctactacgcggcggcggcggcggcggctgcggcggccgcggcggccgaggaggcggccatgcaacgcgagcttctcccgcccgcgggccgccggccggacgtgctcttcaaggcgcctgagccggtgtgcgctgcgccggggccgccgcacggccccgcgggcgccgcctccaacttctacagcgcggtgggccgcaatggcatcttgccacagggcttcgaccagttctacgaggcagcgcccgggcccccgttcggcgggggcagtccctgcaccaaggcgacccctggctcggagcccaagggggcagcagaaggcagcggtggcgacggcgagggccccccgggagaggcgggggccgagaagagcagcagcgcagttgccccccagcggtcccggaaaaagcgctgtccctataccaagtaccagatccgcgaactggaacgcgagtttttctttaacgtgtacataaacaaagagaaaagacttcaactctctcggatgctcaacctcactgaccggcaagtcaaaatctggttccagaatcgcaggatgaaagaaaagaaactgaacagagaccgtctgcagtatttcactggaaaccccttattttgagagctccaggaagcgccctcaccccagccccactcacccaccctccttcccaccagcctgctctccgcaggcccactgtccttgggtttaatgacgtctcttctctgtggaacttcacgattccttcccacggtcaactcgggacctcccagcgaccactgcagcctgcggacgaggccgggacttggccgagcggatcctaataaggggaaaatggtaaatgcaaacgtcccgttacaattttaccgccagtgtgctgtcgttccccctccccctctccgagtcctcgtggggacacggcggggtctgtaggaagttgggccgggttgggggttgctagaaggcgctggtgttttgctctgagttttaagagatcccttccttcctcttcggtgaatgcaggttatttaaactttgggaaatgtacttttagtctgtcatatcaaggcatgagtcactgtctttttttgtgtgaataaatggtttctagtaaaatg

SEQ ID NO: 334053 - DNA, 181 bp, Homo sapiens
ggcctttggacaagtaacaatctgtcatgtatcaatttcctcatctataaaatgagtttttctgagataataactgtacttgttccacctctgagattagggaaattgaagaagatacataagcgttagaaagggatcaaagtaatcagttttattgctggtaaaactggtttgggtctga

SEQ ID NO: 334054 - DNA, 193 bp, Homo sapiens
tgcttaaagcactatgctatataattgttagcaagtatttattattgttaatctgctggcttctggtacagcatcctaaagaaaggctaaagtttctgactctcatcaagaggcctgggggaaagaggttgtaattaggtgtgccaaggccagtgtctggactaggatgatggtagtgggcaaagaaaacagg

SEQ ID NO: 334055 - DNA, 167 bp, Homo sapiens
agttaagtggcccaggctctgtgtagggggtgaggttaacgcaggaagaaagatggtgaggggcaagggtgcaaggattatgttggaatgaggctccccaagtttccctggccctggctggttgtgctgctggcctgaacatctgatgagcttgcaagggtgactcc

SEQ ID NO: 334056 - DNA, 225 bp, Homo sapiens
agacggggttttccatattagccaggctggtctcaaactcctgacctcaggtgatctgcccgcctaggcttccgaaagtgttgggattacaggcgtgaaccaccacacccagcttccagtacatcttttaaacgccttgttaacagttattattgagtttctctgtactcacttgttctgattcttccctctaatgtcaaggctaagagtatgcaataaatctag

SEQ ID NO: 334057 - DNA, 222 bp, Homo sapiens
agggcaccacaccaagttgaagcaagcattccacaatgtttagcgccacgtcacagatacgagagctgatgtcatgattaaggacaagataaacagccttcagaactacctgaggaaaacaagataaacacagcatgattaagttacctgcactccctcttcctaaagagatctgattattctgtttaacccatttccttaggctagtctatgaaattgggt

SEQ ID NO: 334058 - DNA, 211 bp, Homo sapiens
ctcctgctctcaggggcctttcctatatcacaccctagccactaaggtcatgttcacccatttgccatcaaaggtaacattcgtgggtttcagggagtagaacatggatatgtcttattgggggccaccattcagtccctgaaaggggtctttcaaacagaccaaagcacatgaagaggggaaaagacagccacgccaaaggccacagaca

SEQ ID NO: 334059 - DNA, 525 bp, Homo sapiens
ctgctccccagcaagacacacacatacttaatagcccctcacttcccacagatgggggaatatgaaaatattccaaaaggcccctgtggtaacttctgagcagtcacatttgtcccattacaagagtgtttttaagaaaactagggggggaggagtgcaaattcctaccaacccacattgattcgcccttgcaaagaagtttctgctccttcaacccactgcgtagtggtttctgcctacaacagtaaggtgacaaccctgactagacttccaatggcgactccaggaccaaaactcgtgtgagaaaagatccaggcaagcttctgttgttctgaaatgctagcagaggcaggaaggagtcaacaggcgaggaggctgccttctgcccagcttctcagagttagataagtcatattcctgaaaatctaatttaaatgattcccagatttttcttcacaatctatcacgcaagtccctcaactgtctttcggggagcaagtccctcaactgtctttgctggggatg

SEQ ID NO: 334060 - DNA, 946 bp, Homo sapiens
agccagccaaatgtgtttcagatcctaaatcctccacctaaggggagttgctgagtcagcccagaccggaaggagtggcagagatcatttgccccaagaacggcagcgagcgagtaaatgttgccttggtttacccacccacgccgactgtgatcagcccctgttccaagtatcttcatactttcttggaaaattaagtggaaaagatagtgcttcttttccttatgccatcatttttactgtacccaaactgtgactttaggagcaccaatttttaagggaagaatgttggtgaaaagcacagaaaccagtgacgtttgtggctgtggaatttccatggagaaaagagagcatctgaacacctggaccatcttttgcacctggcagaccctctgcactcaccccagcgtgttctgtgaacttgagtgacaacgcgtgcttgcagggtgctttttggatgactggggaagaggtggggagggggtggtggggggaagcatggacgagaacatggagcaaatgttttacaacctgaacctcagaactgtgatcctccaaggagcgcgctacttgaagaaaagaaaaaaaaaaaaaaaagtcgaatggcttctcagggattttgttttccgtgcacatataagccatagttacagtacaggtggcagtatttagagcactcagatttcagttctgttaaatgtgaaagagggatcgactgacgttcattgctgttccataactagtgtaaaatatgtatatgtttatctttatttttataatatgcaaatacatttaaatttatacagtttgaagcttctagcgttagttcacactgggtgcaatattctgcatgagaactgtgccaagatggggctgatttcttattttagtataagacttttttgttttttctttattctttaatcctcttcacattaaaaaaaaa

SEQ ID NO: 334061 - DNA, 838 bp, Homo sapiens
ccacagttaatcagtgatttcctcagatgtccacatgctcctacggggagttgctgagtcagcccagaccggaaggagtggcagagatcatttgccccaagaacggcagcgagcgagtaaatgttgccttggtttacccacccacgccgactgtgatcagcccctgttccaagaagaatgttggtgaaaagcacagaaaccagtgacgtttgtggctgtggaatttccatggagaaaagagagcatctgaacacctggaccatcttttgcacctggcagaccctctgcactcaccccagcgtgttctgtgaacttgagtgacaacgcgtgcttgcagggtgctttttggatgactggggaagaggtggggagggggtggtggggggaagcatggacgagaacatggagcaaatgttttacaacctgaacctcagaactgtgatcctccaaggagcgcgctacttgaagaaaagaaaaaaaaaaaaaaaagtcgaatggcttctcagggattttgttttccgtgcacatataagccatagttacagtacaggtggcagtatttagagcactcagatttcagttctgttaaatgtgaaagagggatcgactgacgttcattgctgttccataactagtgtaaaatatgtatatgtttatctttatttttataatatgcaaatacatttaaatttatacagtttgaagcttctagcgttagttcacactgggtgcaatattctgcatgagaactgtgccaagatggggctgatttcttattttagtataagacttttttgttttttctttattctttaatcctcttcacattaaaaaaaaa

SEQ ID NO: 334062 - DNA, 823 bp, Homo sapiens
aggcattaatttcactgactccagaacctgcagttcagagaatgatttcttatgatgataaaaatcgaatgggatcagacgatgtttgcatttttttaatacttgaataggacacctcaagtttgagatttcattttcttttagaacacagtcacaagaagaatgttggtgaaaagcacagaaaccagtgacgtttgtggctgtggaatttccatggagaaaagagagcatctgaacacctggaccatcttttgcacctggcagaccctctgcactcaccccagcgtgttctgtgaacttgagtgacaacgcgtgcttgcagggtgctttttggatgactggggaagaggtggggagggggtggtggggggaagcatggacgagaacatggagcaaatgttttacaacctgaacctcagaactgtgatcctccaaggagcgcgctacttgaagaaaagaaaaaaaaaaaaaaaagtcgaatggcttctcagggattttgttttccgtgcacatataagccatagttacagtacaggtggcagtatttagagcactcagatttcagttctgttaaatgtgaaagagggatcgactgacgttcattgctgttccataactagtgtaaaatatgtatatgtttatctttatttttataatatgcaaatacatttaaatttatacagtttgaagcttctagcgttagttcacactgggtgcaatattctgcatgagaactgtgccaagatggggctgatttcttattttagtataagacttttttgttttttctttattctttaatcctcttcacattaaaaaaaaa

SEQ ID NO: 334063 - DNA, 3409 bp, Homo sapiens
  misc_feature (3354)..(3354): n is a, c, g, or t
cggccgccggccgccgagcgcgggagggcaggcaggggcaggagccggagggcccggggcgcggcgcggcatgtagctgcgggctcccgcgtccgcgtgaggctgtcggcccggggccccgccatggctgggatggacagtggcaacctgaagaccgcgaggctgtggcgggacgccgccctgcgtgccaggaagctgcggagcaacctgcgccagctcacgcttaccgccgccggggcctgccccggggccggggccgacgcgctcgagtcccccgcctccccccagctcgtgctgccggccaacctcggggacattgaggcactgaacctggggaacaacggcctggaggaggtacccgaggggctggggtcggcgctgggcagcctgcgcgtcctggtcctgcgcaggaaccgcttcgcccggctgcccccggcggtggccgagctcggccaccacctcaccgagctggacgtgagccacaaccggctgaccgccctgggcgcggaggtggtgagtgctctgagggagctgcggaagctcaacctcagccacaaccagctgcccgccctgcccgcccagctgggcgctctcgctcacctggaggagctggatgtcagctttaaccggctggcgcacctgcctgactccctctcctgcctctcccgcctgcgcaccctggacgtggatcacaaccagctcactgccttcccccggcagctgctgcagctggtggccctggaggagctggacgtgtccagcaaccggctgcggggcctgcctgaggatatcagtgccctgcgtgccctcaagatcctctggctgagtggggccgagcttggcacgctgcccgccggcttctgcgagctggccagtttggagagcctcatgctagacaacaacgggctgcaggctctgcccgcccagttcagctgcctgcagcggctcaaaatgctcaacctgtcctccaacctcttcgaggagttccctgccgcgctgctgcccctggctggtctggaggagctctaccttagtcgcaaccagctcacctcggtgccatcccttatctcgggcctgggccggcttctcaccttgtggctggataataaccgcatccgctacctgccggactccatcgtggagctgaccggcctggaggagctcgtgctgcaggggaaccagatcgcggtgctgcccgaccactttggccagctctcccgggtgggtttgtggaagatcaaagacaacccactgatccagcccccctacgaggtctgcatgaaggggatcccctacatcgcagcctaccagaaggaactggctcattcccagccggcggtgcagccccggctcaagctgctcctgatggggcataaggctgcaggaaagactttgctgcgccactgcctcaccgaggagagagtggagggatgcccaggaggaggggacaaggagaagtgctacccaccgtcacctccccctgtgagcaagggcatcgaggtgaccagctggacggccgatgcctcccggggcctgcggttcatcgtgtatgacttagctggggatgaaagttatgaggtgatccagcccttcttcctgtccccaggggccctatacgtgctggtggtcaacttggccacctatgagcctcgccactttcctaccaccgtgggctccttcttgcatcgggtcggggcgagagtgccccacgcggtggtgtgcatcgtgggcacccacgcagacctgtgcggagagcgtgagctggaggagaaatgtctggacattcaccgccagatcgccctgcaggagaagcacgacgcggagggactgagccgcttggccaaggtggtggacgaggcactggcccgggacttcgagctgcgctctgccagcccccacgcagcctactatggcgtttcggacaagaaccttcgacggcgcaaggcccattttcaatacctgctcaaccaccggctgcagatcctctcccccgtgttgcctgttagctgcagggacccgcgccacttacgacgccttcgggacaagttgctgtcagttgctgagcaccgagagatcttccccaacttacacagagtactgcctcgatcctggcaggtgctggaggaactgcatttccagccacctcaggcccagcgactgtggctaagctggtgggactcggcgcgcttgggcctgcaggcgggtctgaccgaggaccgactgcagagtgccctctcctacctgcatgagagcggcaagctactctactttgaggacagtccggctctcaaggagcacgtcttccacaacctcacccgcctcatcgacatcctcaatgtcttcttccagagggatccctctttgctgctgcataagctgctcctagggaccagtggagagggcaaggcggagggggaaagctccccgcccatggcgcggtccacccccagccaggaactgctccgggccacccagctccatcagtatgtggagggctttctgttgcatgggctcttgccagctcatgtcattcggttgctgcttaagcctcatgtccaggcccagcaggacttgcagctgttgctggagctgctggagaagatgggactctgttactgcctcaataaacccaagggcaagcctttgaatgggtccacagcttggtacaagttcccatgctatgtgcagaacgaggtgccccatgcagaagcctggattaatgggaccaacctagctgggcagtcttttgtggctgagcagttgcagattgaatatagctttccttttacttttccacctgggttgtttgcacgctacagtgtccagatcaacagccatgtggtgcacaggtcggatggtaaatttcagatctttgcctatagagggaaagttcctgtggttgtgagttacagacctgccaggggagtcctgcagccagacaccctgtccattgctagccatgcatcattaccaaatatatggaccgcatggcaagccataacccccttggtggaggaactgaatgtcctacttcaggaatggcctggactgcactacaccgtgcacattctctgttctaagtgccttaagagaggatcgcccaatccacatgcttttccaggggagttgctgagtcagcccagaccggaaggagtggcagagatcatttgccccaagaacggcagcgagcgagtaaatgttgccttggtttacccacccacgccgactgtgatcagcccctgttccaatacccgattacaagaagaatcagggtacagagacgagcatgcagtcacatttgtgcctggtgcatccttatggagcaaagagggtatcaagaggcagcagtccagntaggagacactagtaccgcagagctgaggagcgtggggtcttggcgctcaaggat

SEQ ID NO: 334064 - DNA, 3914 bp, Homo sapiens
cggccgccggccgccgagcgcgggagggcaggcaggggcaggagccggagggcccggggcgcggcgcggcatgtagctgcgggctcccgcgtccgcgtgaggctgtcggcccggggccccgccatggctgggatggacagtggcaacctgaagaccgcgaggctgtggcgggacgccgccctgcgtgccaggaagctgcggagcaacctgcgccagctcacgcttaccgccgccggggcctgccccggggccggggccgacgcgctcgagtcccccgcctccccccagctcgtgctgccggccaacctcggggacattgaggcactgaacctggggaacaacggcctggaggaggtacccgaggggctggggtcggcgctgggcagcctgcgcgtcctggtcctgcgcaggaaccgcttcgcccggctgcccccggcggtggccgagctcggccaccacctcaccgagctggacgtgagccacaaccggctgaccgccctgggcgcggaggtggtgagtgctctgagggagctgcggaagctcaacctcagccacaaccagctgcccgccctgcccgcccagctgggcgctctcgctcacctggaggagctggatgtcagctttaaccggctggcgcacctgcctgactccctctcctgcctctcccgcctgcgcaccctggacgtggatcacaaccagctcactgccttcccccggcagctgctgcagctggtggccctggaggagctggacgtgtccagcaaccggctgcggggcctgcctgaggatatcagtgccctgcgtgccctcaagatcctctggctgagtggggccgagcttggcacgctgcccgccggcttctgcgagctggccagtttggagagcctcatgctagacaacaacgggctgcaggctctgcccgcccagttcagctgcctgcagcggctcaaaatgctcaacctgtcctccaacctcttcgaggagttccctgccgcgctgctgcccctggctggtctggaggagctctaccttagtcgcaaccagctcacctcggtgccatcccttatctcgggcctgggccggcttctcaccttgtggctggataataaccgcatccgctacctgccggactccatcgtggagctgaccggcctggaggagctcgtgctgcaggggaaccagatcgcggtgctgcccgaccactttggccagctctcccgggtgggtttgtggaagatcaaagacaacccactgatccagcccccctacgaggtctgcatgaaggggatcccctacatcgcagcctaccagaaggaactggctcattcccagccggcggtgcagccccggctcaagctgctcctgatggggcataaggctgcaggaaagactttgctgcgccactgcctcaccgaggagagagtggagggatgcccaggaggaggggacaaggagaagtgctacccaccgtcacctccccctgtgagcaagggcatcgaggtgaccagctggacggccgatgcctcccggggcctgcggttcatcgtgtatgacttagctggggatgaaagttatgaggtgatccagcccttcttcctgtccccaggggccctatacgtgctggtggtcaacttggccacctatgagcctcgccactttcctaccaccgtgggctccttcttgcatcgggtcggggcgagagtgccccacgcggtggtgtgcatcgtgggcacccacgcagacctgtgcggagagcgtgagctggaggagaaatgtctggacattcaccgccagatcgccctgcaggagaagcacgacgcggagggactgagccgcttggccaaggtggtggacgaggcactggcccgggacttcgagctgcgctctgccagcccccacgcagcctactatggcgtttcggacaagaaccttcgacggcgcaaggcccattttcaatacctgctcaaccaccggctgcagatcctctcccccgtgttgcctgttagctgcagggacccgcgccacttacgacgccttcgggacaagttgctgtcagttgctgagcaccgagagatcttccccaacttacacagagtactgcctcgatcctggcaggtgctggaggaactgcatttccagccacctcaggcccagcgactgtggctaagctggtgggactcggcgcgcttgggcctgcaggcgggtctgaccgaggaccgactgcagagtgccctctcctacctgcatgagagcggcaagctactctactttgaggacagtccggctctcaaggagcacgtcttccacaacctcacccgcctcatcgacatcctcaatgtcttcttccagagggatccctctttgctgctgcataagctgctcctagggaccagtggagagggcaaggcggagggggaaagctccccgcccatggcgcggtccacccccagccaggaactgctccgggccacccagctccatcagtatgtggagggctttctgttgcatgggctcttgccagctcatgtcattcggttgctgcttaagcctcatgtccaggcccagcaggacttgcagctgttgctggagctgctggagaagatgggactctgttactgcctcaataaacccaagggcaagcctttgaatgggtccacagcttggtacaagttcccatgctatgtgcagaacgaggtgccccatgcagaagcctggattaatgggaccaacctagctgggcagtcttttgtggctgagcagttgcagattgaatatagctttccttttacttttccacctgggttgtttgcacgctacagtgtccagatcaacagccatgtggtgcacaggtcggatggtaaatttcagatctttgcctatagagggaaagttcctgtggttgtgagttacagacctgccaggggagtcctgcagccagacaccctgtccattgctagccatgcatcattaccaaatatatggaccgcatggcaagccataacccccttggtggaggaactgaatgtcctacttcaggaatggcctggactgcactacaccgtgcacattctctgttctaagtgccttaagagaggatcgcccaatccacatgcttttccaggggagttgctgagtcagcccagaccggaaggagtggcagagatcatttgccccaagaacggcagcgagcgagtaaatgttgccttggtttacccacccacgccgactgtgatcagcccctgttccaagaagaatgttggtgaaaagcacagaaaccagtgacgtttgtggctgtggaatttccatggagaaaagagagcatctgaacacctggaccatcttttgcacctggcagaccctctgcactcaccccagcgtgttctgtgaacttgagtgacaacgcgtgcttgcagggtgctttttggatgactggggaagaggtggggagggggtggtggggggaagcatggacgagaacatggagcaaatgttttacaacctgaacctcagaactgtgatcctccaaggagcgcgctacttgaagaaaagaaaaaaaaaaaaaaaagtcgaatggcttctcagggattttgttttccgtgcacatataagccatagttacagtacaggtggcagtatttagagcactcagatttcagttctgttaaatgtgaaagagggatcgactgacgttcattgctgttccataactagtgtaaaatatgtatatgtttatctttatttttataatatgcaaatacatttaaatttatacagtttgaagcttctagcgttagttcacactgggtgcaatattctgcatgagaactgtgccaagatggggctgatttcttattttagtataagacttttttgttttttctttattctttaatcctcttcacattaaaaaaaaa

SEQ ID NO: 334065 - DNA, 4025 bp, Homo sapiens
cggccgccggccgccgagcgcgggagggcaggcaggggcaggagccggagggcccggggcgcggcgcggcatgtagctgcgggctcccgcgtccgcgtgaggctgtcggcccggggccccgccatggctgggatggacagtggcaacctgaagaccgcgaggctgtggcgggacgccgccctgcgtgccaggaagctgcggagcaacctgcgccagctcacgcttaccgccgccggggcctgccccggggccggggccgacgcgctcgagtcccccgcctccccccagctcgtgctgccggccaacctcggggacattgaggcactgaacctggggaacaacggcctggaggaggtacccgaggggctggggtcggcgctgggcagcctgcgcgtcctggtcctgcgcaggaaccgcttcgcccggctgcccccggcggtggccgagctcggccaccacctcaccgagctggacgtgagccacaaccggctgaccgccctgggcgcggaggtggtgagtgctctgagggagctgcggaagctcaacctcagccacaaccagctgcccgccctgcccgcccagctgggcgctctcgctcacctggaggagctggatgtcagctttaaccggctggcgcacctgcctgactccctctcctgcctctcccgcctgcgcaccctggacgtggatcacaaccagctcactgccttcccccggcagctgctgcagctggtggccctggaggagctggacgtgtccagcaaccggctgcggggcctgcctgaggatatcagtgccctgcgtgccctcaagatcctctggctgagtggggccgagcttggcacgctgcccgccggcttctgcgagctggccagtttggagagcctcatgctagacaacaacgggctgcaggctctgcccgcccagttcagctgcctgcagcggctcaaaatgctcaacctgtcctccaacctcttcgaggagttccctgccgcgctgctgcccctggctggtctggaggagctctaccttagtcgcaaccagctcacctcggtgccatcccttatctcgggcctgggccggcttctcaccttgtggctggataataaccgcatccgctacctgccggactccatcgtggagctgaccggcctggaggagctcgtgctgcaggggaaccagatcgcggtgctgcccgaccactttggccagctctcccgggtgggtttgtggaagatcaaagacaacccactgatccagcccccctacgaggtctgcatgaaggggatcccctacatcgcagcctaccagaaggaactggctcattcccagccggcggtgcagccccggctcaagctgctcctgatggggcataaggctgcaggaaagactttgctgcgccactgcctcaccgaggagagagtggagggatgcccaggaggaggggacaaggagaagtgctacccaccgtcacctccccctgtgagcaagggcatcgaggtgaccagctggacggccgatgcctcccggggcctgcggttcatcgtgtatgacttagctggggatgaaagttatgaggtgatccagcccttcttcctgtccccaggggccctatacgtgctggtggtcaacttggccacctatgagcctcgccactttcctaccaccgtgggctccttcttgcatcgggtcggggcgagagtgccccacgcggtggtgtgcatcgtgggcacccacgcagacctgtgcggagagcgtgagctggaggagaaatgtctggacattcaccgccagatcgccctgcaggagaagcacgacgcggagggactgagccgcttggccaaggtggtggacgaggcactggcccgggacttcgagctgcgctctgccagcccccacgcagcctactatggcgtttcggacaagaaccttcgacggcgcaaggcccattttcaatacctgctcaaccaccggctgcagatcctctcccccgtgttgcctgttagctgcagggacccgcgccacttacgacgccttcgggacaagttgctgtcagttgctgagcaccgagagatcttccccaacttacacagagtactgcctcgatcctggcaggtgctggaggaactgcatttccagccacctcaggcccagcgactgtggctaagctggtgggactcggcgcgcttgggcctgcaggcgggtctgaccgaggaccgactgcagagtgccctctcctacctgcatgagagcggcaagctactctactttgaggacagtccggctctcaaggagcacgtcttccacaacctcacccgcctcatcgacatcctcaatgtcttcttccagagggatccctctttgctgctgcataagctgctcctagggaccagtggagagggcaaggcggagggggaaagctccccgcccatggcgcggtccacccccagccaggaactgctccgggccacccagctccatcagtatgtggagggctttctgttgcatgggctcttgccagctcatgtcattcggttgctgcttaagcctcatgtccaggcccagcaggacttgcagctgttgctggagctgctggagaagatgggactctgttactgcctcaataaacccaagggcaagcctttgaatgggtccacagcttggtacaagttcccatgctatgtgcagaacgaggtgccccatgcagaagcctggattaatgggaccaacctagctgggcagtcttttgtggctgagcagttgcagattgaatatagctttccttttacttttccacctgggttgtttgcacgctacagtgtccagatcaacagccatgtggtgcacaggtcggatggtaaatttcagatctttgcctatagagggaaagttcctgtggttgtgagttacagacctgccaggggagtcctgcagccagacaccctgtccattgctagccatgcatcattaccaaatatatggaccgcatggcaagccataacccccttggtggaggaactgaatgtcctacttcaggaatggcctggactgcactacaccgtgcacattctctgttctaagtgccttaagagaggatcgcccaatccacatgcttttccaggggagttgctgagtcagcccagaccggaaggagtggcagagatcatttgccccaagaacggcagcgagcgagtaaatgttgccttggtttacccacccacgccgactgtgatcagcccctgttccaagtatcttcatactttcttggaaaattaagtggaaaagatagtgcttcttttccttatgccatcatttttactgtacccaaactgtgactttaggagcaccaatttttaagggaagaatgttggtgaaaagcacagaaaccagtgacgtttgtggctgtggaatttccatggagaaaagagagcatctgaacacctggaccatcttttgcacctggcagaccctctgcactcaccccagcgtgttctgtgaacttgagtgacaacgcgtgcttgcagggtgctttttggatgactggggaagaggtggggagggggtggtggggggaagcatggacgagaacatggagcaaatgttttacaacctgaacctcagaactgtgatcctccaaggagcgcgctacttgaagaaaagaaaaaaaaaaaaaaaagtcgaatggcttctcagggattttgttttccgtgcacatataagccatagttacagtacaggtggcagtatttagagcactcagatttcagttctgttaaatgtgaaagagggatcgactgacgttcattgctgttccataactagtgtaaaatatgtatatgtttatctttatttttataatatgcaaatacatttaaatttatacagtttgaagcttctagcgttagttcacactgggtgcaatattctgcatgagaactgtgccaagatggggctgatttcttattttagtataagacttttttgttttttctttattctttaatcctcttcacattaaaaaaaaa

SEQ ID NO: 334066 - DNA, 270 bp, Homo sapiens
aaacatatgcacctgtgtggccaccaccacaatgtcaaaatacacatttccattcttccagaaagttcactgatacccctttccagtcagtccccctctctttttttggcaatcactgttctgatttcttagatttgcctgttatagaatgtcatgtaaatggaatcacacagtttatgttcttttgtctggcttcttttgctcaacataaactttttgagattcttcatgttgctgtttttatcagcaatttgttccttttattgctgt

SEQ ID NO: 334067 - DNA, 447 bp, Homo sapiens
gcaatgagctgtgattatgtcactgcacttcagcctgagtgacagaatgagaccttatctcaaaaaaaaggggtggggggaatagtaattgagagaattagtgatctgaacgatgactcagaagaggctctagaataaaacatgaaaaagacaatacaggagagtgttaagagacataatatagttaaaaggtctattgtgtcttattaaagtctcaaagaagagggacattggggtataaactgtatttaaagatattggctgagaattttccaaaagtgataaaatcagactttagaattaagaagcctaatgaataccaagtaggattgagaaaaagaaacctacccttaggcatgtcatagtgaaactctagaaataaagacaaagtctcaaaagcaaccgggagaaaacatttcagcttcaaaggagcaaaaatatctgacc

SEQ ID NO: 334068 - DNA, 297 bp, Homo sapiens
aaaagagcagctctaaagagggaccagtaaaaaaaagtattctcagtatttgtgagcagggaagtacttgcagcaaatgttgtctaggctggcatctgccaggaaatcataccccaaaaatgctaggaaacaaaactgtgcccaaggcagcaatctgaggtatgtgtatgtggatttatgcaaagttgaaattgattagggggagtttttaatcctcaccagagaggaaaaagaatttggagactcagttgcctaatgcagggtcctgtcatctttccagacagtgtgcctgagacg

SEQ ID NO: 334069 - DNA, 508 bp, Homo sapiens
ggcttttactcagacaggaaggcagcgtgagacctacacaactcaggcaccatcgtctgcagcaacccatactaagagttttggtgggccagggtctacgcaagcacttccccagagggccttggaagcctccctgggagccatatttcccacggttgggtcactcagaaataaaatcaaatgtggccaggtgcagtggctcacgcctataatcccagcactttgggaggccaagacggacggatcacgaggtcaagagatagagaccatcctggccaacacggtgaaaccccatctctactaaaaatacaaaaattagccgggcgtggtggcgtgcacctgtagtcccaactactcaggaggctgaggcagaagaatcgcttgaacccaggaggcggaggttgcagtaagcagagatcgaaccactgcactccagcctggcaacagagcgagactccatctcaaaaaaaaagggacaaatgtgactcttcctggaacagctagtact

SEQ ID NO: 334070 - DNA, 323 bp, Homo sapiens
gcctgcctcatgaattctgtctctttcactaatgtgtgtgctgaatgagatggtaataataacagctaataattattgagtatgtgtagtatgataagctctatgctaagtatttaatcccaactgtattgttatactcattttacagatgagaaaactgagtatttgccccatgttgtacagttagtaagtggtgaagtcaggacttgaatctaggaagactctctgactctagagcctacacgtgcatgcttatcctctctaccacctgaaatcactgacacgcagcgaccctgccccagagtgactgtactgcaaagaag

SEQ ID NO: 334071 - DNA, 5511 bp, Homo sapiens
tttttttacactttaaatgtgtggtttattgtatgccagttataacgcaatatagctgttaaacacaaacacaataaagttgaaaaaccagcaggcattccctgattaatcagtattctggggaggtaaggggctcacaggaacgcaaaagaaattcaggctgtaaatccagttggacgccccgctgccccatcccctccatccgggaccgcccgactcctctcccacctccttccccaggcctcccccaggcctccagtccggaagatgcgacgaggttagcggggcccgaccactccttggcttcccaggggtgagcctcgcgagttaggagttgggtagagagtcagcccggggcccggcatccgctttttcgttgaagcaacgactttggccggatgactccccagggtcggcatcagcgtgggactgggaacaggtgaagggaaacagaagagagcctgagaagaccgctctcctccgatcctaattgactgagccaatgagagccaaagaggtcacatgctcaactgggcggggagcgggtttccacctgcggcatctttcgcgagcggggagatgagtggggcggaatatgggagaaagggagggcccgccacgctctggctggacacggccttaatcggcccgttcactcgacgtttttggttctacgttgaccccgagaaaccgaaaccgcagggcctagggcgggtggaacgagagggaactacatttcccagcaggctgcggaaacgggactgcggccactacttccggcgtgtaccgagagactggcgtccggcgtgtaccgagagactggcgtccggtgtgcaggtggccacatggatcctggcagccggtggcggaacctgcccagcgggcctagcctaaagcacttgactgacccctcttatggaatcccgcgggaacagcaaaaggcagcgttgcaggagctgacgcgggcgcacgtggagtccttcaactacgctgtgcacgagggtctcggcctcgcggtgcaggctatacctccctttgaatttgctttcaaagatgagcgtatctcttttactattctggatgctgttatcagtccacctacagttccaaaagggaccatctgcaaagaggccaatgtttatccagcagaatgccggggccgaaggagtacctaccgtgggaagttgacagctgatatcaactgggcagtgaatggaatctcaaaaggaatcattaagcagtttcttggctatgttcccatcatggtgaaatccaagctttgcaacttacgtaaccttcccccacaagccctcattgagcaccatgaggaggcagaggaaatggggggctattttataatcaatggcattgaaaaagtcatccgaatgttgattatgcctcggagaaattttcccattgcaatgataagaccaaaatggaaaaccagagggcctggttatactcagtatggagtttcaatgcactgtgtgagggaagaacattccgctgtcaatatgaacctccactacttggaaaatggcacagttatgttgaactttatttaccgaaaagaactgttctttcttcctttgggatttgcacttaaggcacttgtcagcttttctgattatcagatctttcaggagctcatcaaaggaaaagaggatgattctttccttaggaactctgtttctcagatgttaaggattgtaatggaagagggttgtttgacacaaaaacaggtccttaactacctaggtgaatgcttcagagtaaaactcaatgttcctgactggtacccaaatgagcaagctgcggagttcctgtttaaccagtgcatctgtatccacttgaaatccaatactgaaaagttttatatgctttgtctcatgacgcgaaagctctttgctttagccaaaggagagtgcatggaggacaatcctgatagtttggtgaaccaggaagtcctcacaccgggtcagctcttccttatgttcctgaaggaaaaactggaaggttggttagtgtctattaaaatagcttttgataagaaggctcagaagaccagtgtttccatgaacactgacaatttgatgaggatttttacaatgggcatagaccttacaaaaccatttgaatacctttttgctactgggaatctgcgttctaaaacaggtcttggcctcctacaagattctggactttgtgttgtggctgacaagctgaacttcatacgctacctctcccatttccgctgcgtgcacagaggggctgattttgccaagatgaggaccaccacagtacgcaggctgctgccagagtcctggggcttcctttgtcccgtgcataccccagacggggagccctgtggcctgatgaaccacctaactgccgtatgtgaggttgtcacacagtttgtgtatacggcatctattccagctttactgtgcaacttgggggtcactcccattgatggagctccccaccgatcatacagtgagtgctaccctgtcctgctggacggtgtcatggttggctgggtggataaggatcttgctccaggcatcgcagattctcttcgtcattttaaggtgttgagagagaaaagaattcctccctggatggaagtggtccttatacccatgacaggaaaaccaagtctgtacccaggattgttcctttttaccactccttgtagactggtacggcctgtgcagaacttagcattgggcaaagaagagctaattggaactatggaacagatcttcatgaatgtcgctatctttgaggatgaagtttttgctggagttaccacacaccaggaactctttccacacagcctgctgagtgtgattgccaacttcatccctttctctgatcacaaccagagtccacggaacatgtaccaatgccagatgggtaagcaaactatgggctttccacttctcacttatcaagaccgatcggataacaaactgtatcgtcttcagactcctcagagtcccttggtgagaccctccatgtatgattattatgacatggataactatccaattgggaccaatgccatcgttgctgtgatttcttacactggctatgatatggaagatgccatgattgtgaataaggcctcttgggaacgaggctttgcccatggaagtgtctacaagtctgagttcatagacctctctgaaaaaattaaacaaggagatagtagcctggtgtttggcatcaaacctggtgacccacgcgttctgcagaagttagatgacgatggattgccgtttataggagcaaaactgcagtacggagatccgtattacagctacctcaacctcaacaccggggaaagttttgtgatgtactataatgaaactggatgttgtttaacttgatgttgaccttttggattaagaggactatcagattaaagcaaaatgtaattttaattcaatgaagatatcattaccaggttactcttgagatttttcaacggtgttagaactctcaaccaagacctgaaaaccaagtatgcaaggtttctgaatctctctggtagattaactattgacaatgattttctgttatctttgttcaaaaagttcatgtcttctcaaaatatgaaatattgataaatggaagagcatacggtgacaagtctcctttccaaccccaggttccctacaccctgctctcagcaggcagtgagtgtcacacacctgttaatccatcttgagcaggacagtactatacaaatagaatgcaagctgtaatgtaattttatattttcttatagccacgttgaagtaaaaacaaacaggtacagtgttttttaccagctttatagaagtacagttgttacatatttaatgaatacaatttgatgggtctgactatatgcacacacctttgataccatcaccacaatcagggtaataaacatacctgtcatctccacaagtttcctcctgcccctttgttttttgctttttggttgctgttgagtttttgttttgtcttctgtggtaagaacacttaactcaagacctaccctcttaacaaatctttaagtgcacgatatagtattgttaattccaggcaccatgttgtacaacagatctttagaccttacttgtcttgcataactgaagctttatacctgttgaacaactctccatttccctggcccctagcaaccacccttctaccctgtttctatgagtttgactattacagatatctcatatagtgggatcatgcaatatttgtcctgtgactggcttatttcacttagcatagtgaaataagattcatccattttggaagccaggcatggtgctgtgcatctatagtccctgctatttgagaggctgaggtgggaggatcatttgagtgcaggagttcaaggacagcctgggtaatataggaagaccctgtcttgaagaccctgacctcaagtgatccacccacctcggcctccgaaagtgctaggattacaggtgtgagccactgtgcctggcctccggtgagtattttatatttagtctacacttccatacttggcttttttctgcttttatattgatctgctttcatagcagtgtgtagagtgccacttatgttttctttcttgtgtacagtattttattgtatggatttaccatcccctgtgtatttaagttgttccattctttggccattataacttttttctgcaaatattctggtgacttatctttggccattataaactgttgataatagatcatcttgtatatacttctgcaattataagatgttttttgatgaaagctttcctaaggtaattctttcctgagtttggttcagatggtctgtcactaattataaggcagataggaacagacagaaaaatctatcatttcaagataggcttagcaggatgggcgcagtggctcacgccactaatcccaacattttaggaggcctaggcaggagcaatcacttgtgcctgggagttctagactagcctgggcgagacttcatctctacaaaaaaagcaacaacgacaaaaaaaattagccaagcatagtggcacacccctgtagtcccagctacttgggaggctgaggtgggaggattgcttgaacccaagaggtcgaggctgcagtgagccaagattgtgccactgcactccagcctgggtgacagagcaggaccctgtctctattttataaattaaaaaaggctgggtgtggtggctcacacccataatcccaacactttggctcagcagattgcttgaacccaggaattcaagtccaatctgggcaacatggggaaaccccagctctacaaaaaaaattagcctggtgtggtggcacatgcctgtagttccagctactcaggaggctgaggtgggagaatctcctgagcctggaaggtccaggcagtgagccaagattgtgccaccacactccagcctgggcgacagaatgagaccctgtctcaaaaaaaaaaaaaaaaaaaaag

SEQ ID NO: 334072 - DNA, 5625 bp, Homo sapiens
tttttttacactttaaatgtgtggtttattgtatgccagttataacgcaatatagctgttaaacacaaacacaataaagttgaaaaaccagcaggcattccctgattaatcagtattctggggaggtaaggggctcacaggaacgcaaaagaaattcaggctgtaaatccagttggacgccccgctgccccatcccctccatccgggaccgcccgactcctctcccacctccttccccaggcctcccccaggcctccagtccggaagatgcgacgaggttagcggggcccgaccactccttggcttcccaggggtgagcctcgcgagttaggagttgggtagagagtcagcccggggcccggcatccgctttttcgttgaagcaacgactttggccggatgactccccagggtcggcatcagcgtgggactgggaacaggtgaagggaaacagaagagagcctgagaagaccgctctcctccgatcctaattgactgagccaatgagagccaaagaggtcacatgctcaactgggcggggagcgggtttccacctgcggcatctttcgcgagcggggagatgagtggggcggaatatgggagaaagggagggcccgccacgctctggctggacacggccttaatcggcccgttcactcgacgtttttggttctacgttgaccccgagaaaccgaaaccgcagggcctagggcgggtggaacgagagggaactacatttcccagcaggctgcggaaacgggactgcggccactacttccggcgtgtaccgagagactggcgtccggcgtgtaccgagagactggcgtccggtgtgcaggtggccacatggatcctggcagccggtggcggaacctgcccagcgggcctagcctaaagcacttgactgacccctcttatggaatcccgcgggaacagcaaaaggcagcgttgcaggagctgacgcgggcgcacgtggagtccttcaactacgctgtgcacgagggtctcggcctcgcggtgcaggctatacctccctttgaatttgctttcaaagatgagcgtatctcttttactattctggatgctgttatcagtccacctacagttccaaaagggaccatctgcaaagaggccaatgtttatccagcagaatgccggggccgaaggagtacctaccgtgggaagttgacagctgatatcaactgggcagtgaatggaatctcaaaaggaatcattaagcagtttcttggctatgttcccatcatggtgaaatccaagctttgcaacttacgtaaccttcccccacaagccctcattgagcaccatgaggaggcagaggaaatggggggctattttataatcaatggcattgaaaaagtcatccgaatgttgattatgcctcggagaaattttcccattgcaatgataagaccaaaatggaaaaccagagggcctggttatactcagtatggagtttcaatgcactgtgtgagggaagaacattccgctgtcaatatgaacctccactacttggaaaatggcacagttatgttgaactttatttaccgaaaagaactgttctttcttcctttgggatttgcacttaaggcacttgtcagcttttctgattatcagatctttcaggagctcatcaaaggaaaagaggatgattctttccttaggaactctgtttctcagatgttaaggattgtaatggaagagggttgtttgacacaaaaacaggtccttaactacctaggtgaatgcttcagagtaaaactcaatgttcctgactggtacccaaatgagcaagctgcggagttcctgtttaaccagtgcatctgtatccacttgaaatccaatactgaaaagttttatatgctttgtctcatgacgcgaaagctctttgctttagccaaaggagagtgcatggaggacaatcctgatagtttggtgaaccaggaagtcctcacaccgggtcagctcttccttatgttcctgaaggaaaaactggaaggttggttagtgtctattaaaatagcttttgataagaaggctcagaagaccagtgtttccatgaacactgacaatttgatgaggatttttacaatgggcatagaccttacaaaaccatttgaatacctttttgctactgggaatctgcgttctaaaacaggtcttggcctcctacaagattctggactttgtgttgtggctgacaagctgaacttcatacgctacctctcccatttccgctgcgtgcacagaggggctgattttgccaagatgaggaccaccacagtacgcaggctgctgccagagtcctggggcttcctttgtcccgtgcataccccagacggggagccctgtggcctgatgaaccacctaactgccgtatgtgaggttgtcacacagtttgtgtatacggcatctattccagctttactgtgcaacttgggggtcactcccattgatggagctccccaccgatcatacagtgagtgctaccctgtcctgctggacggtgtcatggttggctgggtggataaggatcttgctccaggcatcgcagattctcttcgtcattttaaggtgttgagagagaaaagaattcctccctggatggaagtggtccttatacccatgacaggaaaaccaagtctgtacccaggattgttcctttttaccactccttgtagactggtacggcctgtgcagaacttagcattgggcaaagaagagctaattggaactatggaacagatcttcatgaatgtcgctatctttgaggatgaagtttttgctggagttaccacacaccaggaactctttccacacagcctgctgagtgtgattgccaacttcatccctttctctgatcacaaccagagtccacggaacatgtaccaatgccagatgggtaagcaaactatgggctttccacttctcacttatcaagaccgatcggataacaaactgtatcgtcttcagactcctcagagtcccttggtgagaccctccatgtatgattattatgacatggataactatccaattgggaccaatgccatcgttgctgtgatttcttacactggctatgatatggaagatgccatgattgtgaataaggcctcttgggaacgaggctttgcccatggaagtgtctacaagtctgagttcatagacctctctgaaaaaattaaacaaggagatagtagcctggtgtttggcatcaaacctggtgacccacgcgttctgcagaagttagatgacgatggattgccgtttataggagcaaaactgcagtacggagatccgtattacagctacctcaacctcaacaccggggaaagttttgtgatgtactataagagtaaagaaaattgtgttgtggataacatcaaagtgtgcagtaatgacactgggagtggaaaattcaagtgtgtttgcatcactatgagagtgcctcggaacccaactatcggagataaatttgccagtcgccatgggcagaagggcattttaagcagattgtggccggctgaggacatgccttttactgagagtgggatggtcccagacattctgttcaatccccatggttttccatcccgcatgaccattgggatgttaattgagagtatggccgggaagtctgcagctttgcatggtctctgccatgatgctacacccttcatcttctcagaggagaactcggccttagaatactttggtgagatgttaaaggctgctggctacaatttctatggcaccgagaggttatatagtggcatcagtgggctagaactggaagcagacatcttcataggagtggtttattatcagcgcttacgccatatggtctcagacaaatttcaagtaaggacaactggagcccgagacagagtcaccaaccagcctattgggggaagaaatgtccagggtggaatccgttttggggagatggaacgggatgcgcttttagctcatggtacatcttttctccttcatgaccgcctcttcaactgctcagatcggtcggtagcccatgtgtgtgtgaagtgtggcagtttactctctccactgttggagaagccacccccttcttggtctgccatgcgcaacagaaaatacaactgtactctgtgtagtcgcagtgacactatcgatactgtttctgtgccttatgtttttcggtattttgtagctgaactggcagctatgaacatcaaagtgaaactggatgttgtttaacttgatgttgaccttttggattaagaggactatcagattaaagcaaaatgtaattttaattcaatgaagatatcattaccaggttactcttgagatttttcaacggtgttagaactctcaaccaagacctgaaaaccaagtatgcaaggtttctgaatctctctggtagattaactattgacaatgattttctgttatctttgttcaaaaagttcatgtcttctcaaaatatgaaatattgataaatggaagagcatacggtgacaagtctcctttccaaccccaggttccctacaccctgctctcagcaggcagtgagtgtcacacacctgttaatccatcttgagcaggacagtactatacaaatagaatgcaagctgtaatgtaattttatattttcttatagccacgttgaagtaaaaacaaacaggtacagtgttttttaccagctttatagaagtacagttgttacatatttaatgaatacaatttgatgggtctgactatatgcacacacctttgataccatcaccacaatcagggtaataaacatacctgtcatctccacaagtttcctcctgcccctttgttttttgctttttggttgctgttgagtttttgttttgtcttctgtggtaagaacacttaactcaagacctaccctcttaacaaatctttaagtgcacgatatagtattgttaattccaggcaccatgttgtacaacagatctttagaccttacttgtcttgcataactgaagctttatacctgttgaacaactctccatttccctggcccctagcaaccacccttctaccctgtttctatgagtttgactattacagatatctcatatagtgggatcatgcaatatttgtcctgtgactggcttatttcacttagcatagtgaaataagattcatccattttggaagccaggcatggtgctgtgcatctatagtccctgctatttgagaggctgaggtgggaggatcatttgagtgcaggagttcaaggacagcctgggtaatataggaagaccctgtcttgaagaccctgacctcaagtgatccacccacctcggcctccgaaagtgctaggattacaggtgtgagccactgtgcctggcctccggtgagtattttatatttagtctacacttccatacttggcttttttctgcttttatattgatctgctttcatagcagtgtgtagagtgccacttatgttttctttcttgtgtacagtattttattgtatggatttaccatcccctgtgtatttaagttgttccattctttggccattataacttttttctgcaaatattctggtgacttatctttggccattataaactgttgataat

SEQ ID NO: 334073 - DNA, 6143 bp, Homo sapiens
tttttttacactttaaatgtgtggtttattgtatgccagttataacgcaatatagctgttaaacacaaacacaataaagttgaaaaaccagcaggcattccctgattaatcagtattctggggaggtaaggggctcacaggaacgcaaaagaaattcaggctgtaaatccagttggacgccccgctgccccatcccctccatccgggaccgcccgactcctctcccacctccttccccaggcctcccccaggcctccagtccggaagatgcgacgaggttagcggggcccgaccactccttggcttcccaggggtgagcctcgcgagttaggagttgggtagagagtcagcccggggcccggcatccgctttttcgttgaagcaacgactttggccggatgactccccagggtcggcatcagcgtgggactgggaacaggtgaagggaaacagaagagagcctgagaagaccgctctcctccgatcctaattgactgagccaatgagagccaaagaggtcacatgctcaactgggcggggagcgggtttccacctgcggcatctttcgcgagcggggagatgagtggggcggaatatgggagaaagggagggcccgccacgctctggctggacacggccttaatcggcccgttcactcgacgtttttggttctacgttgaccccgagaaaccgaaaccgcagggcctagggcgggtggaacgagagggaactacatttcccagcaggctgcggaaacgggactgcggccactacttccggcgtgtaccgagagactggcgtccggcgtgtaccgagagactggcgtccggtgtgcaggtggccacatggatcctggcagccggtggcggaacctgcccagcgggcctagcctaaagcacttgactgacccctcttatggaatcccgcgggaacagcaaaaggcagcgttgcaggagctgacgcgggcgcacgtggagtccttcaactacgctgtgcacgagggtctcggcctcgcggtgcaggctatacctccctttgaatttgctttcaaagatgagcgtatctcttttactattctggatgctgttatcagtccacctacagttccaaaagggaccatctgcaaagaggccaatgtttatccagcagaatgccggggccgaaggagtacctaccgtgggaagttgacagctgatatcaactgggcagtgaatggaatctcaaaaggaatcattaagcagtttcttggctatgttcccatcatggtgaaatccaagctttgcaacttacgtaaccttcccccacaagccctcattgagcaccatgaggaggcagaggaaatggggggctattttataatcaatggcattgaaaaagtcatccgaatgttgattatgcctcggagaaattttcccattgcaatgataagaccaaaatggaaaaccagagggcctggttatactcagtatggagtttcaatgcactgtgtgagggaagaacattccgctgtcaatatgaacctccactacttggaaaatggcacagttatgttgaactttatttaccgaaaagaactgttctttcttcctttgggatttgcacttaaggcacttgtcagcttttctgattatcagatctttcaggagctcatcaaaggaaaagaggatgattctttccttaggaactctgtttctcagatgttaaggattgtaatggaagagggttgtttgacacaaaaacaggtccttaactacctaggtgaatgcttcagagtaaaactcaatgttcctgactggtacccaaatgagcaagctgcggagttcctgtttaaccagtgcatctgtatccacttgaaatccaatactgaaaagttttatatgctttgtctcatgacgcgaaagctctttgctttagccaaaggagagtgcatggaggacaatcctgatagtttggtgaaccaggaagtcctcacaccgggtcagctcttccttatgttcctgaaggaaaaactggaaggttggttagtgtctattaaaatagcttttgataagaaggctcagaagaccagtgtttccatgaacactgacaatttgatgaggatttttacaatgggcatagaccttacaaaaccatttgaatacctttttgctactgggaatctgcgttctaaaacaggtcttggcctcctacaagattctggactttgtgttgtggctgacaagctgaacttcatacgctacctctcccatttccgctgcgtgcacagaggggctgattttgccaagatgaggaccaccacagtacgcaggctgctgccagagtcctggggcttcctttgtcccgtgcataccccagacggggagccctgtggcctgatgaaccacctaactgccgtatgtgaggttgtcacacagtttgtgtatacggcatctattccagctttactgtgcaacttgggggtcactcccattgatggagctccccaccgatcatacagtgagtgctaccctgtcctgctggacggtgtcatggttggctgggtggataaggatcttgctccaggcatcgcagattctcttcgtcattttaaggtgttgagagagaaaagaattcctccctggatggaagtggtccttatacccatgacaggaaaaccaagtctgtacccaggattgttcctttttaccactccttgtagactggtacggcctgtgcagaacttagcattgggcaaagaagagctaattggaactatggaacagatcttcatgaatgtcgctatctttgaggatgaagtttttgctggagttaccacacaccaggaactctttccacacagcctgctgagtgtgattgccaacttcatccctttctctgatcacaaccagagtccacggaacatgtaccaatgccagatgggtaagcaaactatgggctttccacttctcacttatcaagaccgatcggataacaaactgtatcgtcttcagactcctcagagtcccttggtgagaccctccatgtatgattattatgacatggataactatccaattgggaccaatgccatcgttgctgtgatttcttacactggctatgatatggaagatgccatgattgtgaataaggcctcttgggaacgaggctttgcccatggaagtgtctacaagtctgagttcatagacctctctgaaaaaattaaacaaggagatagtagcctggtgtttggcatcaaacctggtgacccacgcgttctgcagaagttagatgacgatggattgccgtttataggagcaaaactgcagtacggagatccgtattacagctacctcaacctcaacaccggggaaagttttgtgatgtactataagagtaaagaaaattgtgttgtggataacatcaaagtgtgcagtaatgacactgggagtggaaaattcaagtgtgtttgcatcactatgagagtgcctcggaacccaactatcggagataaatttgccagtcgccatgggcagaagggcattttaagcagattgtggccggctgaggacatgccttttactgagagtgggatggtcccagacattctgttcaatccccatggttttccatcccgcatgaccattgggatgttaattgagagtatggccgggaagtctgcagctttgcatggtctctgccatgatgctacacccttcatcttctcagaggagaactcggccttagaatactttggtgagatgttaaaggctgctggctacaatttctatggcaccgagaggttatatagtggcatcagtgggctagaactggaagcagacatcttcataggagtggtttattatcagcgcttacgccatatggtctcagacaaatttcaagtaaggacaactggagcccgagacagagtcaccaaccagcctattgggggaagaaatgtccagggtggaatccgttttggggagatggaacgggatgcgcttttagctcatggtacatcttttctccttcatgaccgcctcttcaactgctcagatcggtcggtagcccatgtgtgtgtgaagtgtggcagtttactctctccactgttggagaagccacccccttcttggtctgccatgcgcaacagaaaatacaactgtactctgtgtagtcgcagtgacactatcgatactgtttctgtgccttatgtttttcggtattttgtagctgaactggcagctatgaacatcaaagtgaaactggatgttgtttaacttgatgttgaccttttggattaagaggactatcagattaaagcaaaatgtaattttaattcaatgaagatatcattaccaggttactcttgagatttttcaacggtgttagaactctcaaccaagacctgaaaaccaagtatgcaaggtttctgaatctctctggtagattaactattgacaatgattttctgttatctttgttcaaaaagttcatgtcttctcaaaatatgaaatattgataaatggaagagcatacggtgacaagtctcctttccaaccccaggttccctacaccctgctctcagcaggcagtgagtgtcacacacctgttaatccatcttgagcaggacagtactatacaaatagaatgcaagctgtaatgtaattttatattttcttatagccacgttgaagtaaaaacaaacaggtacagtgttttttaccagctttatagaagtacagttgttacatatttaatgaatacaatttgatgggtctgactatatgcacacacctttgataccatcaccacaatcagggtaataaacatacctgtcatctccacaagtttcctcctgcccctttgttttttgctttttggttgctgttgagtttttgttttgtcttctgtggtaagaacacttaactcaagacctaccctcttaacaaatctttaagtgcacgatatagtattgttaattccaggcaccatgttgtacaacagatctttagaccttacttgtcttgcataactgaagctttatacctgttgaacaactctccatttccctggcccctagcaaccacccttctaccctgtttctatgagtttgactattacagatatctcatatagtgggatcatgcaatatttgtcctgtgactggcttatttcacttagcatagtgaaataagattcatccattttggaagccaggcatggtgctgtgcatctatagtccctgctatttgagaggctgaggtgggaggatcatttgagtgcaggagttcaaggacagcctgggtaatataggaagaccctgtcttgaagaccctgacctcaagtgatccacccacctcggcctccgaaagtgctaggattacaggtgtgagccactgtgcctggcctccggtgagtattttatatttagtctacacttccatacttggcttttttctgcttttatattgatctgctttcatagcagtgtgtagagtgccacttatgttttctttcttgtgtacagtattttattgtatggatttaccatcccctgtgtatttaagttgttccattctttggccattataacttttttctgcaaatattctggtgacttatctttggccattataaactgttgataatagatcatcttgtatatacttctgcaattataagatgttttttgatgaaagctttcctaaggtaattctttcctgagtttggttcagatggtctgtcactaattataaggcagataggaacagacagaaaaatctatcatttcaagataggcttagcaggatgggcgcagtgccactgcactccagcctgggtgacagagcaggaccctgtctctattttataaattaaaaaaggctgggtgtggtggctcacacccataatcccaacactttggctcagcagattgcttgaacccaggaattcaagtccaatctgggcaacatggggaaaccccagctctacaaaaaaaattagcctggtgtggtggcacatgcctgtagttccagctactcaggaggctgaggtgggagaatctcctgagcctggaaggtccaggcagtgagccaagattgtgccaccacactccagcctgggcgacagaatgagaccctgtctcaaaaaaaaaaaaaaaaaaaaag

SEQ ID NO: 334074 - DNA, 3199 bp, Homo sapiens
atgtgattgtgctgtttgtttcctttaccaggggtcactcccattgatggagctccccaccgatcatacagtgagtgctaccctgtcctgctggacggtgtcatggttggctgggtggataaggatcttgctccaggcatcgcagattctcttcgtcattttaaggtgttgagagagaaaagaattcctccctggatggaagtggtccttatacccatgacaggaaaaccaagtctgtacccaggattgttcctttttaccactccttgtagactggtacggcctgtgcagaacttagcattgggcaaagaagagctaattggaactatggaacagatcttcatgaatgtcgctatctttgaggatgaagtttttgctggagttaccacacaccaggaactctttccacacagcctgctgagtgtgattgccaacttcatccctttctctgatcacaaccagagtccacggaacatgtaccaatgccagatgggtaagcaaactatgggctttccacttctcacttatcaagaccgatcggataacaaactgtatcgtcttcagactcctcagagtcccttggtgagaccctccatgtatgattattatgacatggataactatccaattgggaccaatgccatcgttgctgtgatttcttacactggctatgatatggaagatgccatgattgtgaataaggcctcttgggaacgaggctttgcccatggaagtgtctacaagtctgagttcatagacctctctgaaaaaattaaacaaggagatagtagcctggtgtttggcatcaaacctggtgacccacgcgttctgcagaagttagatgacgatggattgccgtttataggagcaaaactgcagtacggagatccgtattacagctacctcaacctcaacaccggggaaagttttgtgatgtactataagagtaaagaaaattgtgttgtggataacatcaaagtgtgcagtaatgacactgggagtggaaaattcaagtgtgtttgcatcactatgagagtgcctcggaacccaactatcggagataaatttgccagtcgccatgggcagaagggcattttaagcagattgtggccggctgaggacatgccttttactgagagtgggatggtcccagacattctgttcaatccccatggttttccatcccgcatgaccattgggatgttaattgagagtatggccgggaagtctgcagctttgcatggtctctgccatgatgctacacccttcatcttctcagaggagaactcggccttagaatactttggtgagatgttaaaggctgctggctacaatttctatggcaccgagaggttatatagtggcatcagtgggctagaactggaagcagacatcttcataggagtggtttattatcagcgcttacgccatatggtctcagacaaatttcaagtaaggacaactggagcccgagacagagtcaccaaccagcctattgggggaagaaatgtccagggtggaatccgttttggggagatggaacgggatgcgcttttagctcatggtacatcttttctccttcatgaccgcctcttcaactgctcagatcggtcggtagcccatgtgtgtgtgaagtgtggcagtttactctctccactgttggagaagccacccccttcttggtctgccatgcgcaacagaaaatacaactgtactctgtgtagtcgcagtgacactatcgatactgtttctgtgccttatgtttttcggtattttgtagctgaactggcagctatgaacatcaaagtgaaactggatgttgtttaacttgatgttgaccttttggattaagaggactatcagattaaagcaaaatgtaattttaattcaatgaagatatcattaccaggttactcttgagatttttcaacggtgttagaactctcaaccaagacctgaaaaccaagtatgcaaggtttctgaatctctctggtagattaactattgacaatgattttctgttatctttgttcaaaaagttcatgtcttctcaaaatatgaaatattgataaatggaagagcatacggtgacaagtctcctttccaaccccaggttccctacaccctgctctcagcaggcagtgagtgtcacacacctgttaatccatcttgagcaggacagtactatacaaatagaatgcaagctgtaatgtaattttatattttcttatagccacgttgaagtaaaaacaaacaggtacagtgttttttaccagctttatagaagtacagttgttacatatttaatgaatacaatttgatgggtctgactatatgcacacacctttgataccatcaccacaatcagggtaataaacatacctgtcatctccacaagtttcctcctgcccctttgttttttgctttttggttgctgttgagtttttgttttgtcttctgtggtaagaacacttaactcaagacctaccctcttaacaaatctttaagtgcacgatatagtattgttaattccaggcaccatgttgtacaacagatctttagaccttacttgtcttgcataactgaagctttatacctgttgaacaactctccatttccctggcccctagcaaccacccttctaccctgtttctatgagtttgactattacagatatctcatatagtgggatcatgcaatatttgtcctgtgactggcttatttcacttagcatagtgaaataagattcatccattttggaagccaggcatggtgctgtgcatctatagtccctgctatttgagaggctgaggtgggaggatcatttgagtgcaggagttcaaggacagcctgggtaatataggaagaccctgtcttgaagaccctgacctcaagtgatccacccacctcggcctccgaaagtgctaggattacaggtgtgagccactgtgcctggcctccggtgagtattttatatttagtctacacttccatacttggcttttttctgcttttatattgatctgctttcatagcagtgtgtagagtgccacttatgttttctttcttgtgtacagtattttattgtatggatttaccatcccctgtgtatttaagttgttccattctttggccattataacttttttctgcaaatattctggtgacttatctttggccattataaactgttgataat

SEQ ID NO: 334075 - DNA, 3232 bp, Homo sapiens
gcttaacctccagcccctatccccttcctggaggttgagggtgggggtgaaagtcccaatcctctaatcctggcttggtctttctggtgaccagccccatcctgaagccacctagatgctgccaaccaccagtcttttatttttatttttttgagtcagagtcttgtgcctcagcctcctgagtagctgagactacaggtgttgagagagaaaagaattcctccctggatggaagtggtccttatacccatgacaggaaaaccaagtctgtacccaggattgttcctttttaccactccttgtagactggtacggcctgtgcagaacttagcattgggcaaagaagagctaattggaactatggaacagatcttcatgaatgtcgctatctttgaggatgaagtttttgctggagttaccacacaccaggaactctttccacacagcctgctgagtgtgattgccaacttcatccctttctctgatcacaaccagagtccacggaacatgtaccaatgccagatgggtaagcaaactatgggctttccacttctcacttatcaagaccgatcggataacaaactgtatcgtcttcagactcctcagagtcccttggtgagaccctccatgtatgattattatgacatggataactatccaattgggaccaatgccatcgttgctgtgatttcttacactggctatgatatggaagatgccatgattgtgaataaggcctcttgggaacgaggctttgcccatggaagtgtctacaagtctgagttcatagacctctctgaaaaaattaaacaaggagatagtagcctggtgtttggcatcaaacctggtgacccacgcgttctgcagaagttagatgacgatggattgccgtttataggagcaaaactgcagtacggagatccgtattacagctacctcaacctcaacaccggggaaagttttgtgatgtactataagagtaaagaaaattgtgttgtggataacatcaaagtgtgcagtaatgacactgggagtggaaaattcaagtgtgtttgcatcactatgagagtgcctcggaacccaactatcggagataaatttgccagtcgccatgggcagaagggcattttaagcagattgtggccggctgaggacatgccttttactgagagtgggatggtcccagacattctgttcaatccccatggttttccatcccgcatgaccattgggatgttaattgagagtatggccgggaagtctgcagctttgcatggtctctgccatgatgctacacccttcatcttctcagaggagaactcggccttagaatactttggtgagatgttaaaggctgctggctacaatttctatggcaccgagaggttatatagtggcatcagtgggctagaactggaagcagacatcttcataggagtggtttattatcagcgcttacgccatatggtctcagacaaatttcaagtaaggacaactggagcccgagacagagtcaccaaccagcctattgggggaagaaatgtccagggtggaatccgttttggggagatggaacgggatgcgcttttagctcatggtacatcttttctccttcatgaccgcctcttcaactgctcagatcggtcggtagcccatgtgtgtgtgaagtgtggcagtttactctctccactgttggagaagccacccccttcttggtctgccatgcgcaacagaaaatacaactgtactctgtgtagtcgcagtgacactatcgatactgtttctgtgccttatgtttttcggtattttgtagctgaactggcagctatgaacatcaaagtgaaactggatgttgtttaacttgatgttgaccttttggattaagaggactatcagattaaagcaaaatgtaattttaattcaatgaagatatcattaccaggttactcttgagatttttcaacggtgttagaactctcaaccaagacctgaaaaccaagtatgcaaggtttctgaatctctctggtagattaactattgacaatgattttctgttatctttgttcaaaaagttcatgtcttctcaaaatatgaaatattgataaatggaagagcatacggtgacaagtctcctttccaaccccaggttccctacaccctgctctcagcaggcagtgagtgtcacacacctgttaatccatcttgagcaggacagtactatacaaatagaatgcaagctgtaatgtaattttatattttcttatagccacgttgaagtaaaaacaaacaggtacagtgttttttaccagctttatagaagtacagttgttacatatttaatgaatacaatttgatgggtctgactatatgcacacacctttgataccatcaccacaatcagggtaataaacatacctgtcatctccacaagtttcctcctgcccctttgttttttgctttttggttgctgttgagtttttgttttgtcttctgtggtaagaacacttaactcaagacctaccctcttaacaaatctttaagtgcacgatatagtattgttaattccaggcaccatgttgtacaacagatctttagaccttacttgtcttgcataactgaagctttatacctgttgaacaactctccatttccctggcccctagcaaccacccttctaccctgtttctatgagtttgactattacagatatctcatatagtgggatcatgcaatatttgtcctgtgactggcttatttcacttagcatagtgaaataagattcatccattttggaagccaggcatggtgctgtgcatctatagtccctgctatttgagaggctgaggtgggaggatcatttgagtgcaggagttcaaggacagcctgggtaatataggaagaccctgtcttgaagaccctgacctcaagtgatccacccacctcggcctccgaaagtgctaggattacaggtgtgagccactgtgcctggcctccggtgagtattttatatttagtctacacttccatacttggcttttttctgcttttatattgatctgctttcatagcagtgtgtagagtgccacttatgttttctttcttgtgtacagtattttattgtatggatttaccatcccctgtgtatttaagttgttccattctttggccattataacttttttctgcaaatattctggtgacttatctttggccattataaactgttgataat

SEQ ID NO: 334076 - DNA, 230 bp, Homo sapiens
atggcacagttatgttgaactttatttaccgaaaagaactgttctttcttcctttgggatttgcacttaaggtatgacttaatgaatgcattcttttgttatgaagaaattcactgggggtagtatcctgtgcacattggatggattctccttgttaaaataatactgtactagttgtctactgctccaaaacaaattacgtcaaaattcaatagcttaaaactcaataa

SEQ ID NO: 334077 - DNA, 291 bp, Homo sapiens
tgaggtttagaaacatttttgattgccagtcttggctaaacttagtgatttggctttaattgtgtctaagaggttaagattgttcagaaagaaaatggttgaagcaattaagatatcaatgagtttctgatttttttgttgtttggttcaataggagtttcaatgcactgtgtgagggaagaacattccgctgtcaatatgaacctccactacttggaaaatggcacagttatgttgaactttatttaccgaaaagaactgttctttcttcctttgggatttgcacttaag

SEQ ID NO: 334078 - DNA, 606 bp, Homo sapiens
gaaaaaatgccttggaaatgcaagcaatttaatagtgtgaattgcatttcaggctatacctccctttgaatttgctttcaaagatgagcgtatctcttttactattctggatgctgttatcagtccacctacagttccaaaagggaccatctgcaaagaggccaatgtttatccagcagaatgccggggccgaaggagtacctaccgtgggaagttgacagtgagtactagtgatactgtgtgactctcaacactgcacatatttgggagtagggcgggtgcctaataaagtttatgccagaaattgctttcttggtgctattgtctaagagatcccaccttctaaatctaaggcataaaataatttaattgatcttcttcctcagtctttgaaaatactcatttgttctcgtaaatgcagatatttctgttaagtaactttttctcttgttttcatttaggctgatatcaactgggcagtgaatggaatctcaaaaggaatcattaagcagtttcttggctatgttcccatcatggtgaaatccaagctttgcaacttacgtaaccttcccccacaagccctcattgagcaccatgaggaggcag

SEQ ID NO: 334079 - DNA, 4651 bp, Homo sapiens
tttttttacactttaaatgtgtggtttattgtatgccagttataacgcaatatagctgttaaacacaaacacaataaagttgaaaaaccagcaggcattccctgattaatcagtattctggggaggtaaggggctcacaggaacgcaaaagaaattcaggctgtaaatccagttggacgccccgctgccccatcccctccatccgggaccgcccgactcctctcccacctccttccccaggcctcccccaggcctccagtccggaagatgcgacgaggttagcggggcccgaccactccttggcttcccaggggtgagcctcgcgagttaggagttgggtagagagtcagcccggggcccggcatccgctttttcgttgaagcaacgactttggccggatgactccccagggtcggcatcagcgtgggactgggaacaggtgaagggaaacagaagagagcctgagaagaccgctctcctccgatcctaattgactgagccaatgagagccaaagaggtcacatgctcaactgggcggggagcgggtttccacctgcggcatctttcgcgagcggggagatgagtggggcggaatatgggagaaagggagggcccgccacgctctggctggacacggccttaatcggcccgttcactcgacgtttttggttctacgttgaccccgagaaaccgaaaccgcagggcctagggcgggtggaacgagagggaactacatttcccagcaggctgcggaaacgggactgcggccactacttccggcgtgtaccgagagactggcgtccggcgtgtaccgagagactggcgtccggtgtgcaggtggccacatggatcctggcagccggtggcggaacctgcccagcgggcctagcctaaagcacttgactgacccctcttatggaatcccgcgggaacagcaaaaggcagcgttgcaggagctgacgcgggcgcacgtggagtccttcaactacgctgtgcacgagggtctcggcctcgcggtgcaggctgatatcaactgggcagtgaatggaatctcaaaaggaatcattaagcagtttcttggctacgttcccatcatggtgaaatccaagctttgcaacttacgtaaccttcccccacaagccctcattgagcaccatgaggaggcagaggaaatggggggctattttataatcaatggcattgaaaaagtcatccgaatgttgattatgcctcggagaaattttcccattgcaatgataagaccaaaatggaaaaccagagggcctggttatactcagtatggagtttcaatgcactgtgtgagggaagaacattccgctgtcaatatgaacctccactacttggaaaatggcacagttatgttgaactttatttaccgaaaagaactgttctttcttcctttgggatttgcacttaaggcacttgtcagcttttctgattatcagatctttcaggagctcatcaaaggaaaagaggatgattctttccttaggaactctgtttctcagatgttaaggattgtaatggaagagggttgtttgacacaaaaacaggtccttaactacctaggtgaatgcttcagagtaaaactcaatgttcctgactggtacccaaatgagcaagctgcggagttcctgtttaaccagtgcatctgtatccacttgaaatccaatactgaaaagttttatatgctttgtctcatgacgcgaaagctctttgctttagccaaaggagagtgcatggaggacaatcctgatagtttggtgaaccaggaagtcctcacaccgggtcagctcttccttatgttcctgaaggaaaaactggaaggttggttagtgtctattaaaatagcttttgataagaaggctcagaagaccagtgtttccatgaacactgacaatttgatgaggatttttacaatgggcatagaccttacaaaaccatttgaatacctttttgctactgggaatctgcgttctaaaacaggtcttggcctcctacaagattctggactttgtgttgtggctgacaagctgaacttcatacgctacctctcccatttccgctgcgtgcacagaggggctgattttgccaagatgaggaccaccacagtacgcaggctgctgccagagtcctggggcttcctttgtcccgtgcataccccagacggggagccctgtggcctgatgaaccacctaactgccgtatgtgaggttgtcacacagtttgtgtatacggcatctattccagctttactgtgcaacttgggggtcactcccattgatggagctccccaccgatcatacagtgagtgctaccctgtcctgctggacggtgtcatggttggctgggtggataaggatcttgctccaggcatcgcagattctcttcgtcattttaaggtgttgagagagaaaagaattcctccctggatggaagtggtccttatacccatgacaggaaaaccaagtctgtacccaggattgttcctttttaccactccttgtagactggtacggcctgtgcagaacttagcattgggcaaagaagagctaattggaactatggaacagatcttcatgaatgtcgctatctttgaggatgaagtttttgctggagttaccacacaccaggaactctttccacacagcctgctgagtgtgattgccaacttcatccctttctctgatcacaaccagagtccacggaacatgtaccaatgccagatgggtaagcaaactatgggctttccacttctcacttatcaagaccgatcggataacaaactgtatcgtcttcagactcctcagagtcccttggtgagaccctccatgtatgattattatgacatggataactatccaattgggaccaatgccatcgttgctgtgatttcttacactggctatgatatggaagatgccatgattgtgaataaggcctcttgggaacgaggctttgcccatggaagtgtctacaagtctgagttcatagacctctctgaaaaaattaaacaaggagatagtagcctggtgtttggcatcaaacctggtgacccacgcgttctgcagaagttagatgacgatggattgccgtttataggagcaaaactgcagtacggagatccgtattacagctacctcaacctcaacaccggggaaagttttgtgatgtactataagagtaaagaaaattgtgttgtggataacatcaaagtgtgcagtaatgacactgggagtggaaaattcaagtgtgtttgcatcactatgagagtgcctcggaacccaactatcggagataaatttgccagtcgccatgggcagaagggcattttaagcagattgtggccggctgaggacatgccttttactgagagtgggatggtcccagacattctgttcaatccccatggttttccatcccgcatgaccattgggatgttaattgagagtatggccgggaagtctgcagctttgcatggtctctgccatgatgctacacccttcatcttctcagaggagaactcggccttagaatactttggtgagatgttaaaggctgctggctacaatttctatggcaccgagaggttatatagtggcatcagtgggctagaactggaagcagacatcttcataggagtggtttattatcagcgcttacgccatatggtctcagacaaatttcaagtaaggacaactggagcccgagacagagtcaccaaccagcctattgggggaagaaatgtccagggtggaatccgttttggggagatggaacgggatgcgcttttagctcatggtacatcttttctccttcatgaccgcctcttcaactgctcagatcggtcggtagcccatgtgtgtgtgaagtgtggcagtttactctctccactgttggagaagccacccccttcttggtctgccatgcgcaacagaaaatacaactgtactctgtgtagtcgcagtgacactatcgatactgtttctgtgccttatgtttttcggtattttgtagctgaactggcagctatgaacatcaaagtgaaactggatgttgtttaacttgatgttgaccttttggattaagaggactatcagattaaagcaaaatgtaattttaattcaatgaagatatcattaccaggttactcttgagatttttcaacggtgttagaactctcaaccaagacctgaaaaccaagtatgcaaggtttctgaatctctctggtagattaactattgacaatgattttctgttatctttgttcaaaaagttcatgtcttctcaaaatatgaaatattgataaatggaagagcatacggtgacaagtctcctttccaaccccaggttccctacaccctgctctcagcaggcagtgagtgtcacacacctgttaatccatcttgagcaggacagtactatacaaatagaatgcaagctgtaatgtaattttatattttcttatagccacgttgaagtaaaaacaaacaggtacagtgttttttaccagctttatagaagtacagttgttacatatttaatgaatacaatttgatgggtctgactatatgcacacacctttgataccatcaccacaatcagggtaataaacatacctgtcatctcc

SEQ ID NO: 334080 - DNA, 5457 bp, Homo sapiens
tttttttacactttaaatgtgtggtttattgtatgccagttataacgcaatatagctgttaaacacaaacacaataaagttgaaaaaccagcaggcattccctgattaatcagtattctggggaggtaaggggctcacaggaacgcaaaagaaattcaggctgtaaatccagttggacgccccgctgccccatcccctccatccgggaccgcccgactcctctcccacctccttccccaggcctcccccaggcctccagtccggaagatgcgacgaggttagcggggcccgaccactccttggcttcccaggggtgagcctcgcgagttaggagttgggtagagagtcagcccggggcccggcatccgctttttcgttgaagcaacgactttggccggatgactccccagggtcggcatcagcgtgggactgggaacaggtgaagggaaacagaagagagcctgagaagaccgctctcctccgatcctaattgactgagccaatgagagccaaagaggtcacatgctcaactgggcggggagcgggtttccacctgcggcatctttcgcgagcggggagatgagtggggcggaatatgggagaaagggagggcccgccacgctctggctggacacggccttaatcggcccgttcactcgacgtttttggttctacgttgaccccgagaaaccgaaaccgcagggcctagggcgggtggaacgagagggaactacatttcccagcaggctgcggaaacgggactgcggccactacttccggcgtgtaccgagagactggcgtccggcgtgtaccgagagactggcgtccggtgtgcaggtggccacatggatcctggcagccggtggcggaacctgcccagcgggcctagcctaaagcacttgactgacccctcttatggaatcccgcgggaacagcaaaaggcagcgttgcaggagctgacgcgggcgcacgtggagtccttcaactacgctgtgcacgagggtctcggcctcgcggtgcaggctgatatcaactgggcagtgaatggaatctcaaaaggaatcattaagcagtttcttggctacgttcccatcatggtgaaatccaagctttgcaacttacgtaaccttcccccacaagccctcattgagcaccatgaggaggcagaggaaatggggggctattttataatcaatggcattgaaaaagtcatccgaatgttgattatgcctcggagaaattttcccattgcaatgataagaccaaaatggaaaaccagagggcctggttatactcagtatggagtttcaatgcactgtgtgagggaagaacattccgctgtcaatatgaacctccactacttggaaaatggcacagttatgttgaactttatttaccgaaaagaactgttctttcttcctttgggatttgcacttaaggcacttgtcagcttttctgattatcagatctttcaggagctcatcaaaggaaaagaggatgattctttccttaggaactctgtttctcagatgttaaggattgtaatggaagagggttgtttgacacaaaaacaggtccttaactacctaggtgaatgcttcagagtaaaactcaatgttcctgactggtacccaaatgagcaagctgcggagttcctgtttaaccagtgcatctgtatccacttgaaatccaatactgaaaagttttatatgctttgtctcatgacgcgaaagctctttgctttagccaaaggagagtgcatggaggacaatcctgatagtttggtgaaccaggaagtcctcacaccgggtcagctcttccttatgttcctgaaggaaaaactggaaggttggttagtgtctattaaaatagcttttgataagaaggctcagaagaccagtgtttccatgaacactgacaatttgatgaggatttttacaatgggcatagaccttacaaaaccatttgaatacctttttgctactgggaatctgcgttctaaaacaggtcttggcctcctacaagattctggactttgtgttgtggctgacaagctgaacttcatacgctacctctcccatttccgctgcgtgcacagaggggctgattttgccaagatgaggaccaccacagtacgcaggctgctgccagagtcctggggcttcctttgtcccgtgcataccccagacggggagccctgtggcctgatgaaccacctaactgccgtatgtgaggttgtcacacagtttgtgtatacggcatctattccagctttactgtgcaacttgggggtcactcccattgatggagctccccaccgatcatacagtgagtgctaccctgtcctgctggacggtgtcatggttggctgggtggataaggatcttgctccaggcatcgcagattctcttcgtcattttaaggtgttgagagagaaaagaattcctccctggatggaagtggtccttatacccatgacaggaaaaccaagtctgtacccaggattgttcctttttaccactccttgtagactggtacggcctgtgcagaacttagcattgggcaaagaagagctaattggaactatggaacagatcttcatgaatgtcgctatctttgaggatgaagtttttgctggagttaccacacaccaggaactctttccacacagcctgctgagtgtgattgccaacttcatccctttctctgatcacaaccagagtccacggaacatgtaccaatgccagatgggtaagcaaactatgggctttccacttctcacttatcaagaccgatcggataacaaactgtatcgtcttcagactcctcagagtcccttggtgagaccctccatgtatgattattatgacatggataactatccaattgggaccaatgccatcgttgctgtgatttcttacactggctatgatatggaagatgccatgattgtgaataaggcctcttgggaacgaggctttgcccatggaagtgtctacaagtctgagttcatagacctctctgaaaaaattaaacaaggagatagtagcctggtgtttggcatcaaacctggtgacccacgcgttctgcagaagttagatgacgatggattgccgtttataggagcaaaactgcagtacggagatccgtattacagctacctcaacctcaacaccggggaaagttttgtgatgtactataagagtaaagaaaattgtgttgtggataacatcaaagtgtgcagtaatgacactgggagtggaaaattcaagtgtgtttgcatcactatgagagtgcctcggaacccaactatcggagataaatttgccagtcgccatgggcagaagggcattttaagcagattgtggccggctgaggacatgccttttactgagagtgggatggtcccagacattctgttcaatccccatggttttccatcccgcatgaccattgggatgttaattgagagtatggccgggaagtctgcagctttgcatggtctctgccatgatgctacacccttcatcttctcagaggagaactcggccttagaatactttggtgagatgttaaaggctgctggctacaatttctatggcaccgagaggttatatagtggcatcagtgggctagaactggaagcagacatcttcataggagtggtttattatcagcgcttacgccatatggtctcagacaaatttcaagtaaggacaactggagcccgagacagagtcaccaaccagcctattgggggaagaaatgtccagggtggaatccgttttggggagatggaacgggatgcgcttttagctcatggtacatcttttctccttcatgaccgcctcttcaactgctcagatcggtcggtagcccatgtgtgtgtgaagtgtggcagtttactctctccactgttggagaagccacccccttcttggtctgccatgcgcaacagaaaatacaactgtactctgtgtagtcgcagtgacactatcgatactgtttctgtgccttatgtttttcggtattttgtagctgaactggcagctatgaacatcaaagtgaaactggatgttgtttaacttgatgttgaccttttggattaagaggactatcagattaaagcaaaatgtaattttaattcaatgaagatatcattaccaggttactcttgagatttttcaacggtgttagaactctcaaccaagacctgaaaaccaagtatgcaaggtttctgaatctctctggtagattaactattgacaatgattttctgttatctttgttcaaaaagttcatgtcttctcaaaatatgaaatattgataaatggaagagcatacggtgacaagtctcctttccaaccccaggttccctacaccctgctctcagcaggcagtgagtgtcacacacctgttaatccatcttgagcaggacagtactatacaaatagaatgcaagctgtaatgtaattttatattttcttatagccacgttgaagtaaaaacaaacaggtacagtgttttttaccagctttatagaagtacagttgttacatatttaatgaatacaatttgatgggtctgactatatgcacacacctttgataccatcaccacaatcagggtaataaacatacctgtcatctccacaagtttcctcctgcccctttgttttttgctttttggttgctgttgagtttttgttttgtcttctgtggtaagaacacttaactcaagacctaccctcttaacaaatctttaagtgcacgatatagtattgttaattccaggcaccatgttgtacaacagatctttagaccttacttgtcttgcataactgaagctttatacctgttgaacaactctccatttccctggcccctagcaaccacccttctaccctgtttctatgagtttgactattacagatatctcatatagtgggatcatgcaatatttgtcctgtgactggcttatttcacttagcatagtgaaataagattcatccattttggaagccaggcatggtgctgtgcatctatagtccctgctatttgagaggctgaggtgggaggatcatttgagtgcaggagttcaaggacagcctgggtaatataggaagaccctgtcttgaagaccctgacctcaagtgatccacccacctcggcctccgaaagtgctaggattacaggtgtgagccactgtgcctggcctccggtgagtattttatatttagtctacacttccatacttggcttttttctgcttttatattgatctgctttcatagcagtgtgtagagtgccacttatgttttctttcttgtgtacagtattttattgtatggatttaccatcccctgtgtatttaagttgttccattctttggccattataacttttttctgcaaatattctggtgacttatctttggccattataaactgttgataat
